United States Patent Application Publication US 2021/0170017 A1 - sequence listing, part 3

SEQ ID NO: 2591 - RNA, 2193 nt, Artificial Sequence
  mRNA product Design f-1 comprising derived and/or modified sequence from HRSV(A2)__F_DSCav1_mut2 (opt1)
gggagagcggcucggccauuuugucccagucaguccggaggcugcggcugcagaaguaccgccugcggaguaacugcaaagaagcuuaccauggagcugcucauccugaaggccaacgccaucaccaccauccugacggcggugaccuucugcuucgccagcggccagaacaucaccgaggaguucuaccaguccacgugcagcgccgucuccaagggguaccucggcgcccugcggaccggcugguacaccuccgugaucaccaucgagcugagcaacaucaaggagaacaagugcaacgggaccgacgccaaggugaagcucaucaagcaggagcuggacaaguacaagaacgcggucacggaccugcagcuccugaugcaguccaccccggcaaccggcuccggcuccgccaucugcagcggcgucgccgugugcaaggugcugcaccucgagggggaggucaacaagaucaagagcgcccugcuguccaccaacaaggccguggugagccucuccaacggcgucagcgugcugaccuucaaggugcuggaccucaagaacuacaucgacaagcagcugcugcccauccugaacaagcagagcugcuccauccccaacaucgagacggugaucgaguuccagcagaagaacaaccggcuccuggagaucacccgcgaguucagcgugaacgccggggucaccacccccguguccacguacaugcugaccaacagcgagcuccugucccugaucaacgacaugccgaucaccaacgaccagaagaagcucaugagcaacaacgugcagaucguccggcagcaguccuacagcaucaugugcaucaucaaggaggaggugcuggcguacgugguccagcugccccucuacggcgugaucgacacccccugcuggaagcugcacacgagcccccugugcaccaccaacaccaaggagggguccaacaucugccucacgcgcaccgaccggggcugguacugcgacaacgccggcagcgucuccuucuucccgcaggccgagaccugcaaggugcagagcaaccgcguguucugcgacaccaugaacucccugacgcugcccagcgagguaaaccucugcaacgucgacaucuucaaccccaaguacgacugcaagaucaugaccuccaagaccgacgugagcuccagcgugaucaccucccugggggccaucgucagcugcuacggcaagacgaagugcaccgccagcaacaagaaccgggggaucaucaagaccuucuccaacggcugcgacuacgugagcaacaagggcguggacaccguguccgucgggaacacccuguacugcgugaacaagcaggagggccagagccucuacgugaagggggagcccaucaucaacuucuacgacccgcuggucuuccccuccgacgaguucgacgcgagcaucucccaggugaacgagaagaucaaccagagccuggccuucauccgcaaguccgacgagcugcuccacaacgugaacgccggcaagagcacgaccaacaucaugaucaccaccaucaucaucgucaucaucgugauccugcugucccucaucgccguggggcugcugcucuacugcaaggcccggagcacgcccgucacccuguccaaggaccagcugagcggcaucaacaacaucgcguucuccaacugaggacuagugaagggaacacccaaauuuaauucagccuuaagcacaauuaauuaagagugaaacguaauuguacaagcaguuggucacccaccauagggcaugaucaacaccgcaaccuuuccuuuuucccccagugauucugaaaaaccccucuucccuucagcuugcuuagauguuccaaauuuaguaagcuuaaggcggccuacagaagaaaaagaaaaaaaaggccacaaaaguucccucucacuuucaguaaauaaaauaaaagcagcaacagaaauaaagaaauaaaugaaauucaaaaugaaauaaauauuguguugugcagcauuaaaaaaucaauaaaaauuaaaaaugagcaagaucuaaaaaaaaaaaaaaaaaaaaaaaaaaaaaaaaaaaaaaaaaaaaaaaaaaaaaaaaaaaaaaaaugcaucccccccccccccccccccccccccccccccaaaggcucuuuucagagccaccagaauu

SEQ ID NO: 2592 - RNA, 2193 nt, Artificial Sequence
  mRNA product Design f-1 comprising derived and/or modified sequence from HRSV(A2)__F_DSCav1_mut2 (opt1)
gggagagcggcucggccauuuugucccagucaguccggaggcugcggcugcagaaguaccgccugcggaguaacugcaaagaagcuuaccauggagcugcucauccugaaggccaacgccaucaccaccauccugacggcggugaccuucugcuucgccagcggccagaacaucaccgaggaguucuaccaguccacgugcagcgccgucuccaagggguaccucggcgcccugcgcaccgggugguacaccagcgugaucaccaucgagcuguccaacaucaaggagaacaagugcaacggcaccgacgccaaggugaagcucaucaagcaggagcuggacaaguacaagaacgcggucacggaccugcagcuccugaugcagagcacccccgccaccggguccggcagcgccaucugcuccggcguggccgugugcaagguccugcaccucgagggggaggugaacaagaucaagagcgcgcugcuguccaccaacaaggccguggucagccucuccaacggcgugagcgugcugacguucaagguccuggaccucaagaacuacaucgacaagcagcugcugccgauccucaacaagcaguccugcagcauccccaacaucgagaccgugaucgaguuccagcagaagaacaaccggcugcuggagaucacccgcgaguucuccgugaacgccggggucaccacgcccgugagcaccuacaugcucaccaacuccgagcugcugagccucaucaacgacaugcccaucaccaacgaccagaagaagcugaugagcaacaacgugcagaucguccggcagcaguccuacagcaucaugugcaucaucaaggaggaggugcuggccuacgugguccagcucccgcuguacggcgugaucgacacgcccugcuggaagcugcacaccagcccccucugcaccaccaacacgaaggagggguccaacaucugccugacccgcaccgaccggggcugguacugcgacaacgccggcuccgugagcuucuucccccaggcggagaccugcaagguccaguccaaccgcguguucugcgacacgaugaacagccugacccucccguccgaggucaaccugugcaacguggacaucuucaaccccaaguacgacugcaagaucaugaccagcaagaccgacguguccagcuccgucaucacgagccugggggccaucguguccugcuacggcaagaccaagugcaccgccagcaacaagaaccgggggaucaucaagaccuucuccaacggcugcgacuacgugagcaacaagggcgucgacacgguguccguggggaacacccucuacugcgucaacaagcaggagggccagagccuguacgugaagggggagcccaucaucaacuucuacgacccccugguguucccgagcgacgaguucgacgccuccaucagccaggucaacgagaagaucaaccagucccucgccuucauccgcaagagcgacgagcugcugcacaacgugaacgcgggcaaguccaccaccaacaucaugaucaccacgaucaucaucgugaucaucgucauccuccugagccugaucgccguggggcuccugcuguacugcaaggcccgguccacccccgugacccugagcaaggaccagcucuccggcaucaacaacaucgccuucagcaacugaggacuagugaagggaacacccaaauuuaauucagccuuaagcacaauuaauuaagagugaaacguaauuguacaagcaguuggucacccaccauagggcaugaucaacaccgcaaccuuuccuuuuucccccagugauucugaaaaaccccucuucccuucagcuugcuuagauguuccaaauuuaguaagcuuaaggcggccuacagaagaaaaagaaaaaaaaggccacaaaaguucccucucacuuucaguaaauaaaauaaaagcagcaacagaaauaaagaaauaaaugaaauucaaaaugaaauaaauauuguguugugcagcauuaaaaaaucaauaaaaauuaaaaaugagcaagaucuaaaaaaaaaaaaaaaaaaaaaaaaaaaaaaaaaaaaaaaaaaaaaaaaaaaaaaaaaaaaaaaaugcaucccccccccccccccccccccccccccccccaaaggcucuuuucagagccaccagaauu

SEQ ID NO: 2593 - RNA, 2193 nt, Artificial Sequence
  mRNA product Design f-1 comprising derived and/or modified sequence from HRSV(A2)__F_DSCav1_mut2 (opt2)
gggagagcggcucggccauuuugucccagucaguccggaggcugcggcugcagaaguaccgccugcggaguaacugcaaagaagcuuaccauggagcuccucauccucaaggccaacgccaucaccaccauccucaccgccgucaccuucugcuucgccuccggccagaacaucaccgaggaguucuaccaguccaccugcuccgccgucuccaagggcuaccucggcgcccuccgcaccggcugguacaccuccgucaucaccaucgagcucuccaacaucaaggagaacaagugcaacggcaccgacgccaaggucaagcucaucaagcaggagcucgacaaguacaagaacgccgucaccgaccuccagcuccucaugcaguccacccccgccaccggcuccggcuccgccaucugcuccggcgucgccgucugcaagguccuccaccucgagggcgaggucaacaagaucaaguccgcccuccucuccaccaacaaggccgucgucucccucuccaacggcgucuccguccucaccuucaagguccucgaccucaagaacuacaucgacaagcagcuccuccccauccucaacaagcaguccugcuccauccccaacaucgagaccgucaucgaguuccagcagaagaacaaccgccuccucgagaucacccgcgaguucuccgucaacgccggcgucaccacccccgucuccaccuacaugcucaccaacuccgagcuccucucccucaucaacgacaugcccaucaccaacgaccagaagaagcucauguccaacaacguccagaucguccgccagcaguccuacuccaucaugugcaucaucaaggaggagguccucgccuacgucguccagcucccccucuacggcgucaucgacacccccugcuggaagcuccacaccuccccccucugcaccaccaacaccaaggagggcuccaacaucugccucacccgcaccgaccgcggcugguacugcgacaacgccggcuccgucuccuucuucccccaggccgagaccugcaagguccaguccaaccgcgucuucugcgacaccaugaacucccucacccuccccuccgaggucaaccucugcaacgucgacaucuucaaccccaaguacgacugcaagaucaugaccuccaagaccgacgucuccuccuccgucaucaccucccucggcgccaucgucuccugcuacggcaagaccaagugcaccgccuccaacaagaaccgcggcaucaucaagaccuucuccaacggcugcgacuacgucuccaacaagggcgucgacaccgucuccgucggcaacacccucuacugcgucaacaagcaggagggccagucccucuacgucaagggcgagcccaucaucaacuucuacgacccccucgucuuccccuccgacgaguucgacgccuccaucucccaggucaacgagaagaucaaccagucccucgccuucauccgcaaguccgacgagcuccuccacaacgucaacgccggcaaguccaccaccaacaucaugaucaccaccaucaucaucgucaucaucgucauccuccucucccucaucgccgucggccuccuccucuacugcaaggcccgcuccacccccgucacccucuccaaggaccagcucuccggcaucaacaacaucgccuucuccaacugaggacuagugaagggaacacccaaauuuaauucagccuuaagcacaauuaauuaagagugaaacguaauuguacaagcaguuggucacccaccauagggcaugaucaacaccgcaaccuuuccuuuuucccccagugauucugaaaaaccccucuucccuucagcuugcuuagauguuccaaauuuaguaagcuuaaggcggccuacagaagaaaaagaaaaaaaaggccacaaaaguucccucucacuuucaguaaauaaaauaaaagcagcaacagaaauaaagaaauaaaugaaauucaaaaugaaauaaauauuguguugugcagcauuaaaaaaucaauaaaaauuaaaaaugagcaagaucuaaaaaaaaaaaaaaaaaaaaaaaaaaaaaaaaaaaaaaaaaaaaaaaaaaaaaaaaaaaaaaaaugcaucccccccccccccccccccccccccccccccaaaggcucuuuucagagccaccagaauu

SEQ ID NO: 2594 - RNA, 2193 nt, Artificial Sequence
  mRNA product Design f-1 comprising derived and/or modified sequence from HRSV(A2)__F_DSCav1_mut2 (opt3)
gggagagcggcucggccauuuugucccagucaguccggaggcugcggcugcagaaguaccgccugcggaguaacugcaaagaagcuuaccauggagcugcucauccuuaaggccaacgcuauuaccacaauacugacugcagugacguucugcuuugccagcggccagaauaucaccgaagaguucuaccaauccacauguucugcggucucaaaaggguauuugggagcuuuaagaacugguugguacaccaguguuauuacaaucgaacugagcaacauuaaggagaauaaaugcaacggcaccgacgccaaggugaaacuaaucaagcaggaacucgauaaguauaaaaaugcaguaacugaccugcagcuucugaugcaguccacacccgccaccgggucuggaucggcuauauguucaggcguggcagucugcaagguguugcaccucgagggugagguuaacaaaaucaagagcgcccugcugaguacgaauaaagcuguggucucccucucuaacggggugagcguauuaacuuuuaagguucuggaucuuaagaauuacauugacaaacaauugcugccuauccuaaacaagcaguccuguucaauuccaaauaucgaaaccgugauagaguuccagcagaaaaacaauaggcuccuggaaauuacacgggaguuuagugucaacgccggagugacuaccccggugagcacauauaugcuuaccaauucugagcuguugucccucaucaacgauaugcccauuacgaacgaccaaaagaaacugaugucaaauaacguccagaucguucgccagcagagcuacaguaucaugugcauuauaaaggaagagguguuagcguauguagugcaacugccucucuacggcgucaucgauacuccauguuggaaacuucauacaucuccccugugcaccacuaauacaaaggaaggcuccaacauuuguuugacccgaacggaccgugggugguacugcgauaaugcaggaagcgugucguucuuuccucaggccgagaccuguaagguucagucuaacagaguguucugcgacacaaugaacucccuaacucugccaucagaagucaaucucugcaauguggauaucuuuaaccccaaauaugacuguaagauaaugaccaguaaaacagauguaagcuccucuguuauuacuagccugggugcuaucgugucaugcuacggcaagaccaaauguacagccaguaauaagaacagggggaucauuaagaccuucuccaauggaugcgacuaugucagcaacaaaggcguggacacugucucuguggguaauacgcuuuacuguguuaacaagcaagaggggcagucacuguaugugaaaggagagccuaucauuaacuuuuacgauccauugguauucccgagugacgaauuugaugcaagcauaucccaggucaaugagaagaucaaccagucucucgcuuucauucggaaaucggacgaacuguuacacaaugugaacgccggcaagagcacaaccaauaucaugaucacuaccauuauaaucguuauuaucgugauucugcuaucccucaucgcggucggccugcuuuuguauugcaaggcccgcucaacacccgugacccugaguaaagaucaacucucugggauaaacaauaucgcauucagcaacugaggacuagugaagggaacacccaaauuuaauucagccuuaagcacaauuaauuaagagugaaacguaauuguacaagcaguuggucacccaccauagggcaugaucaacaccgcaaccuuuccuuuuucccccagugauucugaaaaaccccucuucccuucagcuugcuuagauguuccaaauuuaguaagcuuaaggcggccuacagaagaaaaagaaaaaaaaggccacaaaaguucccucucacuuucaguaaauaaaauaaaagcagcaacagaaauaaagaaauaaaugaaauucaaaaugaaauaaauauuguguugugcagcauuaaaaaaucaauaaaaauuaaaaaugagcaagaucuaaaaaaaaaaaaaaaaaaaaaaaaaaaaaaaaaaaaaaaaaaaaaaaaaaaaaaaaaaaaaaaaugcaucccccccccccccccccccccccccccccccaaaggcucuuuucagagccaccagaauu

SEQ ID NO: 2595 - RNA, 2193 nt, Artificial Sequence
  mRNA product Design f-1 comprising derived and/or modified sequence from HRSV(A2)__F_DSCav1_mut2 (opt4)
gggagagcggcucggccauuuugucccagucaguccggaggcugcggcugcagaaguaccgccugcggaguaacugcaaagaagcuuaccauggagcugcugauccugaaggccaacgccaucaccaccauccugaccgccgugaccuucugcuucgccagcggccagaacaucaccgaggaguucuaccagagcaccugcagcgccgugagcaagggcuaccugggcgcccugagaaccggcugguacaccagcgugaucaccaucgagcugagcaacaucaaggagaacaagugcaacggcaccgacgccaaggugaagcugaucaagcaggagcuggacaaguacaagaacgccgugaccgaccugcagcugcugaugcagagcacccccgccaccggcagcggcagcgccaucugcagcggcguggccgugugcaaggugcugcaccuggagggcgaggugaacaagaucaagagcgcccugcugagcaccaacaaggccguggugagccugagcaacggcgugagcgugcugaccuucaaggugcuggaccugaagaacuacaucgacaagcagcugcugcccauccugaacaagcagagcugcagcauccccaacaucgagaccgugaucgaguuccagcagaagaacaacagacugcuggagaucaccagagaguucagcgugaacgccggcgugaccacccccgugagcaccuacaugcugaccaacagcgagcugcugagccugaucaacgacaugcccaucaccaacgaccagaagaagcugaugagcaacaacgugcagaucgugagacagcagagcuacagcaucaugugcaucaucaaggaggaggugcuggccuacguggugcagcugccccuguacggcgugaucgacacccccugcuggaagcugcacaccagcccccugugcaccaccaacaccaaggagggcagcaacaucugccugaccagaaccgacagaggcugguacugcgacaacgccggcagcgugagcuucuucccccaggccgagaccugcaaggugcagagcaacagaguguucugcgacaccaugaacagccugacccugcccagcgaggugaaccugugcaacguggacaucuucaaccccaaguacgacugcaagaucaugaccagcaagaccgacgugagcagcagcgugaucaccagccugggcgccaucgugagcugcuacggcaagaccaagugcaccgccagcaacaagaacagaggcaucaucaagaccuucagcaacggcugcgacuacgugagcaacaagggcguggacaccgugagcgugggcaacacccuguacugcgugaacaagcaggagggccagagccuguacgugaagggcgagcccaucaucaacuucuacgacccccugguguuccccagcgacgaguucgacgccagcaucagccaggugaacgagaagaucaaccagagccuggccuucaucagaaagagcgacgagcugcugcacaacgugaacgccggcaagagcaccaccaacaucaugaucaccaccaucaucaucgugaucaucgugauccugcugagccugaucgccgugggccugcugcuguacugcaaggccagaagcacccccgugacccugagcaaggaccagcugagcggcaucaacaacaucgccuucagcaacugaggacuagugaagggaacacccaaauuuaauucagccuuaagcacaauuaauuaagagugaaacguaauuguacaagcaguuggucacccaccauagggcaugaucaacaccgcaaccuuuccuuuuucccccagugauucugaaaaaccccucuucccuucagcuugcuuagauguuccaaauuuaguaagcuuaaggcggccuacagaagaaaaagaaaaaaaaggccacaaaaguucccucucacuuucaguaaauaaaauaaaagcagcaacagaaauaaagaaauaaaugaaauucaaaaugaaauaaauauuguguugugcagcauuaaaaaaucaauaaaaauuaaaaaugagcaagaucuaaaaaaaaaaaaaaaaaaaaaaaaaaaaaaaaaaaaaaaaaaaaaaaaaaaaaaaaaaaaaaaaugcaucccccccccccccccccccccccccccccccaaaggcucuuuucagagccaccagaauu

SEQ ID NO: 2596 - RNA, 2193 nt, Artificial Sequence
  mRNA product Design f-1 comprising derived and/or modified sequence from HRSV(A2)__F_DSCav1_mut2 (opt5)
gggagagcggcucggccauuuugucccagucaguccggaggcugcggcugcagaaguaccgccugcggaguaacugcaaagaagcuuaccauggagcugcucauccugaaggccaacgcuauuaccacaauccuuacggccgugaccuucugcuuugcgagcggccagaauauuacagaagaguucuaccaauccaccuguucugcugucagcaaaggguaucugggagcccucagaacaggcugguacaccuccguuaucacaauugaacugucuaacaucaaggagaauaaaugcaacgggaccgacgccaaggugaaacuuaucaagcaggaacuggauaaguauaaaaaugcugugacggaccuccagcugcugaugcagagcacccccgccacaggauccggcucugcuauuuguagcggggucgccgugugcaagguucuccaccuggagggagaggugaacaaaaucaaguccgcgcuucugagcaccaauaaagccgucgugucucucuccaacggcguuagcgugcugacauuuaagguccuugaucugaagaauuacauugacaaacaacuccugccuauccugaacaagcagucuuguuccauuccgaauaucgaaaccgugauugaguuccagcagaaaaacaaucggcuccuggaaaucacgcgcgaguuuagcgugaacgcuggcgucacaacccccguuucuacauauaugcuuaccaauuccgagcugcucagccugaucaacgauaugccuauuaccaacgaccaaaagaaacuuauguccaauaacgugcagaucgugagacagcagucuuacagcauuaugugcaucauuaaggaagagguccuggccuaugugguucaacucccccuguacggggugaucgauacaccuuguuggaaacugcauacgagcccccucugcaccacaaauaccaaggaaggauccaacaucugucugacacggaccgaccgcggcugguacugcgauaaugcugggucugucuccuucuuuccucaggccgagacguguaaggugcagagcaacagaguuuucugcgacacaaugaacucucuuacccugccgagcgaagugaaucucugcaaugucgauauuuuuaaccccaaauaugacuguaagaucaugaccuccaaaacagaugugucuagcuccgucauuaccagccugggagcgaucgugucuugcuacggcaagacaaaauguacggccuccaauaagaaccgggggauuaucaagaccuucagcaauggaugcgacuauguuucuaacaaaggcguggacacagucuccgugggcaauacccuuuacuguguuaacaagcaagaggggcagagccuguaugugaaaggagagccuaucauuaacuuuuacgauccccucgucuucccuuccgacgaauuugaugcuucuaucagccaggugaaugagaagauuaaccagucccuggccuucauccgcaaaucugacgaacugcuccacaaugugaacgcuggcaagagcacaaccaauauuaugaucacgaccauuaucaucguuauuaucgucauucugcuuucccugaucgccguggggcuccugcuguauugcaaggccagaagcacacccgugacccuuucuaaagaucaacucuccggaauuaacaauaucgcuuucagcaacugaggacuagugaagggaacacccaaauuuaauucagccuuaagcacaauuaauuaagagugaaacguaauuguacaagcaguuggucacccaccauagggcaugaucaacaccgcaaccuuuccuuuuucccccagugauucugaaaaaccccucuucccuucagcuugcuuagauguuccaaauuuaguaagcuuaaggcggccuacagaagaaaaagaaaaaaaaggccacaaaaguucccucucacuuucaguaaauaaaauaaaagcagcaacagaaauaaagaaauaaaugaaauucaaaaugaaauaaauauuguguugugcagcauuaaaaaaucaauaaaaauuaaaaaugagcaagaucuaaaaaaaaaaaaaaaaaaaaaaaaaaaaaaaaaaaaaaaaaaaaaaaaaaaaaaaaaaaaaaaaugcaucccccccccccccccccccccccccccccccaaaggcucuuuucagagccaccagaauu

SEQ ID NO: 2597 - RNA, 2193 nt, Artificial Sequence
  mRNA product Design f-1 comprising derived and/or modified sequence from HRSV(A2)__F_DSCav1_mut2 (opt6)
gggagagcggcucggccauuuugucccagucaguccggaggcugcggcugcagaaguaccgccugcggaguaacugcaaagaagcuuaccauggaacuacuaauccuaaaagcaaacgcaauuacaacuauacuuaccgccguaacauuuugcuucgcaucugggcaaaacauuaccgaagaauuuuaucaaucaacaugcucagcagucuccaaaggauaccuuggagcauuaagaaccggcugguauaccuccguaauaacaauugaacuaucuaauauaaaagaaaauaaauguaauggaacugacgcaaaaguuaaacuaauaaaacaagaacucgacaaauacaaaaacgccgucacagaccuacaacuacuaaugcaaucaacccccgcaacaggaucaggauccgcaaucugcagcggcgucgcaguuugcaaaguccuacauuuagaaggagaaguaaacaaaauaaaaucugcucuccucucuacaaacaaagcaguagugucacuuucaaacggaguaucaguucuaacauucaaaguacuagaccuaaaaaauuacauagacaaacaacuacuuccaauucuaaacaaacaauccuguuccauacccaacauagaaacaguaauagaauuucaacaaaaaaauaacagacuccuagaaauuacaagagaauuuuccgucaaugcaggaguaacaaccccaguaucaaccuacauguuaacuaacucagaacucuuaucacuaauaaacgacaugccaaucacuaaugaccaaaaaaaacucaugucaaauaacguacaaauaguccgacaacaaucauacuccaucaugugcauuauaaaagaagaaguacuagcauacgucguccaauuaccacuauacggcgucauagacacaccauguuggaaacuccacacaucaccacuaugcacuacaaauacaaaagaaggcuccaacaucugccuaacaagaacagacagagguugguauugcgacaacgcaggaucaguaucauuuuucccccaagcagaaacauguaaaguacaaucaaauagagucuucugcgacaccaugaacucauuaacacuaccuucagaagucaaccuaugcaacguagacaucuucaacccuaaauaugacugcaaaaucaugaccagcaaaaccgacguuucaucuuccguaauaacaucacuaggcgcaauagucucauguuacggcaaaacaaaauguacagcaucaaauaaaaaccguggaauaauaaaaacauuuucuaaugguugugacuacguaagcaauaaaggaguagauacaguaucagucggcaacaccuuauacuguguaaacaaacaagaaggccaaaguuuauacgucaaaggagaacccaucaucaacuucuacgacccauuaguauucccaucagacgaauuugaugcaagcauuucacaagucaacgaaaaaaucaaucaaucauuagcauucauccgaaaaucagacgaauuauuacacaacguaaacgccggaaaaucaaccacuaauauaaugauaaccacaauaaucaucguaauaauaguaauacuucucucacuaaucgcagucggacuccuucuauacugcaaagcaagaucuacaccaguaacacuauccaaagaucaacuaaguggcauaaacaacauagcauuuucuaacuaaggacuagugaagggaacacccaaauuuaauucagccuuaagcacaauuaauuaagagugaaacguaauuguacaagcaguuggucacccaccauagggcaugaucaacaccgcaaccuuuccuuuuucccccagugauucugaaaaaccccucuucccuucagcuugcuuagauguuccaaauuuaguaagcuuaaggcggccuacagaagaaaaagaaaaaaaaggccacaaaaguucccucucacuuucaguaaauaaaauaaaagcagcaacagaaauaaagaaauaaaugaaauucaaaaugaaauaaauauuguguugugcagcauuaaaaaaucaauaaaaauuaaaaaugagcaagaucuaaaaaaaaaaaaaaaaaaaaaaaaaaaaaaaaaaaaaaaaaaaaaaaaaaaaaaaaaaaaaaaaugcaucccccccccccccccccccccccccccccccaaaggcucuuuucagagccaccagaauu

SEQ ID NO: 2598 - RNA, 2193 nt, Artificial Sequence
  mRNA product Design f-1 comprising derived and/or modified sequence from HRSV(A2)__F_DSCav1_mut2 (opt11)
gggagagcggcucggccauuuugucccagucaguccggaggcugcggcugcagaaguaccgccugcggaguaacugcaaagaagcuuaccauggaacuccucauccuaaaagccaacgcgaucaccacaauccugacagccgucaccuucugcuucgccuccggccaaaacaucaccgaagaguucuaccaauccacaugcuccgccgucuccaagggcuaccugggcgcacuucguacaggcugguacaccuccguaauaaccaucgaacucuccaacaucaaagaaaacaaaugcaacggcacagacgcaaaagucaaacucaucaagcaagaacuugacaaauacaaaaaugcagucaccgaccuucaacuccucaugcaaucuacccccgccacaggcuccggcuccgcuaucugcuccggcgucgccgucugcaaaguccuccaccucgaaggugaaguaaacaaaauaaaauccgcccuccucuccaccaacaaagccgucgucucccuaucaaacggcgucuccgugcucaccuucaagguucucgaccugaaaaacuacauagacaaacagcuccuaccaauccuuaacaaacagagcugcuccauuccgaauaucgaaacgguaaucgaauuucaacagaaaaacaaccgccuccucgaaauaacgcgagaguucuccguaaacgcuggcgucaccacacccgucagcaccuacaugcuaacgaacuccgaacucuugucgcucaucaacgacaugcccauaaccaacgaccaaaagaaacuaauguccaauaacguacaaaucguacgccaacaaucuuacuccaucaugugcaucauaaaagaagaaguacuagcuuacgucguccaacucccacuguacggagucaucgacacccccugcuggaaacuccacaccucuccccucugcaccaccaacaccaaagagggcuccaacauuugccugacacgcaccgaccgcggcugguacugcgacaacgcaggcuccgucucguucuucccccaagccgaaaccugcaaaguccaauccaaccgcgucuucugcgacaccaugaacucccucacccuccccuccgaagucaaucuaugcaacguagacaucuucaacccgaaauaugacugcaaaauuaugacaucuaaaaccgacguguccuccucagucaucacuucccuaggagccaucguuuccuguuacggcaagaccaaaugcaccgccagcaacaaaaaccgaggcaucaucaaaaccuucuccaacggaugugacuaugucuccaacaagggcgucgacaccgucagcgucggcaacacccucuacugcgucaacaaacaagaaggccaaucccucuacgucaaaggagagcccauaaucaacuucuacgacccccucgucuucccauccgacgaguucgacgccucaaucucccaagucaacgagaaaaucaaccaauccuuagccuucauccguaaguccgacgaacuccuucacaacgucaacgccgguaaaucuaccaccaacaucaugauaacaacaauaauuaucgucaucaucgucauccuccuuucccucaucgcggucgggcuauugcucuacugcaaagcccgguccaccccaguaacccucucuaaagaccaacucagcggaaucaauaacauagccuucagcaauuaaggacuagugaagggaacacccaaauuuaauucagccuuaagcacaauuaauuaagagugaaacguaauuguacaagcaguuggucacccaccauagggcaugaucaacaccgcaaccuuuccuuuuucccccagugauucugaaaaaccccucuucccuucagcuugcuuagauguuccaaauuuaguaagcuuaaggcggccuacagaagaaaaagaaaaaaaaggccacaaaaguucccucucacuuucaguaaauaaaauaaaagcagcaacagaaauaaagaaauaaaugaaauucaaaaugaaauaaauauuguguugugcagcauuaaaaaaucaauaaaaauuaaaaaugagcaagaucuaaaaaaaaaaaaaaaaaaaaaaaaaaaaaaaaaaaaaaaaaaaaaaaaaaaaaaaaaaaaaaaaugcaucccccccccccccccccccccccccccccccaaaggcucuuuucagagccaccagaauu

SEQ ID NO: 2599 - RNA, 1973 nt, Artificial Sequence
  mRNA product Design f-2 comprising derived and/or modified sequence from HRSV(A2)__F_DSCav1_mut2 (opt1)
gggagagcggcucggccauuuugucccagucaguccggaggcugcggcugcagaaguaccgccugcggaguaacugcaaagaagcuuaccauggagcugcucauccugaaggccaacgccaucaccaccauccugacggcggugaccuucugcuucgccagcggccagaacaucaccgaggaguucuaccaguccacgugcagcgccgucuccaagggguaccucggcgcccugcggaccggcugguacaccuccgugaucaccaucgagcugagcaacaucaaggagaacaagugcaacgggaccgacgccaaggugaagcucaucaagcaggagcuggacaaguacaagaacgcggucacggaccugcagcuccugaugcaguccaccccggcaaccggcuccggcuccgccaucugcagcggcgucgccgugugcaaggugcugcaccucgagggggaggucaacaagaucaagagcgcccugcuguccaccaacaaggccguggugagccucuccaacggcgucagcgugcugaccuucaaggugcuggaccucaagaacuacaucgacaagcagcugcugcccauccugaacaagcagagcugcuccauccccaacaucgagacggugaucgaguuccagcagaagaacaaccggcuccuggagaucacccgcgaguucagcgugaacgccggggucaccacccccguguccacguacaugcugaccaacagcgagcuccugucccugaucaacgacaugccgaucaccaacgaccagaagaagcucaugagcaacaacgugcagaucguccggcagcaguccuacagcaucaugugcaucaucaaggaggaggugcuggcguacgugguccagcugccccucuacggcgugaucgacacccccugcuggaagcugcacacgagcccccugugcaccaccaacaccaaggagggguccaacaucugccucacgcgcaccgaccggggcugguacugcgacaacgccggcagcgucuccuucuucccgcaggccgagaccugcaaggugcagagcaaccgcguguucugcgacaccaugaacucccugacgcugcccagcgagguaaaccucugcaacgucgacaucuucaaccccaaguacgacugcaagaucaugaccuccaagaccgacgugagcuccagcgugaucaccucccugggggccaucgucagcugcuacggcaagacgaagugcaccgccagcaacaagaaccgggggaucaucaagaccuucuccaacggcugcgacuacgugagcaacaagggcguggacaccguguccgucgggaacacccuguacugcgugaacaagcaggagggccagagccucuacgugaagggggagcccaucaucaacuucuacgacccgcuggucuuccccuccgacgaguucgacgcgagcaucucccaggugaacgagaagaucaaccagagccuggccuucauccgcaaguccgacgagcugcuccacaacgugaacgccggcaagagcacgaccaacaucaugaucaccaccaucaucaucgucaucaucgugauccugcugucccucaucgccguggggcugcugcucuacugcaaggcccggagcacgcccgucacccuguccaaggaccagcugagcggcaucaacaacaucgcguucuccaacugaggacuaguggaagcauuuuccuggcugauuaaaagaaauuacucagcuauggucaucuguuccuguuagaaggcuaugcagcauauuauauacuaugcgcauguuaugaaaugcauaauaaaaaauuuuaaaaaaucuaaaagaucuaaaaaaaaaaaaaaaaaaaaaaaaaaaaaaaaaaaaaaaaaaaaaaaaaaaaaaaaaaaaaaaaugcaucccccccccccccccccccccccccccccccaaaggcucuuuucagagccaccagaauu

SEQ ID NO: 2600 - RNA, 1973 nt, Artificial Sequence
  mRNA product Design f-2 comprising derived and/or modified sequence from HRSV(A2)__F_DSCav1_mut2 (opt1)
gggagagcggcucggccauuuugucccagucaguccggaggcugcggcugcagaaguaccgccugcggaguaacugcaaagaagcuuaccauggagcugcucauccugaaggccaacgccaucaccaccauccugacggcggugaccuucugcuucgccagcggccagaacaucaccgaggaguucuaccaguccacgugcagcgccgucuccaagggguaccucggcgcccugcgcaccgggugguacaccagcgugaucaccaucgagcuguccaacaucaaggagaacaagugcaacggcaccgacgccaaggugaagcucaucaagcaggagcuggacaaguacaagaacgcggucacggaccugcagcuccugaugcagagcacccccgccaccggguccggcagcgccaucugcuccggcguggccgugugcaagguccugcaccucgagggggaggugaacaagaucaagagcgcgcugcuguccaccaacaaggccguggucagccucuccaacggcgugagcgugcugacguucaagguccuggaccucaagaacuacaucgacaagcagcugcugccgauccucaacaagcaguccugcagcauccccaacaucgagaccgugaucgaguuccagcagaagaacaaccggcugcuggagaucacccgcgaguucuccgugaacgccggggucaccacgcccgugagcaccuacaugcucaccaacuccgagcugcugagccucaucaacgacaugcccaucaccaacgaccagaagaagcugaugagcaacaacgugcagaucguccggcagcaguccuacagcaucaugugcaucaucaaggaggaggugcuggccuacgugguccagcucccgcuguacggcgugaucgacacgcccugcuggaagcugcacaccagcccccucugcaccaccaacacgaaggagggguccaacaucugccugacccgcaccgaccggggcugguacugcgacaacgccggcuccgugagcuucuucccccaggcggagaccugcaagguccaguccaaccgcguguucugcgacacgaugaacagccugacccucccguccgaggucaaccugugcaacguggacaucuucaaccccaaguacgacugcaagaucaugaccagcaagaccgacguguccagcuccgucaucacgagccugggggccaucguguccugcuacggcaagaccaagugcaccgccagcaacaagaaccgggggaucaucaagaccuucuccaacggcugcgacuacgugagcaacaagggcgucgacacgguguccguggggaacacccucuacugcgucaacaagcaggagggccagagccuguacgugaagggggagcccaucaucaacuucuacgacccccugguguucccgagcgacgaguucgacgccuccaucagccaggucaacgagaagaucaaccagucccucgccuucauccgcaagagcgacgagcugcugcacaacgugaacgcgggcaaguccaccaccaacaucaugaucaccacgaucaucaucgugaucaucgucauccuccugagccugaucgccguggggcuccugcuguacugcaaggcccgguccacccccgugacccugagcaaggaccagcucuccggcaucaacaacaucgccuucagcaacugaggacuaguggaagcauuuuccuggcugauuaaaagaaauuacucagcuauggucaucuguuccuguuagaaggcuaugcagcauauuauauacuaugcgcauguuaugaaaugcauaauaaaaaauuuuaaaaaaucuaaaagaucuaaaaaaaaaaaaaaaaaaaaaaaaaaaaaaaaaaaaaaaaaaaaaaaaaaaaaaaaaaaaaaaaugcaucccccccccccccccccccccccccccccccaaaggcucuuuucagagccaccagaauu

SEQ ID NO: 2601 - RNA, 1973 nt, Artificial Sequence
  mRNA product Design f-2 comprising derived and/or modified sequence from HRSV(A2)__F_DSCav1_mut2 (opt2)
gggagagcggcucggccauuuugucccagucaguccggaggcugcggcugcagaaguaccgccugcggaguaacugcaaagaagcuuaccauggagcuccucauccucaaggccaacgccaucaccaccauccucaccgccgucaccuucugcuucgccuccggccagaacaucaccgaggaguucuaccaguccaccugcuccgccgucuccaagggcuaccucggcgcccuccgcaccggcugguacaccuccgucaucaccaucgagcucuccaacaucaaggagaacaagugcaacggcaccgacgccaaggucaagcucaucaagcaggagcucgacaaguacaagaacgccgucaccgaccuccagcuccucaugcaguccacccccgccaccggcuccggcuccgccaucugcuccggcgucgccgucugcaagguccuccaccucgagggcgaggucaacaagaucaaguccgcccuccucuccaccaacaaggccgucgucucccucuccaacggcgucuccguccucaccuucaagguccucgaccucaagaacuacaucgacaagcagcuccuccccauccucaacaagcaguccugcuccauccccaacaucgagaccgucaucgaguuccagcagaagaacaaccgccuccucgagaucacccgcgaguucuccgucaacgccggcgucaccacccccgucuccaccuacaugcucaccaacuccgagcuccucucccucaucaacgacaugcccaucaccaacgaccagaagaagcucauguccaacaacguccagaucguccgccagcaguccuacuccaucaugugcaucaucaaggaggagguccucgccuacgucguccagcucccccucuacggcgucaucgacacccccugcuggaagcuccacaccuccccccucugcaccaccaacaccaaggagggcuccaacaucugccucacccgcaccgaccgcggcugguacugcgacaacgccggcuccgucuccuucuucccccaggccgagaccugcaagguccaguccaaccgcgucuucugcgacaccaugaacucccucacccuccccuccgaggucaaccucugcaacgucgacaucuucaaccccaaguacgacugcaagaucaugaccuccaagaccgacgucuccuccuccgucaucaccucccucggcgccaucgucuccugcuacggcaagaccaagugcaccgccuccaacaagaaccgcggcaucaucaagaccuucuccaacggcugcgacuacgucuccaacaagggcgucgacaccgucuccgucggcaacacccucuacugcgucaacaagcaggagggccagucccucuacgucaagggcgagcccaucaucaacuucuacgacccccucgucuuccccuccgacgaguucgacgccuccaucucccaggucaacgagaagaucaaccagucccucgccuucauccgcaaguccgacgagcuccuccacaacgucaacgccggcaaguccaccaccaacaucaugaucaccaccaucaucaucgucaucaucgucauccuccucucccucaucgccgucggccuccuccucuacugcaaggcccgcuccacccccgucacccucuccaaggaccagcucuccggcaucaacaacaucgccuucuccaacugaggacuaguggaagcauuuuccuggcugauuaaaagaaauuacucagcuauggucaucuguuccuguuagaaggcuaugcagcauauuauauacuaugcgcauguuaugaaaugcauaauaaaaaauuuuaaaaaaucuaaaagaucuaaaaaaaaaaaaaaaaaaaaaaaaaaaaaaaaaaaaaaaaaaaaaaaaaaaaaaaaaaaaaaaaugcaucccccccccccccccccccccccccccccccaaaggcucuuuucagagccaccagaauu

SEQ ID NO: 2602 - RNA, 1973 nt, Artificial Sequence
  mRNA product Design f-2 comprising derived and/or modified sequence from HRSV(A2)__F_DSCav1_mut2 (opt3)
gggagagcggcucggccauuuugucccagucaguccggaggcugcggcugcagaaguaccgccugcggaguaacugcaaagaagcuuaccauggagcugcucauccuuaaggccaacgcuauuaccacaauacugacugcagugacguucugcuuugccagcggccagaauaucaccgaagaguucuaccaauccacauguucugcggucucaaaaggguauuugggagcuuuaagaacugguugguacaccaguguuauuacaaucgaacugagcaacauuaaggagaauaaaugcaacggcaccgacgccaaggugaaacuaaucaagcaggaacucgauaaguauaaaaaugcaguaacugaccugcagcuucugaugcaguccacacccgccaccgggucuggaucggcuauauguucaggcguggcagucugcaagguguugcaccucgagggugagguuaacaaaaucaagagcgcccugcugaguacgaauaaagcuguggucucccucucuaacggggugagcguauuaacuuuuaagguucuggaucuuaagaauuacauugacaaacaauugcugccuauccuaaacaagcaguccuguucaauuccaaauaucgaaaccgugauagaguuccagcagaaaaacaauaggcuccuggaaauuacacgggaguuuagugucaacgccggagugacuaccccggugagcacauauaugcuuaccaauucugagcuguugucccucaucaacgauaugcccauuacgaacgaccaaaagaaacugaugucaaauaacguccagaucguucgccagcagagcuacaguaucaugugcauuauaaaggaagagguguuagcguauguagugcaacugccucucuacggcgucaucgauacuccauguuggaaacuucauacaucuccccugugcaccacuaauacaaaggaaggcuccaacauuuguuugacccgaacggaccgugggugguacugcgauaaugcaggaagcgugucguucuuuccucaggccgagaccuguaagguucagucuaacagaguguucugcgacacaaugaacucccuaacucugccaucagaagucaaucucugcaauguggauaucuuuaaccccaaauaugacuguaagauaaugaccaguaaaacagauguaagcuccucuguuauuacuagccugggugcuaucgugucaugcuacggcaagaccaaauguacagccaguaauaagaacagggggaucauuaagaccuucuccaauggaugcgacuaugucagcaacaaaggcguggacacugucucuguggguaauacgcuuuacuguguuaacaagcaagaggggcagucacuguaugugaaaggagagccuaucauuaacuuuuacgauccauugguauucccgagugacgaauuugaugcaagcauaucccaggucaaugagaagaucaaccagucucucgcuuucauucggaaaucggacgaacuguuacacaaugugaacgccggcaagagcacaaccaauaucaugaucacuaccauuauaaucguuauuaucgugauucugcuaucccucaucgcggucggccugcuuuuguauugcaaggcccgcucaacacccgugacccugaguaaagaucaacucucugggauaaacaauaucgcauucagcaacugaggacuaguggaagcauuuuccuggcugauuaaaagaaauuacucagcuauggucaucuguuccuguuagaaggcuaugcagcauauuauauacuaugcgcauguuaugaaaugcauaauaaaaaauuuuaaaaaaucuaaaagaucuaaaaaaaaaaaaaaaaaaaaaaaaaaaaaaaaaaaaaaaaaaaaaaaaaaaaaaaaaaaaaaaaugcaucccccccccccccccccccccccccccccccaaaggcucuuuucagagccaccagaauu

SEQ ID NO: 2603 - RNA, 1973 nt, Artificial Sequence
  mRNA product Design f-2 comprising derived and/or modified sequence from HRSV(A2)__F_DSCav1_mut2 (opt4)
gggagagcggcucggccauuuugucccagucaguccggaggcugcggcugcagaaguaccgccugcggaguaacugcaaagaagcuuaccauggagcugcugauccugaaggccaacgccaucaccaccauccugaccgccgugaccuucugcuucgccagcggccagaacaucaccgaggaguucuaccagagcaccugcagcgccgugagcaagggcuaccugggcgcccugagaaccggcugguacaccagcgugaucaccaucgagcugagcaacaucaaggagaacaagugcaacggcaccgacgccaaggugaagcugaucaagcaggagcuggacaaguacaagaacgccgugaccgaccugcagcugcugaugcagagcacccccgccaccggcagcggcagcgccaucugcagcggcguggccgugugcaaggugcugcaccuggagggcgaggugaacaagaucaagagcgcccugcugagcaccaacaaggccguggugagccugagcaacggcgugagcgugcugaccuucaaggugcuggaccugaagaacuacaucgacaagcagcugcugcccauccugaacaagcagagcugcagcauccccaacaucgagaccgugaucgaguuccagcagaagaacaacagacugcuggagaucaccagagaguucagcgugaacgccggcgugaccacccccgugagcaccuacaugcugaccaacagcgagcugcugagccugaucaacgacaugcccaucaccaacgaccagaagaagcugaugagcaacaacgugcagaucgugagacagcagagcuacagcaucaugugcaucaucaaggaggaggugcuggccuacguggugcagcugccccuguacggcgugaucgacacccccugcuggaagcugcacaccagcccccugugcaccaccaacaccaaggagggcagcaacaucugccugaccagaaccgacagaggcugguacugcgacaacgccggcagcgugagcuucuucccccaggccgagaccugcaaggugcagagcaacagaguguucugcgacaccaugaacagccugacccugcccagcgaggugaaccugugcaacguggacaucuucaaccccaaguacgacugcaagaucaugaccagcaagaccgacgugagcagcagcgugaucaccagccugggcgccaucgugagcugcuacggcaagaccaagugcaccgccagcaacaagaacagaggcaucaucaagaccuucagcaacggcugcgacuacgugagcaacaagggcguggacaccgugagcgugggcaacacccuguacugcgugaacaagcaggagggccagagccuguacgugaagggcgagcccaucaucaacuucuacgacccccugguguuccccagcgacgaguucgacgccagcaucagccaggugaacgagaagaucaaccagagccuggccuucaucagaaagagcgacgagcugcugcacaacgugaacgccggcaagagcaccaccaacaucaugaucaccaccaucaucaucgugaucaucgugauccugcugagccugaucgccgugggccugcugcuguacugcaaggccagaagcacccccgugacccugagcaaggaccagcugagcggcaucaacaacaucgccuucagcaacugaggacuaguggaagcauuuuccuggcugauuaaaagaaauuacucagcuauggucaucuguuccuguuagaaggcuaugcagcauauuauauacuaugcgcauguuaugaaaugcauaauaaaaaauuuuaaaaaaucuaaaagaucuaaaaaaaaaaaaaaaaaaaaaaaaaaaaaaaaaaaaaaaaaaaaaaaaaaaaaaaaaaaaaaaaugcaucccccccccccccccccccccccccccccccaaaggcucuuuucagagccaccagaauu

SEQ ID NO: 2604 - RNA, 1973 nt, Artificial Sequence
  mRNA product Design f-2 comprising derived and/or modified sequence from HRSV(A2)__F_DSCav1_mut2 (opt5)
gggagagcggcucggccauuuugucccagucaguccggaggcugcggcugcagaaguaccgccugcggaguaacugcaaagaagcuuaccauggagcugcucauccugaaggccaacgcuauuaccacaauccuuacggccgugaccuucugcuuugcgagcggccagaauauuacagaagaguucuaccaauccaccuguucugcugucagcaaaggguaucugggagcccucagaacaggcugguacaccuccguuaucacaauugaacugucuaacaucaaggagaauaaaugcaacgggaccgacgccaaggugaaacuuaucaagcaggaacuggauaaguauaaaaaugcugugacggaccuccagcugcugaugcagagcacccccgccacaggauccggcucugcuauuuguagcggggucgccgugugcaagguucuccaccuggagggagaggugaacaaaaucaaguccgcgcuucugagcaccaauaaagccgucgugucucucuccaacggcguuagcgugcugacauuuaagguccuugaucugaagaauuacauugacaaacaacuccugccuauccugaacaagcagucuuguuccauuccgaauaucgaaaccgugauugaguuccagcagaaaaacaaucggcuccuggaaaucacgcgcgaguuuagcgugaacgcuggcgucacaacccccguuucuacauauaugcuuaccaauuccgagcugcucagccugaucaacgauaugccuauuaccaacgaccaaaagaaacuuauguccaauaacgugcagaucgugagacagcagucuuacagcauuaugugcaucauuaaggaagagguccuggccuaugugguucaacucccccuguacggggugaucgauacaccuuguuggaaacugcauacgagcccccucugcaccacaaauaccaaggaaggauccaacaucugucugacacggaccgaccgcggcugguacugcgauaaugcugggucugucuccuucuuuccucaggccgagacguguaaggugcagagcaacagaguuuucugcgacacaaugaacucucuuacccugccgagcgaagugaaucucugcaaugucgauauuuuuaaccccaaauaugacuguaagaucaugaccuccaaaacagaugugucuagcuccgucauuaccagccugggagcgaucgugucuugcuacggcaagacaaaauguacggccuccaauaagaaccgggggauuaucaagaccuucagcaauggaugcgacuauguuucuaacaaaggcguggacacagucuccgugggcaauacccuuuacuguguuaacaagcaagaggggcagagccuguaugugaaaggagagccuaucauuaacuuuuacgauccccucgucuucccuuccgacgaauuugaugcuucuaucagccaggugaaugagaagauuaaccagucccuggccuucauccgcaaaucugacgaacugcuccacaaugugaacgcuggcaagagcacaaccaauauuaugaucacgaccauuaucaucguuauuaucgucauucugcuuucccugaucgccguggggcuccugcuguauugcaaggccagaagcacacccgugacccuuucuaaagaucaacucuccggaauuaacaauaucgcuuucagcaacugaggacuaguggaagcauuuuccuggcugauuaaaagaaauuacucagcuauggucaucuguuccuguuagaaggcuaugcagcauauuauauacuaugcgcauguuaugaaaugcauaauaaaaaauuuuaaaaaaucuaaaagaucuaaaaaaaaaaaaaaaaaaaaaaaaaaaaaaaaaaaaaaaaaaaaaaaaaaaaaaaaaaaaaaaaugcaucccccccccccccccccccccccccccccccaaaggcucuuuucagagccaccagaauu

SEQ ID NO: 2605 - RNA, 1973 nt, Artificial Sequence
  mRNA product Design f-2 comprising derived and/or modified sequence from HRSV(A2)__F_DSCav1_mut2 (opt6)
gggagagcggcucggccauuuugucccagucaguccggaggcugcggcugcagaaguaccgccugcggaguaacugcaaagaagcuuaccauggaacuacuaauccuaaaagcaaacgcaauuacaacuauacuuaccgccguaacauuuugcuucgcaucugggcaaaacauuaccgaagaauuuuaucaaucaacaugcucagcagucuccaaaggauaccuuggagcauuaagaaccggcugguauaccuccguaauaacaauugaacuaucuaauauaaaagaaaauaaauguaauggaacugacgcaaaaguuaaacuaauaaaacaagaacucgacaaauacaaaaacgccgucacagaccuacaacuacuaaugcaaucaacccccgcaacaggaucaggauccgcaaucugcagcggcgucgcaguuugcaaaguccuacauuuagaaggagaaguaaacaaaauaaaaucugcucuccucucuacaaacaaagcaguagugucacuuucaaacggaguaucaguucuaacauucaaaguacuagaccuaaaaaauuacauagacaaacaacuacuuccaauucuaaacaaacaauccuguuccauacccaacauagaaacaguaauagaauuucaacaaaaaaauaacagacuccuagaaauuacaagagaauuuuccgucaaugcaggaguaacaaccccaguaucaaccuacauguuaacuaacucagaacucuuaucacuaauaaacgacaugccaaucacuaaugaccaaaaaaaacucaugucaaauaacguacaaauaguccgacaacaaucauacuccaucaugugcauuauaaaagaagaaguacuagcauacgucguccaauuaccacuauacggcgucauagacacaccauguuggaaacuccacacaucaccacuaugcacuacaaauacaaaagaaggcuccaacaucugccuaacaagaacagacagagguugguauugcgacaacgcaggaucaguaucauuuuucccccaagcagaaacauguaaaguacaaucaaauagagucuucugcgacaccaugaacucauuaacacuaccuucagaagucaaccuaugcaacguagacaucuucaacccuaaauaugacugcaaaaucaugaccagcaaaaccgacguuucaucuuccguaauaacaucacuaggcgcaauagucucauguuacggcaaaacaaaauguacagcaucaaauaaaaaccguggaauaauaaaaacauuuucuaaugguugugacuacguaagcaauaaaggaguagauacaguaucagucggcaacaccuuauacuguguaaacaaacaagaaggccaaaguuuauacgucaaaggagaacccaucaucaacuucuacgacccauuaguauucccaucagacgaauuugaugcaagcauuucacaagucaacgaaaaaaucaaucaaucauuagcauucauccgaaaaucagacgaauuauuacacaacguaaacgccggaaaaucaaccacuaauauaaugauaaccacaauaaucaucguaauaauaguaauacuucucucacuaaucgcagucggacuccuucuauacugcaaagcaagaucuacaccaguaacacuauccaaagaucaacuaaguggcauaaacaacauagcauuuucuaacuaaggacuaguggaagcauuuuccuggcugauuaaaagaaauuacucagcuauggucaucuguuccuguuagaaggcuaugcagcauauuauauacuaugcgcauguuaugaaaugcauaauaaaaaauuuuaaaaaaucuaaaagaucuaaaaaaaaaaaaaaaaaaaaaaaaaaaaaaaaaaaaaaaaaaaaaaaaaaaaaaaaaaaaaaaaugcaucccccccccccccccccccccccccccccccaaaggcucuuuucagagccaccagaauu

SEQ ID NO: 2606 - RNA, 1973 nt, Artificial Sequence
  mRNA product Design f-2 comprising derived and/or modified sequence from HRSV(A2)__F_DSCav1_mut2 (opt11)
gggagagcggcucggccauuuugucccagucaguccggaggcugcggcugcagaaguaccgccugcggaguaacugcaaagaagcuuaccauggaacuccucauccuaaaagccaacgcgaucaccacaauccugacagccgucaccuucugcuucgccuccggccaaaacaucaccgaagaguucuaccaauccacaugcuccgccgucuccaagggcuaccugggcgcacuucguacaggcugguacaccuccguaauaaccaucgaacucuccaacaucaaagaaaacaaaugcaacggcacagacgcaaaagucaaacucaucaagcaagaacuugacaaauacaaaaaugcagucaccgaccuucaacuccucaugcaaucuacccccgccacaggcuccggcuccgcuaucugcuccggcgucgccgucugcaaaguccuccaccucgaaggugaaguaaacaaaauaaaauccgcccuccucuccaccaacaaagccgucgucucccuaucaaacggcgucuccgugcucaccuucaagguucucgaccugaaaaacuacauagacaaacagcuccuaccaauccuuaacaaacagagcugcuccauuccgaauaucgaaacgguaaucgaauuucaacagaaaaacaaccgccuccucgaaauaacgcgagaguucuccguaaacgcuggcgucaccacacccgucagcaccuacaugcuaacgaacuccgaacucuugucgcucaucaacgacaugcccauaaccaacgaccaaaagaaacuaauguccaauaacguacaaaucguacgccaacaaucuuacuccaucaugugcaucauaaaagaagaaguacuagcuuacgucguccaacucccacuguacggagucaucgacacccccugcuggaaacuccacaccucuccccucugcaccaccaacaccaaagagggcuccaacauuugccugacacgcaccgaccgcggcugguacugcgacaacgcaggcuccgucucguucuucccccaagccgaaaccugcaaaguccaauccaaccgcgucuucugcgacaccaugaacucccucacccuccccuccgaagucaaucuaugcaacguagacaucuucaacccgaaauaugacugcaaaauuaugacaucuaaaaccgacguguccuccucagucaucacuucccuaggagccaucguuuccuguuacggcaagaccaaaugcaccgccagcaacaaaaaccgaggcaucaucaaaaccuucuccaacggaugugacuaugucuccaacaagggcgucgacaccgucagcgucggcaacacccucuacugcgucaacaaacaagaaggccaaucccucuacgucaaaggagagcccauaaucaacuucuacgacccccucgucuucccauccgacgaguucgacgccucaaucucccaagucaacgagaaaaucaaccaauccuuagccuucauccguaaguccgacgaacuccuucacaacgucaacgccgguaaaucuaccaccaacaucaugauaacaacaauaauuaucgucaucaucgucauccuccuuucccucaucgcggucgggcuauugcucuacugcaaagcccgguccaccccaguaacccucucuaaagaccaacucagcggaaucaauaacauagccuucagcaauuaaggacuaguggaagcauuuuccuggcugauuaaaagaaauuacucagcuauggucaucuguuccuguuagaaggcuaugcagcauauuauauacuaugcgcauguuaugaaaugcauaauaaaaaauuuuaaaaaaucuaaaagaucuaaaaaaaaaaaaaaaaaaaaaaaaaaaaaaaaaaaaaaaaaaaaaaaaaaaaaaaaaaaaaaaaugcaucccccccccccccccccccccccccccccccaaaggcucuuuucagagccaccagaauu

SEQ ID NO: 2607 - RNA, 1964 nt, Artificial Sequence
  mRNA product Design f-3 comprising derived and/or modified sequence from HRSV(A2)__F_DSCav1_mut2 (opt1)
gggagagucccgcagucggcguccagcggcucugcuuguucgugugugugucguugcaggccuuauucaagcuuaccauggagcugcucauccugaaggccaacgccaucaccaccauccugacggcggugaccuucugcuucgccagcggccagaacaucaccgaggaguucuaccaguccacgugcagcgccgucuccaagggguaccucggcgcccugcggaccggcugguacaccuccgugaucaccaucgagcugagcaacaucaaggagaacaagugcaacgggaccgacgccaaggugaagcucaucaagcaggagcuggacaaguacaagaacgcggucacggaccugcagcuccugaugcaguccaccccggcaaccggcuccggcuccgccaucugcagcggcgucgccgugugcaaggugcugcaccucgagggggaggucaacaagaucaagagcgcccugcuguccaccaacaaggccguggugagccucuccaacggcgucagcgugcugaccuucaaggugcuggaccucaagaacuacaucgacaagcagcugcugcccauccugaacaagcagagcugcuccauccccaacaucgagacggugaucgaguuccagcagaagaacaaccggcuccuggagaucacccgcgaguucagcgugaacgccggggucaccacccccguguccacguacaugcugaccaacagcgagcuccugucccugaucaacgacaugccgaucaccaacgaccagaagaagcucaugagcaacaacgugcagaucguccggcagcaguccuacagcaucaugugcaucaucaaggaggaggugcuggcguacgugguccagcugccccucuacggcgugaucgacacccccugcuggaagcugcacacgagcccccugugcaccaccaacaccaaggagggguccaacaucugccucacgcgcaccgaccggggcugguacugcgacaacgccggcagcgucuccuucuucccgcaggccgagaccugcaaggugcagagcaaccgcguguucugcgacaccaugaacucccugacgcugcccagcgagguaaaccucugcaacgucgacaucuucaaccccaaguacgacugcaagaucaugaccuccaagaccgacgugagcuccagcgugaucaccucccugggggccaucgucagcugcuacggcaagacgaagugcaccgccagcaacaagaaccgggggaucaucaagaccuucuccaacggcugcgacuacgugagcaacaagggcguggacaccguguccgucgggaacacccuguacugcgugaacaagcaggagggccagagccucuacgugaagggggagcccaucaucaacuucuacgacccgcuggucuuccccuccgacgaguucgacgcgagcaucucccaggugaacgagaagaucaaccagagccuggccuucauccgcaaguccgacgagcugcuccacaacgugaacgccggcaagagcacgaccaacaucaugaucaccaccaucaucaucgucaucaucgugauccugcugucccucaucgccguggggcugcugcucuacugcaaggcccggagcacgcccgucacccuguccaaggaccagcugagcggcaucaacaacaucgcguucuccaacugaggacuaguacuggcugcaucucccuuuccucuguccuccauccuucucccaggauggugaagggggaccugguacccagugauccccaccccaggauccuaaaucaugacuuaccugcuaauaaaaacucauuggaaaagugagaagaucuaaaaaaaaaaaaaaaaaaaaaaaaaaaaaaaaaaaaaaaaaaaaaaaaaaaaaaaaaaaaaaaaugcaucccccccccccccccccccccccccccccccaaaggcucuuuucagagccaccagaauu

SEQ ID NO: 2608 - RNA, 1964 nt, Artificial Sequence
  mRNA product Design f-3 comprising derived and/or modified sequence from HRSV(A2)__F_DSCav1_mut2 (opt1)
gggagagucccgcagucggcguccagcggcucugcuuguucgugugugugucguugcaggccuuauucaagcuuaccauggagcugcucauccugaaggccaacgccaucaccaccauccugacggcggugaccuucugcuucgccagcggccagaacaucaccgaggaguucuaccaguccacgugcagcgccgucuccaagggguaccucggcgcccugcgcaccgggugguacaccagcgugaucaccaucgagcuguccaacaucaaggagaacaagugcaacggcaccgacgccaaggugaagcucaucaagcaggagcuggacaaguacaagaacgcggucacggaccugcagcuccugaugcagagcacccccgccaccggguccggcagcgccaucugcuccggcguggccgugugcaagguccugcaccucgagggggaggugaacaagaucaagagcgcgcugcuguccaccaacaaggccguggucagccucuccaacggcgugagcgugcugacguucaagguccuggaccucaagaacuacaucgacaagcagcugcugccgauccucaacaagcaguccugcagcauccccaacaucgagaccgugaucgaguuccagcagaagaacaaccggcugcuggagaucacccgcgaguucuccgugaacgccggggucaccacgcccgugagcaccuacaugcucaccaacuccgagcugcugagccucaucaacgacaugcccaucaccaacgaccagaagaagcugaugagcaacaacgugcagaucguccggcagcaguccuacagcaucaugugcaucaucaaggaggaggugcuggccuacgugguccagcucccgcuguacggcgugaucgacacgcccugcuggaagcugcacaccagcccccucugcaccaccaacacgaaggagggguccaacaucugccugacccgcaccgaccggggcugguacugcgacaacgccggcuccgugagcuucuucccccaggcggagaccugcaagguccaguccaaccgcguguucugcgacacgaugaacagccugacccucccguccgaggucaaccugugcaacguggacaucuucaaccccaaguacgacugcaagaucaugaccagcaagaccgacguguccagcuccgucaucacgagccugggggccaucguguccugcuacggcaagaccaagugcaccgccagcaacaagaaccgggggaucaucaagaccuucuccaacggcugcgacuacgugagcaacaagggcgucgacacgguguccguggggaacacccucuacugcgucaacaagcaggagggccagagccuguacgugaagggggagcccaucaucaacuucuacgacccccugguguucccgagcgacgaguucgacgccuccaucagccaggucaacgagaagaucaaccagucccucgccuucauccgcaagagcgacgagcugcugcacaacgugaacgcgggcaaguccaccaccaacaucaugaucaccacgaucaucaucgugaucaucgucauccuccugagccugaucgccguggggcuccugcuguacugcaaggcccgguccacccccgugacccugagcaaggaccagcucuccggcaucaacaacaucgccuucagcaacugaggacuaguacuggcugcaucucccuuuccucuguccuccauccuucucccaggauggugaagggggaccugguacccagugauccccaccccaggauccuaaaucaugacuuaccugcuaauaaaaacucauuggaaaagugagaagaucuaaaaaaaaaaaaaaaaaaaaaaaaaaaaaaaaaaaaaaaaaaaaaaaaaaaaaaaaaaaaaaaaugcaucccccccccccccccccccccccccccccccaaaggcucuuuucagagccaccagaauu

SEQ ID NO: 2609 - RNA, 1964 nt, Artificial Sequence
  mRNA product Design f-3 comprising derived and/or modified sequence from HRSV(A2)__F_DSCav1_mut2 (opt2)
gggagagucccgcagucggcguccagcggcucugcuuguucgugugugugucguugcaggccuuauucaagcuuaccauggagcuccucauccucaaggccaacgccaucaccaccauccucaccgccgucaccuucugcuucgccuccggccagaacaucaccgaggaguucuaccaguccaccugcuccgccgucuccaagggcuaccucggcgcccuccgcaccggcugguacaccuccgucaucaccaucgagcucuccaacaucaaggagaacaagugcaacggcaccgacgccaaggucaagcucaucaagcaggagcucgacaaguacaagaacgccgucaccgaccuccagcuccucaugcaguccacccccgccaccggcuccggcuccgccaucugcuccggcgucgccgucugcaagguccuccaccucgagggcgaggucaacaagaucaaguccgcccuccucuccaccaacaaggccgucgucucccucuccaacggcgucuccguccucaccuucaagguccucgaccucaagaacuacaucgacaagcagcuccuccccauccucaacaagcaguccugcuccauccccaacaucgagaccgucaucgaguuccagcagaagaacaaccgccuccucgagaucacccgcgaguucuccgucaacgccggcgucaccacccccgucuccaccuacaugcucaccaacuccgagcuccucucccucaucaacgacaugcccaucaccaacgaccagaagaagcucauguccaacaacguccagaucguccgccagcaguccuacuccaucaugugcaucaucaaggaggagguccucgccuacgucguccagcucccccucuacggcgucaucgacacccccugcuggaagcuccacaccuccccccucugcaccaccaacaccaaggagggcuccaacaucugccucacccgcaccgaccgcggcugguacugcgacaacgccggcuccgucuccuucuucccccaggccgagaccugcaagguccaguccaaccgcgucuucugcgacaccaugaacucccucacccuccccuccgaggucaaccucugcaacgucgacaucuucaaccccaaguacgacugcaagaucaugaccuccaagaccgacgucuccuccuccgucaucaccucccucggcgccaucgucuccugcuacggcaagaccaagugcaccgccuccaacaagaaccgcggcaucaucaagaccuucuccaacggcugcgacuacgucuccaacaagggcgucgacaccgucuccgucggcaacacccucuacugcgucaacaagcaggagggccagucccucuacgucaagggcgagcccaucaucaacuucuacgacccccucgucuuccccuccgacgaguucgacgccuccaucucccaggucaacgagaagaucaaccagucccucgccuucauccgcaaguccgacgagcuccuccacaacgucaacgccggcaaguccaccaccaacaucaugaucaccaccaucaucaucgucaucaucgucauccuccucucccucaucgccgucggccuccuccucuacugcaaggcccgcuccacccccgucacccucuccaaggaccagcucuccggcaucaacaacaucgccuucuccaacugaggacuaguacuggcugcaucucccuuuccucuguccuccauccuucucccaggauggugaagggggaccugguacccagugauccccaccccaggauccuaaaucaugacuuaccugcuaauaaaaacucauuggaaaagugagaagaucuaaaaaaaaaaaaaaaaaaaaaaaaaaaaaaaaaaaaaaaaaaaaaaaaaaaaaaaaaaaaaaaaugcaucccccccccccccccccccccccccccccccaaaggcucuuuucagagccaccagaauu

SEQ ID NO: 2610 - RNA, 1964 nt, Artificial Sequence
  mRNA product Design f-3 comprising derived and/or modified sequence from HRSV(A2)__F_DSCav1_mut2 (opt3)
gggagagucccgcagucggcguccagcggcucugcuuguucgugugugugucguugcaggccuuauucaagcuuaccauggagcugcucauccuuaaggccaacgcuauuaccacaauacugacugcagugacguucugcuuugccagcggccagaauaucaccgaagaguucuaccaauccacauguucugcggucucaaaaggguauuugggagcuuuaagaacugguugguacaccaguguuauuacaaucgaacugagcaacauuaaggagaauaaaugcaacggcaccgacgccaaggugaaacuaaucaagcaggaacucgauaaguauaaaaaugcaguaacugaccugcagcuucugaugcaguccacacccgccaccgggucuggaucggcuauauguucaggcguggcagucugcaagguguugcaccucgagggugagguuaacaaaaucaagagcgcccugcugaguacgaauaaagcuguggucucccucucuaacggggugagcguauuaacuuuuaagguucuggaucuuaagaauuacauugacaaacaauugcugccuauccuaaacaagcaguccuguucaauuccaaauaucgaaaccgugauagaguuccagcagaaaaacaauaggcuccuggaaauuacacgggaguuuagugucaacgccggagugacuaccccggugagcacauauaugcuuaccaauucugagcuguugucccucaucaacgauaugcccauuacgaacgaccaaaagaaacugaugucaaauaacguccagaucguucgccagcagagcuacaguaucaugugcauuauaaaggaagagguguuagcguauguagugcaacugccucucuacggcgucaucgauacuccauguuggaaacuucauacaucuccccugugcaccacuaauacaaaggaaggcuccaacauuuguuugacccgaacggaccgugggugguacugcgauaaugcaggaagcgugucguucuuuccucaggccgagaccuguaagguucagucuaacagaguguucugcgacacaaugaacucccuaacucugccaucagaagucaaucucugcaauguggauaucuuuaaccccaaauaugacuguaagauaaugaccaguaaaacagauguaagcuccucuguuauuacuagccugggugcuaucgugucaugcuacggcaagaccaaauguacagccaguaauaagaacagggggaucauuaagaccuucuccaauggaugcgacuaugucagcaacaaaggcguggacacugucucuguggguaauacgcuuuacuguguuaacaagcaagaggggcagucacuguaugugaaaggagagccuaucauuaacuuuuacgauccauugguauucccgagugacgaauuugaugcaagcauaucccaggucaaugagaagaucaaccagucucucgcuuucauucggaaaucggacgaacuguuacacaaugugaacgccggcaagagcacaaccaauaucaugaucacuaccauuauaaucguuauuaucgugauucugcuaucccucaucgcggucggccugcuuuuguauugcaaggcccgcucaacacccgugacccugaguaaagaucaacucucugggauaaacaauaucgcauucagcaacugaggacuaguacuggcugcaucucccuuuccucuguccuccauccuucucccaggauggugaagggggaccugguacccagugauccccaccccaggauccuaaaucaugacuuaccugcuaauaaaaacucauuggaaaagugagaagaucuaaaaaaaaaaaaaaaaaaaaaaaaaaaaaaaaaaaaaaaaaaaaaaaaaaaaaaaaaaaaaaaaugcaucccccccccccccccccccccccccccccccaaaggcucuuuucagagccaccagaauu

SEQ ID NO: 2611 - RNA, 1964 nt, Artificial Sequence
  mRNA product Design f-3 comprising derived and/or modified sequence from HRSV(A2)__F_DSCav1_mut2 (opt4)
gggagagucccgcagucggcguccagcggcucugcuuguucgugugugugucguugcaggccuuauucaagcuuaccauggagcugcugauccugaaggccaacgccaucaccaccauccugaccgccgugaccuucugcuucgccagcggccagaacaucaccgaggaguucuaccagagcaccugcagcgccgugagcaagggcuaccugggcgcccugagaaccggcugguacaccagcgugaucaccaucgagcugagcaacaucaaggagaacaagugcaacggcaccgacgccaaggugaagcugaucaagcaggagcuggacaaguacaagaacgccgugaccgaccugcagcugcugaugcagagcacccccgccaccggcagcggcagcgccaucugcagcggcguggccgugugcaaggugcugcaccuggagggcgaggugaacaagaucaagagcgcccugcugagcaccaacaaggccguggugagccugagcaacggcgugagcgugcugaccuucaaggugcuggaccugaagaacuacaucgacaagcagcugcugcccauccugaacaagcagagcugcagcauccccaacaucgagaccgugaucgaguuccagcagaagaacaacagacugcuggagaucaccagagaguucagcgugaacgccggcgugaccacccccgugagcaccuacaugcugaccaacagcgagcugcugagccugaucaacgacaugcccaucaccaacgaccagaagaagcugaugagcaacaacgugcagaucgugagacagcagagcuacagcaucaugugcaucaucaaggaggaggugcuggccuacguggugcagcugccccuguacggcgugaucgacacccccugcuggaagcugcacaccagcccccugugcaccaccaacaccaaggagggcagcaacaucugccugaccagaaccgacagaggcugguacugcgacaacgccggcagcgugagcuucuucccccaggccgagaccugcaaggugcagagcaacagaguguucugcgacaccaugaacagccugacccugcccagcgaggugaaccugugcaacguggacaucuucaaccccaaguacgacugcaagaucaugaccagcaagaccgacgugagcagcagcgugaucaccagccugggcgccaucgugagcugcuacggcaagaccaagugcaccgccagcaacaagaacagaggcaucaucaagaccuucagcaacggcugcgacuacgugagcaacaagggcguggacaccgugagcgugggcaacacccuguacugcgugaacaagcaggagggccagagccuguacgugaagggcgagcccaucaucaacuucuacgacccccugguguuccccagcgacgaguucgacgccagcaucagccaggugaacgagaagaucaaccagagccuggccuucaucagaaagagcgacgagcugcugcacaacgugaacgccggcaagagcaccaccaacaucaugaucaccaccaucaucaucgugaucaucgugauccugcugagccugaucgccgugggccugcugcuguacugcaaggccagaagcacccccgugacccugagcaaggaccagcugagcggcaucaacaacaucgccuucagcaacugaggacuaguacuggcugcaucucccuuuccucuguccuccauccuucucccaggauggugaagggggaccugguacccagugauccccaccccaggauccuaaaucaugacuuaccugcuaauaaaaacucauuggaaaagugagaagaucuaaaaaaaaaaaaaaaaaaaaaaaaaaaaaaaaaaaaaaaaaaaaaaaaaaaaaaaaaaaaaaaaugcaucccccccccccccccccccccccccccccccaaaggcucuuuucagagccaccagaauu

SEQ ID NO: 2612 - RNA, 1964 nt, Artificial Sequence
  mRNA product Design f-3 comprising derived and/or modified sequence from HRSV(A2)__F_DSCav1_mut2 (opt5)
gggagagucccgcagucggcguccagcggcucugcuuguucgugugugugucguugcaggccuuauucaagcuuaccauggagcugcucauccugaaggccaacgcuauuaccacaauccuuacggccgugaccuucugcuuugcgagcggccagaauauuacagaagaguucuaccaauccaccuguucugcugucagcaaaggguaucugggagcccucagaacaggcugguacaccuccguuaucacaauugaacugucuaacaucaaggagaauaaaugcaacgggaccgacgccaaggugaaacuuaucaagcaggaacuggauaaguauaaaaaugcugugacggaccuccagcugcugaugcagagcacccccgccacaggauccggcucugcuauuuguagcggggucgccgugugcaagguucuccaccuggagggagaggugaacaaaaucaaguccgcgcuucugagcaccaauaaagccgucgugucucucuccaacggcguuagcgugcugacauuuaagguccuugaucugaagaauuacauugacaaacaacuccugccuauccugaacaagcagucuuguuccauuccgaauaucgaaaccgugauugaguuccagcagaaaaacaaucggcuccuggaaaucacgcgcgaguuuagcgugaacgcuggcgucacaacccccguuucuacauauaugcuuaccaauuccgagcugcucagccugaucaacgauaugccuauuaccaacgaccaaaagaaacuuauguccaauaacgugcagaucgugagacagcagucuuacagcauuaugugcaucauuaaggaagagguccuggccuaugugguucaacucccccuguacggggugaucgauacaccuuguuggaaacugcauacgagcccccucugcaccacaaauaccaaggaaggauccaacaucugucugacacggaccgaccgcggcugguacugcgauaaugcugggucugucuccuucuuuccucaggccgagacguguaaggugcagagcaacagaguuuucugcgacacaaugaacucucuuacccugccgagcgaagugaaucucugcaaugucgauauuuuuaaccccaaauaugacuguaagaucaugaccuccaaaacagaugugucuagcuccgucauuaccagccugggagcgaucgugucuugcuacggcaagacaaaauguacggccuccaauaagaaccgggggauuaucaagaccuucagcaauggaugcgacuauguuucuaacaaaggcguggacacagucuccgugggcaauacccuuuacuguguuaacaagcaagaggggcagagccuguaugugaaaggagagccuaucauuaacuuuuacgauccccucgucuucccuuccgacgaauuugaugcuucuaucagccaggugaaugagaagauuaaccagucccuggccuucauccgcaaaucugacgaacugcuccacaaugugaacgcuggcaagagcacaaccaauauuaugaucacgaccauuaucaucguuauuaucgucauucugcuuucccugaucgccguggggcuccugcuguauugcaaggccagaagcacacccgugacccuuucuaaagaucaacucuccggaauuaacaauaucgcuuucagcaacugaggacuaguacuggcugcaucucccuuuccucuguccuccauccuucucccaggauggugaagggggaccugguacccagugauccccaccccaggauccuaaaucaugacuuaccugcuaauaaaaacucauuggaaaagugagaagaucuaaaaaaaaaaaaaaaaaaaaaaaaaaaaaaaaaaaaaaaaaaaaaaaaaaaaaaaaaaaaaaaaugcaucccccccccccccccccccccccccccccccaaaggcucuuuucagagccaccagaauu

SEQ ID NO: 2613 - RNA, 1964 nt, Artificial Sequence
  mRNA product Design f-3 comprising derived and/or modified sequence from HRSV(A2)__F_DSCav1_mut2 (opt6)
gggagagucccgcagucggcguccagcggcucugcuuguucgugugugugucguugcaggccuuauucaagcuuaccauggaacuacuaauccuaaaagcaaacgcaauuacaacuauacuuaccgccguaacauuuugcuucgcaucugggcaaaacauuaccgaagaauuuuaucaaucaacaugcucagcagucuccaaaggauaccuuggagcauuaagaaccggcugguauaccuccguaauaacaauugaacuaucuaauauaaaagaaaauaaauguaauggaacugacgcaaaaguuaaacuaauaaaacaagaacucgacaaauacaaaaacgccgucacagaccuacaacuacuaaugcaaucaacccccgcaacaggaucaggauccgcaaucugcagcggcgucgcaguuugcaaaguccuacauuuagaaggagaaguaaacaaaauaaaaucugcucuccucucuacaaacaaagcaguagugucacuuucaaacggaguaucaguucuaacauucaaaguacuagaccuaaaaaauuacauagacaaacaacuacuuccaauucuaaacaaacaauccuguuccauacccaacauagaaacaguaauagaauuucaacaaaaaaauaacagacuccuagaaauuacaagagaauuuuccgucaaugcaggaguaacaaccccaguaucaaccuacauguuaacuaacucagaacucuuaucacuaauaaacgacaugccaaucacuaaugaccaaaaaaaacucaugucaaauaacguacaaauaguccgacaacaaucauacuccaucaugugcauuauaaaagaagaaguacuagcauacgucguccaauuaccacuauacggcgucauagacacaccauguuggaaacuccacacaucaccacuaugcacuacaaauacaaaagaaggcuccaacaucugccuaacaagaacagacagagguugguauugcgacaacgcaggaucaguaucauuuuucccccaagcagaaacauguaaaguacaaucaaauagagucuucugcgacaccaugaacucauuaacacuaccuucagaagucaaccuaugcaacguagacaucuucaacccuaaauaugacugcaaaaucaugaccagcaaaaccgacguuucaucuuccguaauaacaucacuaggcgcaauagucucauguuacggcaaaacaaaauguacagcaucaaauaaaaaccguggaauaauaaaaacauuuucuaaugguugugacuacguaagcaauaaaggaguagauacaguaucagucggcaacaccuuauacuguguaaacaaacaagaaggccaaaguuuauacgucaaaggagaacccaucaucaacuucuacgacccauuaguauucccaucagacgaauuugaugcaagcauuucacaagucaacgaaaaaaucaaucaaucauuagcauucauccgaaaaucagacgaauuauuacacaacguaaacgccggaaaaucaaccacuaauauaaugauaaccacaauaaucaucguaauaauaguaauacuucucucacuaaucgcagucggacuccuucuauacugcaaagcaagaucuacaccaguaacacuauccaaagaucaacuaaguggcauaaacaacauagcauuuucuaacuaaggacuaguacuggcugcaucucccuuuccucuguccuccauccuucucccaggauggugaagggggaccugguacccagugauccccaccccaggauccuaaaucaugacuuaccugcuaauaaaaacucauuggaaaagugagaagaucuaaaaaaaaaaaaaaaaaaaaaaaaaaaaaaaaaaaaaaaaaaaaaaaaaaaaaaaaaaaaaaaaugcaucccccccccccccccccccccccccccccccaaaggcucuuuucagagccaccagaauu

SEQ ID NO: 2614 - RNA, 1964 nt, Artificial Sequence
  mRNA product Design f-3 comprising derived and/or modified sequence from HRSV(A2)__F_DSCav1_mut2 (opt11)
gggagagucccgcagucggcguccagcggcucugcuuguucgugugugugucguugcaggccuuauucaagcuuaccauggaacuccucauccuaaaagccaacgcgaucaccacaauccugacagccgucaccuucugcuucgccuccggccaaaacaucaccgaagaguucuaccaauccacaugcuccgccgucuccaagggcuaccugggcgcacuucguacaggcugguacaccuccguaauaaccaucgaacucuccaacaucaaagaaaacaaaugcaacggcacagacgcaaaagucaaacucaucaagcaagaacuugacaaauacaaaaaugcagucaccgaccuucaacuccucaugcaaucuacccccgccacaggcuccggcuccgcuaucugcuccggcgucgccgucugcaaaguccuccaccucgaaggugaaguaaacaaaauaaaauccgcccuccucuccaccaacaaagccgucgucucccuaucaaacggcgucuccgugcucaccuucaagguucucgaccugaaaaacuacauagacaaacagcuccuaccaauccuuaacaaacagagcugcuccauuccgaauaucgaaacgguaaucgaauuucaacagaaaaacaaccgccuccucgaaauaacgcgagaguucuccguaaacgcuggcgucaccacacccgucagcaccuacaugcuaacgaacuccgaacucuugucgcucaucaacgacaugcccauaaccaacgaccaaaagaaacuaauguccaauaacguacaaaucguacgccaacaaucuuacuccaucaugugcaucauaaaagaagaaguacuagcuuacgucguccaacucccacuguacggagucaucgacacccccugcuggaaacuccacaccucuccccucugcaccaccaacaccaaagagggcuccaacauuugccugacacgcaccgaccgcggcugguacugcgacaacgcaggcuccgucucguucuucccccaagccgaaaccugcaaaguccaauccaaccgcgucuucugcgacaccaugaacucccucacccuccccuccgaagucaaucuaugcaacguagacaucuucaacccgaaauaugacugcaaaauuaugacaucuaaaaccgacguguccuccucagucaucacuucccuaggagccaucguuuccuguuacggcaagaccaaaugcaccgccagcaacaaaaaccgaggcaucaucaaaaccuucuccaacggaugugacuaugucuccaacaagggcgucgacaccgucagcgucggcaacacccucuacugcgucaacaaacaagaaggccaaucccucuacgucaaaggagagcccauaaucaacuucuacgacccccucgucuucccauccgacgaguucgacgccucaaucucccaagucaacgagaaaaucaaccaauccuuagccuucauccguaaguccgacgaacuccuucacaacgucaacgccgguaaaucuaccaccaacaucaugauaacaacaauaauuaucgucaucaucgucauccuccuuucccucaucgcggucgggcuauugcucuacugcaaagcccgguccaccccaguaacccucucuaaagaccaacucagcggaaucaauaacauagccuucagcaauuaaggacuaguacuggcugcaucucccuuuccucuguccuccauccuucucccaggauggugaagggggaccugguacccagugauccccaccccaggauccuaaaucaugacuuaccugcuaauaaaaacucauuggaaaagugagaagaucuaaaaaaaaaaaaaaaaaaaaaaaaaaaaaaaaaaaaaaaaaaaaaaaaaaaaaaaaaaaaaaaaugcaucccccccccccccccccccccccccccccccaaaggcucuuuucagagccaccagaauu

SEQ ID NO: 2615 - RNA, 2180 nt, Artificial Sequence
  mRNA product Design f-4 comprising derived and/or modified sequence from HRSV(A2)__F_DSCav1_mut2 (opt1)
gggagagucccgcagucggcguccagcggcucugcuuguucgugugugugucguugcaggccuuauucaagcuuaccauggagcugcucauccugaaggccaacgccaucaccaccauccugacggcggugaccuucugcuucgccagcggccagaacaucaccgaggaguucuaccaguccacgugcagcgccgucuccaagggguaccucggcgcccugcggaccggcugguacaccuccgugaucaccaucgagcugagcaacaucaaggagaacaagugcaacgggaccgacgccaaggugaagcucaucaagcaggagcuggacaaguacaagaacgcggucacggaccugcagcuccugaugcaguccaccccggcaaccggcuccggcuccgccaucugcagcggcgucgccgugugcaaggugcugcaccucgagggggaggucaacaagaucaagagcgcccugcuguccaccaacaaggccguggugagccucuccaacggcgucagcgugcugaccuucaaggugcuggaccucaagaacuacaucgacaagcagcugcugcccauccugaacaagcagagcugcuccauccccaacaucgagacggugaucgaguuccagcagaagaacaaccggcuccuggagaucacccgcgaguucagcgugaacgccggggucaccacccccguguccacguacaugcugaccaacagcgagcuccugucccugaucaacgacaugccgaucaccaacgaccagaagaagcucaugagcaacaacgugcagaucguccggcagcaguccuacagcaucaugugcaucaucaaggaggaggugcuggcguacgugguccagcugccccucuacggcgugaucgacacccccugcuggaagcugcacacgagcccccugugcaccaccaacaccaaggagggguccaacaucugccucacgcgcaccgaccggggcugguacugcgacaacgccggcagcgucuccuucuucccgcaggccgagaccugcaaggugcagagcaaccgcguguucugcgacaccaugaacucccugacgcugcccagcgagguaaaccucugcaacgucgacaucuucaaccccaaguacgacugcaagaucaugaccuccaagaccgacgugagcuccagcgugaucaccucccugggggccaucgucagcugcuacggcaagacgaagugcaccgccagcaacaagaaccgggggaucaucaagaccuucuccaacggcugcgacuacgugagcaacaagggcguggacaccguguccgucgggaacacccuguacugcgugaacaagcaggagggccagagccucuacgugaagggggagcccaucaucaacuucuacgacccgcuggucuuccccuccgacgaguucgacgcgagcaucucccaggugaacgagaagaucaaccagagccuggccuucauccgcaaguccgacgagcugcuccacaacgugaacgccggcaagagcacgaccaacaucaugaucaccaccaucaucaucgucaucaucgugauccugcugucccucaucgccguggggcugcugcucuacugcaaggcccggagcacgcccgucacccuguccaaggaccagcugagcggcaucaacaacaucgcguucuccaacugaggacuagugaagggaacacccaaauuuaauucagccuuaagcacaauuaauuaagagugaaacguaauuguacaagcaguuggucacccaccauagggcaugaucaacaccgcaaccuuuccuuuuucccccagugauucugaaaaaccccucuucccuucagcuugcuuagauguuccaaauuuaguaagcuuaaggcggccuacagaagaaaaagaaaaaaaaggccacaaaaguucccucucacuuucaguaaauaaaauaaaagcagcaacagaaauaaagaaauaaaugaaauucaaaaugaaauaaauauuguguugugcagcauuaaaaaaucaauaaaaauuaaaaaugagcaagaucuaaaaaaaaaaaaaaaaaaaaaaaaaaaaaaaaaaaaaaaaaaaaaaaaaaaaaaaaaaaaaaaaugcaucccccccccccccccccccccccccccccccaaaggcucuuuucagagccaccagaauu

SEQ ID NO: 2616 - RNA, 2180 nt, Artificial Sequence
  mRNA product Design f-4 comprising derived and/or modified sequence from HRSV(A2)__F_DSCav1_mut2 (opt1)
gggagagucccgcagucggcguccagcggcucugcuuguucgugugugugucguugcaggccuuauucaagcuuaccauggagcugcucauccugaaggccaacgccaucaccaccauccugacggcggugaccuucugcuucgccagcggccagaacaucaccgaggaguucuaccaguccacgugcagcgccgucuccaagggguaccucggcgcccugcgcaccgggugguacaccagcgugaucaccaucgagcuguccaacaucaaggagaacaagugcaacggcaccgacgccaaggugaagcucaucaagcaggagcuggacaaguacaagaacgcggucacggaccugcagcuccugaugcagagcacccccgccaccggguccggcagcgccaucugcuccggcguggccgugugcaagguccugcaccucgagggggaggugaacaagaucaagagcgcgcugcuguccaccaacaaggccguggucagccucuccaacggcgugagcgugcugacguucaagguccuggaccucaagaacuacaucgacaagcagcugcugccgauccucaacaagcaguccugcagcauccccaacaucgagaccgugaucgaguuccagcagaagaacaaccggcugcuggagaucacccgcgaguucuccgugaacgccggggucaccacgcccgugagcaccuacaugcucaccaacuccgagcugcugagccucaucaacgacaugcccaucaccaacgaccagaagaagcugaugagcaacaacgugcagaucguccggcagcaguccuacagcaucaugugcaucaucaaggaggaggugcuggccuacgugguccagcucccgcuguacggcgugaucgacacgcccugcuggaagcugcacaccagcccccucugcaccaccaacacgaaggagggguccaacaucugccugacccgcaccgaccggggcugguacugcgacaacgccggcuccgugagcuucuucccccaggcggagaccugcaagguccaguccaaccgcguguucugcgacacgaugaacagccugacccucccguccgaggucaaccugugcaacguggacaucuucaaccccaaguacgacugcaagaucaugaccagcaagaccgacguguccagcuccgucaucacgagccugggggccaucguguccugcuacggcaagaccaagugcaccgccagcaacaagaaccgggggaucaucaagaccuucuccaacggcugcgacuacgugagcaacaagggcgucgacacgguguccguggggaacacccucuacugcgucaacaagcaggagggccagagccuguacgugaagggggagcccaucaucaacuucuacgacccccugguguucccgagcgacgaguucgacgccuccaucagccaggucaacgagaagaucaaccagucccucgccuucauccgcaagagcgacgagcugcugcacaacgugaacgcgggcaaguccaccaccaacaucaugaucaccacgaucaucaucgugaucaucgucauccuccugagccugaucgccguggggcuccugcuguacugcaaggcccgguccacccccgugacccugagcaaggaccagcucuccggcaucaacaacaucgccuucagcaacugaggacuagugaagggaacacccaaauuuaauucagccuuaagcacaauuaauuaagagugaaacguaauuguacaagcaguuggucacccaccauagggcaugaucaacaccgcaaccuuuccuuuuucccccagugauucugaaaaaccccucuucccuucagcuugcuuagauguuccaaauuuaguaagcuuaaggcggccuacagaagaaaaagaaaaaaaaggccacaaaaguucccucucacuuucaguaaauaaaauaaaagcagcaacagaaauaaagaaauaaaugaaauucaaaaugaaauaaauauuguguugugcagcauuaaaaaaucaauaaaaauuaaaaaugagcaagaucuaaaaaaaaaaaaaaaaaaaaaaaaaaaaaaaaaaaaaaaaaaaaaaaaaaaaaaaaaaaaaaaaugcaucccccccccccccccccccccccccccccccaaaggcucuuuucagagccaccagaauu

SEQ ID NO: 2617 - RNA, 2180 nt, Artificial Sequence
  mRNA product Design f-4 comprising derived and/or modified sequence from HRSV(A2)__F_DSCav1_mut2 (opt2)
gggagagucccgcagucggcguccagcggcucugcuuguucgugugugugucguugcaggccuuauucaagcuuaccauggagcuccucauccucaaggccaacgccaucaccaccauccucaccgccgucaccuucugcuucgccuccggccagaacaucaccgaggaguucuaccaguccaccugcuccgccgucuccaagggcuaccucggcgcccuccgcaccggcugguacaccuccgucaucaccaucgagcucuccaacaucaaggagaacaagugcaacggcaccgacgccaaggucaagcucaucaagcaggagcucgacaaguacaagaacgccgucaccgaccuccagcuccucaugcaguccacccccgccaccggcuccggcuccgccaucugcuccggcgucgccgucugcaagguccuccaccucgagggcgaggucaacaagaucaaguccgcccuccucuccaccaacaaggccgucgucucccucuccaacggcgucuccguccucaccuucaagguccucgaccucaagaacuacaucgacaagcagcuccuccccauccucaacaagcaguccugcuccauccccaacaucgagaccgucaucgaguuccagcagaagaacaaccgccuccucgagaucacccgcgaguucuccgucaacgccggcgucaccacccccgucuccaccuacaugcucaccaacuccgagcuccucucccucaucaacgacaugcccaucaccaacgaccagaagaagcucauguccaacaacguccagaucguccgccagcaguccuacuccaucaugugcaucaucaaggaggagguccucgccuacgucguccagcucccccucuacggcgucaucgacacccccugcuggaagcuccacaccuccccccucugcaccaccaacaccaaggagggcuccaacaucugccucacccgcaccgaccgcggcugguacugcgacaacgccggcuccgucuccuucuucccccaggccgagaccugcaagguccaguccaaccgcgucuucugcgacaccaugaacucccucacccuccccuccgaggucaaccucugcaacgucgacaucuucaaccccaaguacgacugcaagaucaugaccuccaagaccgacgucuccuccuccgucaucaccucccucggcgccaucgucuccugcuacggcaagaccaagugcaccgccuccaacaagaaccgcggcaucaucaagaccuucuccaacggcugcgacuacgucuccaacaagggcgucgacaccgucuccgucggcaacacccucuacugcgucaacaagcaggagggccagucccucuacgucaagggcgagcccaucaucaacuucuacgacccccucgucuuccccuccgacgaguucgacgccuccaucucccaggucaacgagaagaucaaccagucccucgccuucauccgcaaguccgacgagcuccuccacaacgucaacgccggcaaguccaccaccaacaucaugaucaccaccaucaucaucgucaucaucgucauccuccucucccucaucgccgucggccuccuccucuacugcaaggcccgcuccacccccgucacccucuccaaggaccagcucuccggcaucaacaacaucgccuucuccaacugaggacuagugaagggaacacccaaauuuaauucagccuuaagcacaauuaauuaagagugaaacguaauuguacaagcaguuggucacccaccauagggcaugaucaacaccgcaaccuuuccuuuuucccccagugauucugaaaaaccccucuucccuucagcuugcuuagauguuccaaauuuaguaagcuuaaggcggccuacagaagaaaaagaaaaaaaaggccacaaaaguucccucucacuuucaguaaauaaaauaaaagcagcaacagaaauaaagaaauaaaugaaauucaaaaugaaauaaauauuguguugugcagcauuaaaaaaucaauaaaaauuaaaaaugagcaagaucuaaaaaaaaaaaaaaaaaaaaaaaaaaaaaaaaaaaaaaaaaaaaaaaaaaaaaaaaaaaaaaaaugcaucccccccccccccccccccccccccccccccaaaggcucuuuucagagccaccagaauu

SEQ ID NO: 2618 - RNA, 2180 nt, Artificial Sequence
  mRNA product Design f-4 comprising derived and/or modified sequence from HRSV(A2)__F_DSCav1_mut2 (opt3)
gggagagucccgcagucggcguccagcggcucugcuuguucgugugugugucguugcaggccuuauucaagcuuaccauggagcugcucauccuuaaggccaacgcuauuaccacaauacugacugcagugacguucugcuuugccagcggccagaauaucaccgaagaguucuaccaauccacauguucugcggucucaaaaggguauuugggagcuuuaagaacugguugguacaccaguguuauuacaaucgaacugagcaacauuaaggagaauaaaugcaacggcaccgacgccaaggugaaacuaaucaagcaggaacucgauaaguauaaaaaugcaguaacugaccugcagcuucugaugcaguccacacccgccaccgggucuggaucggcuauauguucaggcguggcagucugcaagguguugcaccucgagggugagguuaacaaaaucaagagcgcccugcugaguacgaauaaagcuguggucucccucucuaacggggugagcguauuaacuuuuaagguucuggaucuuaagaauuacauugacaaacaauugcugccuauccuaaacaagcaguccuguucaauuccaaauaucgaaaccgugauagaguuccagcagaaaaacaauaggcuccuggaaauuacacgggaguuuagugucaacgccggagugacuaccccggugagcacauauaugcuuaccaauucugagcuguugucccucaucaacgauaugcccauuacgaacgaccaaaagaaacugaugucaaauaacguccagaucguucgccagcagagcuacaguaucaugugcauuauaaaggaagagguguuagcguauguagugcaacugccucucuacggcgucaucgauacuccauguuggaaacuucauacaucuccccugugcaccacuaauacaaaggaaggcuccaacauuuguuugacccgaacggaccgugggugguacugcgauaaugcaggaagcgugucguucuuuccucaggccgagaccuguaagguucagucuaacagaguguucugcgacacaaugaacucccuaacucugccaucagaagucaaucucugcaauguggauaucuuuaaccccaaauaugacuguaagauaaugaccaguaaaacagauguaagcuccucuguuauuacuagccugggugcuaucgugucaugcuacggcaagaccaaauguacagccaguaauaagaacagggggaucauuaagaccuucuccaauggaugcgacuaugucagcaacaaaggcguggacacugucucuguggguaauacgcuuuacuguguuaacaagcaagaggggcagucacuguaugugaaaggagagccuaucauuaacuuuuacgauccauugguauucccgagugacgaauuugaugcaagcauaucccaggucaaugagaagaucaaccagucucucgcuuucauucggaaaucggacgaacuguuacacaaugugaacgccggcaagagcacaaccaauaucaugaucacuaccauuauaaucguuauuaucgugauucugcuaucccucaucgcggucggccugcuuuuguauugcaaggcccgcucaacacccgugacccugaguaaagaucaacucucugggauaaacaauaucgcauucagcaacugaggacuagugaagggaacacccaaauuuaauucagccuuaagcacaauuaauuaagagugaaacguaauuguacaagcaguuggucacccaccauagggcaugaucaacaccgcaaccuuuccuuuuucccccagugauucugaaaaaccccucuucccuucagcuugcuuagauguuccaaauuuaguaagcuuaaggcggccuacagaagaaaaagaaaaaaaaggccacaaaaguucccucucacuuucaguaaauaaaauaaaagcagcaacagaaauaaagaaauaaaugaaauucaaaaugaaauaaauauuguguugugcagcauuaaaaaaucaauaaaaauuaaaaaugagcaagaucuaaaaaaaaaaaaaaaaaaaaaaaaaaaaaaaaaaaaaaaaaaaaaaaaaaaaaaaaaaaaaaaaugcaucccccccccccccccccccccccccccccccaaaggcucuuuucagagccaccagaauu

SEQ ID NO: 2619 - RNA, 2180 nt, Artificial Sequence
  mRNA product Design f-4 comprising derived and/or modified sequence from HRSV(A2)__F_DSCav1_mut2 (opt4)
gggagagucccgcagucggcguccagcggcucugcuuguucgugugugugucguugcaggccuuauucaagcuuaccauggagcugcugauccugaaggccaacgccaucaccaccauccugaccgccgugaccuucugcuucgccagcggccagaacaucaccgaggaguucuaccagagcaccugcagcgccgugagcaagggcuaccugggcgcccugagaaccggcugguacaccagcgugaucaccaucgagcugagcaacaucaaggagaacaagugcaacggcaccgacgccaaggugaagcugaucaagcaggagcuggacaaguacaagaacgccgugaccgaccugcagcugcugaugcagagcacccccgccaccggcagcggcagcgccaucugcagcggcguggccgugugcaaggugcugcaccuggagggcgaggugaacaagaucaagagcgcccugcugagcaccaacaaggccguggugagccugagcaacggcgugagcgugcugaccuucaaggugcuggaccugaagaacuacaucgacaagcagcugcugcccauccugaacaagcagagcugcagcauccccaacaucgagaccgugaucgaguuccagcagaagaacaacagacugcuggagaucaccagagaguucagcgugaacgccggcgugaccacccccgugagcaccuacaugcugaccaacagcgagcugcugagccugaucaacgacaugcccaucaccaacgaccagaagaagcugaugagcaacaacgugcagaucgugagacagcagagcuacagcaucaugugcaucaucaaggaggaggugcuggccuacguggugcagcugccccuguacggcgugaucgacacccccugcuggaagcugcacaccagcccccugugcaccaccaacaccaaggagggcagcaacaucugccugaccagaaccgacagaggcugguacugcgacaacgccggcagcgugagcuucuucccccaggccgagaccugcaaggugcagagcaacagaguguucugcgacaccaugaacagccugacccugcccagcgaggugaaccugugcaacguggacaucuucaaccccaaguacgacugcaagaucaugaccagcaagaccgacgugagcagcagcgugaucaccagccugggcgccaucgugagcugcuacggcaagaccaagugcaccgccagcaacaagaacagaggcaucaucaagaccuucagcaacggcugcgacuacgugagcaacaagggcguggacaccgugagcgugggcaacacccuguacugcgugaacaagcaggagggccagagccuguacgugaagggcgagcccaucaucaacuucuacgacccccugguguuccccagcgacgaguucgacgccagcaucagccaggugaacgagaagaucaaccagagccuggccuucaucagaaagagcgacgagcugcugcacaacgugaacgccggcaagagcaccaccaacaucaugaucaccaccaucaucaucgugaucaucgugauccugcugagccugaucgccgugggccugcugcuguacugcaaggccagaagcacccccgugacccugagcaaggaccagcugagcggcaucaacaacaucgccuucagcaacugaggacuagugaagggaacacccaaauuuaauucagccuuaagcacaauuaauuaagagugaaacguaauuguacaagcaguuggucacccaccauagggcaugaucaacaccgcaaccuuuccuuuuucccccagugauucugaaaaaccccucuucccuucagcuugcuuagauguuccaaauuuaguaagcuuaaggcggccuacagaagaaaaagaaaaaaaaggccacaaaaguucccucucacuuucaguaaauaaaauaaaagcagcaacagaaauaaagaaauaaaugaaauucaaaaugaaauaaauauuguguugugcagcauuaaaaaaucaauaaaaauuaaaaaugagcaagaucuaaaaaaaaaaaaaaaaaaaaaaaaaaaaaaaaaaaaaaaaaaaaaaaaaaaaaaaaaaaaaaaaugcaucccccccccccccccccccccccccccccccaaaggcucuuuucagagccaccagaauu

SEQ ID NO: 2620 - RNA, 2180 nt, Artificial Sequence
  mRNA product Design f-4 comprising derived and/or modified sequence from HRSV(A2)__F_DSCav1_mut2 (opt5)
gggagagucccgcagucggcguccagcggcucugcuuguucgugugugugucguugcaggccuuauucaagcuuaccauggagcugcucauccugaaggccaacgcuauuaccacaauccuuacggccgugaccuucugcuuugcgagcggccagaauauuacagaagaguucuaccaauccaccuguucugcugucagcaaaggguaucugggagcccucagaacaggcugguacaccuccguuaucacaauugaacugucuaacaucaaggagaauaaaugcaacgggaccgacgccaaggugaaacuuaucaagcaggaacuggauaaguauaaaaaugcugugacggaccuccagcugcugaugcagagcacccccgccacaggauccggcucugcuauuuguagcggggucgccgugugcaagguucuccaccuggagggagaggugaacaaaaucaaguccgcgcuucugagcaccaauaaagccgucgugucucucuccaacggcguuagcgugcugacauuuaagguccuugaucugaagaauuacauugacaaacaacuccugccuauccugaacaagcagucuuguuccauuccgaauaucgaaaccgugauugaguuccagcagaaaaacaaucggcuccuggaaaucacgcgcgaguuuagcgugaacgcuggcgucacaacccccguuucuacauauaugcuuaccaauuccgagcugcucagccugaucaacgauaugccuauuaccaacgaccaaaagaaacuuauguccaauaacgugcagaucgugagacagcagucuuacagcauuaugugcaucauuaaggaagagguccuggccuaugugguucaacucccccuguacggggugaucgauacaccuuguuggaaacugcauacgagcccccucugcaccacaaauaccaaggaaggauccaacaucugucugacacggaccgaccgcggcugguacugcgauaaugcugggucugucuccuucuuuccucaggccgagacguguaaggugcagagcaacagaguuuucugcgacacaaugaacucucuuacccugccgagcgaagugaaucucugcaaugucgauauuuuuaaccccaaauaugacuguaagaucaugaccuccaaaacagaugugucuagcuccgucauuaccagccugggagcgaucgugucuugcuacggcaagacaaaauguacggccuccaauaagaaccgggggauuaucaagaccuucagcaauggaugcgacuauguuucuaacaaaggcguggacacagucuccgugggcaauacccuuuacuguguuaacaagcaagaggggcagagccuguaugugaaaggagagccuaucauuaacuuuuacgauccccucgucuucccuuccgacgaauuugaugcuucuaucagccaggugaaugagaagauuaaccagucccuggccuucauccgcaaaucugacgaacugcuccacaaugugaacgcuggcaagagcacaaccaauauuaugaucacgaccauuaucaucguuauuaucgucauucugcuuucccugaucgccguggggcuccugcuguauugcaaggccagaagcacacccgugacccuuucuaaagaucaacucuccggaauuaacaauaucgcuuucagcaacugaggacuagugaagggaacacccaaauuuaauucagccuuaagcacaauuaauuaagagugaaacguaauuguacaagcaguuggucacccaccauagggcaugaucaacaccgcaaccuuuccuuuuucccccagugauucugaaaaaccccucuucccuucagcuugcuuagauguuccaaauuuaguaagcuuaaggcggccuacagaagaaaaagaaaaaaaaggccacaaaaguucccucucacuuucaguaaauaaaauaaaagcagcaacagaaauaaagaaauaaaugaaauucaaaaugaaauaaauauuguguugugcagcauuaaaaaaucaauaaaaauuaaaaaugagcaagaucuaaaaaaaaaaaaaaaaaaaaaaaaaaaaaaaaaaaaaaaaaaaaaaaaaaaaaaaaaaaaaaaaugcaucccccccccccccccccccccccccccccccaaaggcucuuuucagagccaccagaauu

SEQ ID NO: 2621 - RNA, 2180 nt, Artificial Sequence
  mRNA product Design f-4 comprising derived and/or modified sequence from HRSV(A2)__F_DSCav1_mut2 (opt6)
gggagagucccgcagucggcguccagcggcucugcuuguucgugugugugucguugcaggccuuauucaagcuuaccauggaacuacuaauccuaaaagcaaacgcaauuacaacuauacuuaccgccguaacauuuugcuucgcaucugggcaaaacauuaccgaagaauuuuaucaaucaacaugcucagcagucuccaaaggauaccuuggagcauuaagaaccggcugguauaccuccguaauaacaauugaacuaucuaauauaaaagaaaauaaauguaauggaacugacgcaaaaguuaaacuaauaaaacaagaacucgacaaauacaaaaacgccgucacagaccuacaacuacuaaugcaaucaacccccgcaacaggaucaggauccgcaaucugcagcggcgucgcaguuugcaaaguccuacauuuagaaggagaaguaaacaaaauaaaaucugcucuccucucuacaaacaaagcaguagugucacuuucaaacggaguaucaguucuaacauucaaaguacuagaccuaaaaaauuacauagacaaacaacuacuuccaauucuaaacaaacaauccuguuccauacccaacauagaaacaguaauagaauuucaacaaaaaaauaacagacuccuagaaauuacaagagaauuuuccgucaaugcaggaguaacaaccccaguaucaaccuacauguuaacuaacucagaacucuuaucacuaauaaacgacaugccaaucacuaaugaccaaaaaaaacucaugucaaauaacguacaaauaguccgacaacaaucauacuccaucaugugcauuauaaaagaagaaguacuagcauacgucguccaauuaccacuauacggcgucauagacacaccauguuggaaacuccacacaucaccacuaugcacuacaaauacaaaagaaggcuccaacaucugccuaacaagaacagacagagguugguauugcgacaacgcaggaucaguaucauuuuucccccaagcagaaacauguaaaguacaaucaaauagagucuucugcgacaccaugaacucauuaacacuaccuucagaagucaaccuaugcaacguagacaucuucaacccuaaauaugacugcaaaaucaugaccagcaaaaccgacguuucaucuuccguaauaacaucacuaggcgcaauagucucauguuacggcaaaacaaaauguacagcaucaaauaaaaaccguggaauaauaaaaacauuuucuaaugguugugacuacguaagcaauaaaggaguagauacaguaucagucggcaacaccuuauacuguguaaacaaacaagaaggccaaaguuuauacgucaaaggagaacccaucaucaacuucuacgacccauuaguauucccaucagacgaauuugaugcaagcauuucacaagucaacgaaaaaaucaaucaaucauuagcauucauccgaaaaucagacgaauuauuacacaacguaaacgccggaaaaucaaccacuaauauaaugauaaccacaauaaucaucguaauaauaguaauacuucucucacuaaucgcagucggacuccuucuauacugcaaagcaagaucuacaccaguaacacuauccaaagaucaacuaaguggcauaaacaacauagcauuuucuaacuaaggacuagugaagggaacacccaaauuuaauucagccuuaagcacaauuaauuaagagugaaacguaauuguacaagcaguuggucacccaccauagggcaugaucaacaccgcaaccuuuccuuuuucccccagugauucugaaaaaccccucuucccuucagcuugcuuagauguuccaaauuuaguaagcuuaaggcggccuacagaagaaaaagaaaaaaaaggccacaaaaguucccucucacuuucaguaaauaaaauaaaagcagcaacagaaauaaagaaauaaaugaaauucaaaaugaaauaaauauuguguugugcagcauuaaaaaaucaauaaaaauuaaaaaugagcaagaucuaaaaaaaaaaaaaaaaaaaaaaaaaaaaaaaaaaaaaaaaaaaaaaaaaaaaaaaaaaaaaaaaugcaucccccccccccccccccccccccccccccccaaaggcucuuuucagagccaccagaauu

SEQ ID NO: 2622 - RNA, 2180 nt, Artificial Sequence
  mRNA product Design f-4 comprising derived and/or modified sequence from HRSV(A2)__F_DSCav1_mut2 (opt11)
gggagagucccgcagucggcguccagcggcucugcuuguucgugugugugucguugcaggccuuauucaagcuuaccauggaacuccucauccuaaaagccaacgcgaucaccacaauccugacagccgucaccuucugcuucgccuccggccaaaacaucaccgaagaguucuaccaauccacaugcuccgccgucuccaagggcuaccugggcgcacuucguacaggcugguacaccuccguaauaaccaucgaacucuccaacaucaaagaaaacaaaugcaacggcacagacgcaaaagucaaacucaucaagcaagaacuugacaaauacaaaaaugcagucaccgaccuucaacuccucaugcaaucuacccccgccacaggcuccggcuccgcuaucugcuccggcgucgccgucugcaaaguccuccaccucgaaggugaaguaaacaaaauaaaauccgcccuccucuccaccaacaaagccgucgucucccuaucaaacggcgucuccgugcucaccuucaagguucucgaccugaaaaacuacauagacaaacagcuccuaccaauccuuaacaaacagagcugcuccauuccgaauaucgaaacgguaaucgaauuucaacagaaaaacaaccgccuccucgaaauaacgcgagaguucuccguaaacgcuggcgucaccacacccgucagcaccuacaugcuaacgaacuccgaacucuugucgcucaucaacgacaugcccauaaccaacgaccaaaagaaacuaauguccaauaacguacaaaucguacgccaacaaucuuacuccaucaugugcaucauaaaagaagaaguacuagcuuacgucguccaacucccacuguacggagucaucgacacccccugcuggaaacuccacaccucuccccucugcaccaccaacaccaaagagggcuccaacauuugccugacacgcaccgaccgcggcugguacugcgacaacgcaggcuccgucucguucuucccccaagccgaaaccugcaaaguccaauccaaccgcgucuucugcgacaccaugaacucccucacccuccccuccgaagucaaucuaugcaacguagacaucuucaacccgaaauaugacugcaaaauuaugacaucuaaaaccgacguguccuccucagucaucacuucccuaggagccaucguuuccuguuacggcaagaccaaaugcaccgccagcaacaaaaaccgaggcaucaucaaaaccuucuccaacggaugugacuaugucuccaacaagggcgucgacaccgucagcgucggcaacacccucuacugcgucaacaaacaagaaggccaaucccucuacgucaaaggagagcccauaaucaacuucuacgacccccucgucuucccauccgacgaguucgacgccucaaucucccaagucaacgagaaaaucaaccaauccuuagccuucauccguaaguccgacgaacuccuucacaacgucaacgccgguaaaucuaccaccaacaucaugauaacaacaauaauuaucgucaucaucgucauccuccuuucccucaucgcggucgggcuauugcucuacugcaaagcccgguccaccccaguaacccucucuaaagaccaacucagcggaaucaauaacauagccuucagcaauuaaggacuagugaagggaacacccaaauuuaauucagccuuaagcacaauuaauuaagagugaaacguaauuguacaagcaguuggucacccaccauagggcaugaucaacaccgcaaccuuuccuuuuucccccagugauucugaaaaaccccucuucccuucagcuugcuuagauguuccaaauuuaguaagcuuaaggcggccuacagaagaaaaagaaaaaaaaggccacaaaaguucccucucacuuucaguaaauaaaauaaaagcagcaacagaaauaaagaaauaaaugaaauucaaaaugaaauaaauauuguguugugcagcauuaaaaaaucaauaaaaauuaaaaaugagcaagaucuaaaaaaaaaaaaaaaaaaaaaaaaaaaaaaaaaaaaaaaaaaaaaaaaaaaaaaaaaaaaaaaaugcaucccccccccccccccccccccccccccccccaaaggcucuuuucagagccaccagaauu

SEQ ID NO: 2623 - RNA, 1956 nt, Artificial Sequence
  mRNA product Design f-5 comprising derived and/or modified sequence from HRSV(A2)__F_DSCav1_mut2 (opt1)
gggagacuuucccauucuguagcagaauuugguguugccuguggucuuggucccgcggagaagcuuaccauggagcugcucauccugaaggccaacgccaucaccaccauccugacggcggugaccuucugcuucgccagcggccagaacaucaccgaggaguucuaccaguccacgugcagcgccgucuccaagggguaccucggcgcccugcggaccggcugguacaccuccgugaucaccaucgagcugagcaacaucaaggagaacaagugcaacgggaccgacgccaaggugaagcucaucaagcaggagcuggacaaguacaagaacgcggucacggaccugcagcuccugaugcaguccaccccggcaaccggcuccggcuccgccaucugcagcggcgucgccgugugcaaggugcugcaccucgagggggaggucaacaagaucaagagcgcccugcuguccaccaacaaggccguggugagccucuccaacggcgucagcgugcugaccuucaaggugcuggaccucaagaacuacaucgacaagcagcugcugcccauccugaacaagcagagcugcuccauccccaacaucgagacggugaucgaguuccagcagaagaacaaccggcuccuggagaucacccgcgaguucagcgugaacgccggggucaccacccccguguccacguacaugcugaccaacagcgagcuccugucccugaucaacgacaugccgaucaccaacgaccagaagaagcucaugagcaacaacgugcagaucguccggcagcaguccuacagcaucaugugcaucaucaaggaggaggugcuggcguacgugguccagcugccccucuacggcgugaucgacacccccugcuggaagcugcacacgagcccccugugcaccaccaacaccaaggagggguccaacaucugccucacgcgcaccgaccggggcugguacugcgacaacgccggcagcgucuccuucuucccgcaggccgagaccugcaaggugcagagcaaccgcguguucugcgacaccaugaacucccugacgcugcccagcgagguaaaccucugcaacgucgacaucuucaaccccaaguacgacugcaagaucaugaccuccaagaccgacgugagcuccagcgugaucaccucccugggggccaucgucagcugcuacggcaagacgaagugcaccgccagcaacaagaaccgggggaucaucaagaccuucuccaacggcugcgacuacgugagcaacaagggcguggacaccguguccgucgggaacacccuguacugcgugaacaagcaggagggccagagccucuacgugaagggggagcccaucaucaacuucuacgacccgcuggucuuccccuccgacgaguucgacgcgagcaucucccaggugaacgagaagaucaaccagagccuggccuucauccgcaaguccgacgagcugcuccacaacgugaacgccggcaagagcacgaccaacaucaugaucaccaccaucaucaucgucaucaucgugauccugcugucccucaucgccguggggcugcugcucuacugcaaggcccggagcacgcccgucacccuguccaaggaccagcugagcggcaucaacaacaucgcguucuccaacugaggacuaguacuggcugcaucucccuuuccucuguccuccauccuucucccaggauggugaagggggaccugguacccagugauccccaccccaggauccuaaaucaugacuuaccugcuaauaaaaacucauuggaaaagugagaagaucuaaaaaaaaaaaaaaaaaaaaaaaaaaaaaaaaaaaaaaaaaaaaaaaaaaaaaaaaaaaaaaaaugcaucccccccccccccccccccccccccccccccaaaggcucuuuucagagccaccagaauu

SEQ ID NO: 2624 - RNA, 1956 nt, Artificial Sequence
  mRNA product Design f-5 comprising derived and/or modified sequence from HRSV(A2)__F_DSCav1_mut2 (opt1)
gggagacuuucccauucuguagcagaauuugguguugccuguggucuuggucccgcggagaagcuuaccauggagcugcucauccugaaggccaacgccaucaccaccauccugacggcggugaccuucugcuucgccagcggccagaacaucaccgaggaguucuaccaguccacgugcagcgccgucuccaagggguaccucggcgcccugcgcaccgggugguacaccagcgugaucaccaucgagcuguccaacaucaaggagaacaagugcaacggcaccgacgccaaggugaagcucaucaagcaggagcuggacaaguacaagaacgcggucacggaccugcagcuccugaugcagagcacccccgccaccggguccggcagcgccaucugcuccggcguggccgugugcaagguccugcaccucgagggggaggugaacaagaucaagagcgcgcugcuguccaccaacaaggccguggucagccucuccaacggcgugagcgugcugacguucaagguccuggaccucaagaacuacaucgacaagcagcugcugccgauccucaacaagcaguccugcagcauccccaacaucgagaccgugaucgaguuccagcagaagaacaaccggcugcuggagaucacccgcgaguucuccgugaacgccggggucaccacgcccgugagcaccuacaugcucaccaacuccgagcugcugagccucaucaacgacaugcccaucaccaacgaccagaagaagcugaugagcaacaacgugcagaucguccggcagcaguccuacagcaucaugugcaucaucaaggaggaggugcuggccuacgugguccagcucccgcuguacggcgugaucgacacgcccugcuggaagcugcacaccagcccccucugcaccaccaacacgaaggagggguccaacaucugccugacccgcaccgaccggggcugguacugcgacaacgccggcuccgugagcuucuucccccaggcggagaccugcaagguccaguccaaccgcguguucugcgacacgaugaacagccugacccucccguccgaggucaaccugugcaacguggacaucuucaaccccaaguacgacugcaagaucaugaccagcaagaccgacguguccagcuccgucaucacgagccugggggccaucguguccugcuacggcaagaccaagugcaccgccagcaacaagaaccgggggaucaucaagaccuucuccaacggcugcgacuacgugagcaacaagggcgucgacacgguguccguggggaacacccucuacugcgucaacaagcaggagggccagagccuguacgugaagggggagcccaucaucaacuucuacgacccccugguguucccgagcgacgaguucgacgccuccaucagccaggucaacgagaagaucaaccagucccucgccuucauccgcaagagcgacgagcugcugcacaacgugaacgcgggcaaguccaccaccaacaucaugaucaccacgaucaucaucgugaucaucgucauccuccugagccugaucgccguggggcuccugcuguacugcaaggcccgguccacccccgugacccugagcaaggaccagcucuccggcaucaacaacaucgccuucagcaacugaggacuaguacuggcugcaucucccuuuccucuguccuccauccuucucccaggauggugaagggggaccugguacccagugauccccaccccaggauccuaaaucaugacuuaccugcuaauaaaaacucauuggaaaagugagaagaucuaaaaaaaaaaaaaaaaaaaaaaaaaaaaaaaaaaaaaaaaaaaaaaaaaaaaaaaaaaaaaaaaugcaucccccccccccccccccccccccccccccccaaaggcucuuuucagagccaccagaauu

SEQ ID NO: 2625 - RNA, 1956 nt, Artificial Sequence
  mRNA product Design f-5 comprising derived and/or modified sequence from HRSV(A2)__F_DSCav1_mut2 (opt2)
gggagacuuucccauucuguagcagaauuugguguugccuguggucuuggucccgcggagaagcuuaccauggagcuccucauccucaaggccaacgccaucaccaccauccucaccgccgucaccuucugcuucgccuccggccagaacaucaccgaggaguucuaccaguccaccugcuccgccgucuccaagggcuaccucggcgcccuccgcaccggcugguacaccuccgucaucaccaucgagcucuccaacaucaaggagaacaagugcaacggcaccgacgccaaggucaagcucaucaagcaggagcucgacaaguacaagaacgccgucaccgaccuccagcuccucaugcaguccacccccgccaccggcuccggcuccgccaucugcuccggcgucgccgucugcaagguccuccaccucgagggcgaggucaacaagaucaaguccgcccuccucuccaccaacaaggccgucgucucccucuccaacggcgucuccguccucaccuucaagguccucgaccucaagaacuacaucgacaagcagcuccuccccauccucaacaagcaguccugcuccauccccaacaucgagaccgucaucgaguuccagcagaagaacaaccgccuccucgagaucacccgcgaguucuccgucaacgccggcgucaccacccccgucuccaccuacaugcucaccaacuccgagcuccucucccucaucaacgacaugcccaucaccaacgaccagaagaagcucauguccaacaacguccagaucguccgccagcaguccuacuccaucaugugcaucaucaaggaggagguccucgccuacgucguccagcucccccucuacggcgucaucgacacccccugcuggaagcuccacaccuccccccucugcaccaccaacaccaaggagggcuccaacaucugccucacccgcaccgaccgcggcugguacugcgacaacgccggcuccgucuccuucuucccccaggccgagaccugcaagguccaguccaaccgcgucuucugcgacaccaugaacucccucacccuccccuccgaggucaaccucugcaacgucgacaucuucaaccccaaguacgacugcaagaucaugaccuccaagaccgacgucuccuccuccgucaucaccucccucggcgccaucgucuccugcuacggcaagaccaagugcaccgccuccaacaagaaccgcggcaucaucaagaccuucuccaacggcugcgacuacgucuccaacaagggcgucgacaccgucuccgucggcaacacccucuacugcgucaacaagcaggagggccagucccucuacgucaagggcgagcccaucaucaacuucuacgacccccucgucuuccccuccgacgaguucgacgccuccaucucccaggucaacgagaagaucaaccagucccucgccuucauccgcaaguccgacgagcuccuccacaacgucaacgccggcaaguccaccaccaacaucaugaucaccaccaucaucaucgucaucaucgucauccuccucucccucaucgccgucggccuccuccucuacugcaaggcccgcuccacccccgucacccucuccaaggaccagcucuccggcaucaacaacaucgccuucuccaacugaggacuaguacuggcugcaucucccuuuccucuguccuccauccuucucccaggauggugaagggggaccugguacccagugauccccaccccaggauccuaaaucaugacuuaccugcuaauaaaaacucauuggaaaagugagaagaucuaaaaaaaaaaaaaaaaaaaaaaaaaaaaaaaaaaaaaaaaaaaaaaaaaaaaaaaaaaaaaaaaugcaucccccccccccccccccccccccccccccccaaaggcucuuuucagagccaccagaauu

SEQ ID NO: 2626 - RNA, 1956 nt, Artificial Sequence
  mRNA product Design f-5 comprising derived and/or modified sequence from HRSV(A2)__F_DSCav1_mut2 (opt3)
gggagacuuucccauucuguagcagaauuugguguugccuguggucuuggucccgcggagaagcuuaccauggagcugcucauccuuaaggccaacgcuauuaccacaauacugacugcagugacguucugcuuugccagcggccagaauaucaccgaagaguucuaccaauccacauguucugcggucucaaaaggguauuugggagcuuuaagaacugguugguacaccaguguuauuacaaucgaacugagcaacauuaaggagaauaaaugcaacggcaccgacgccaaggugaaacuaaucaagcaggaacucgauaaguauaaaaaugcaguaacugaccugcagcuucugaugcaguccacacccgccaccgggucuggaucggcuauauguucaggcguggcagucugcaagguguugcaccucgagggugagguuaacaaaaucaagagcgcccugcugaguacgaauaaagcuguggucucccucucuaacggggugagcguauuaacuuuuaagguucuggaucuuaagaauuacauugacaaacaauugcugccuauccuaaacaagcaguccuguucaauuccaaauaucgaaaccgugauagaguuccagcagaaaaacaauaggcuccuggaaauuacacgggaguuuagugucaacgccggagugacuaccccggugagcacauauaugcuuaccaauucugagcuguugucccucaucaacgauaugcccauuacgaacgaccaaaagaaacugaugucaaauaacguccagaucguucgccagcagagcuacaguaucaugugcauuauaaaggaagagguguuagcguauguagugcaacugccucucuacggcgucaucgauacuccauguuggaaacuucauacaucuccccugugcaccacuaauacaaaggaaggcuccaacauuuguuugacccgaacggaccgugggugguacugcgauaaugcaggaagcgugucguucuuuccucaggccgagaccuguaagguucagucuaacagaguguucugcgacacaaugaacucccuaacucugccaucagaagucaaucucugcaauguggauaucuuuaaccccaaauaugacuguaagauaaugaccaguaaaacagauguaagcuccucuguuauuacuagccugggugcuaucgugucaugcuacggcaagaccaaauguacagccaguaauaagaacagggggaucauuaagaccuucuccaauggaugcgacuaugucagcaacaaaggcguggacacugucucuguggguaauacgcuuuacuguguuaacaagcaagaggggcagucacuguaugugaaaggagagccuaucauuaacuuuuacgauccauugguauucccgagugacgaauuugaugcaagcauaucccaggucaaugagaagaucaaccagucucucgcuuucauucggaaaucggacgaacuguuacacaaugugaacgccggcaagagcacaaccaauaucaugaucacuaccauuauaaucguuauuaucgugauucugcuaucccucaucgcggucggccugcuuuuguauugcaaggcccgcucaacacccgugacccugaguaaagaucaacucucugggauaaacaauaucgcauucagcaacugaggacuaguacuggcugcaucucccuuuccucuguccuccauccuucucccaggauggugaagggggaccugguacccagugauccccaccccaggauccuaaaucaugacuuaccugcuaauaaaaacucauuggaaaagugagaagaucuaaaaaaaaaaaaaaaaaaaaaaaaaaaaaaaaaaaaaaaaaaaaaaaaaaaaaaaaaaaaaaaaugcaucccccccccccccccccccccccccccccccaaaggcucuuuucagagccaccagaauu

SEQ ID NO: 2627 - RNA, 1956 nt, Artificial Sequence
  mRNA product Design f-5 comprising derived and/or modified sequence from HRSV(A2)__F_DSCav1_mut2 (opt4)
gggagacuuucccauucuguagcagaauuugguguugccuguggucuuggucccgcggagaagcuuaccauggagcugcugauccugaaggccaacgccaucaccaccauccugaccgccgugaccuucugcuucgccagcggccagaacaucaccgaggaguucuaccagagcaccugcagcgccgugagcaagggcuaccugggcgcccugagaaccggcugguacaccagcgugaucaccaucgagcugagcaacaucaaggagaacaagugcaacggcaccgacgccaaggugaagcugaucaagcaggagcuggacaaguacaagaacgccgugaccgaccugcagcugcugaugcagagcacccccgccaccggcagcggcagcgccaucugcagcggcguggccgugugcaaggugcugcaccuggagggcgaggugaacaagaucaagagcgcccugcugagcaccaacaaggccguggugagccugagcaacggcgugagcgugcugaccuucaaggugcuggaccugaagaacuacaucgacaagcagcugcugcccauccugaacaagcagagcugcagcauccccaacaucgagaccgugaucgaguuccagcagaagaacaacagacugcuggagaucaccagagaguucagcgugaacgccggcgugaccacccccgugagcaccuacaugcugaccaacagcgagcugcugagccugaucaacgacaugcccaucaccaacgaccagaagaagcugaugagcaacaacgugcagaucgugagacagcagagcuacagcaucaugugcaucaucaaggaggaggugcuggccuacguggugcagcugccccuguacggcgugaucgacacccccugcuggaagcugcacaccagcccccugugcaccaccaacaccaaggagggcagcaacaucugccugaccagaaccgacagaggcugguacugcgacaacgccggcagcgugagcuucuucccccaggccgagaccugcaaggugcagagcaacagaguguucugcgacaccaugaacagccugacccugcccagcgaggugaaccugugcaacguggacaucuucaaccccaaguacgacugcaagaucaugaccagcaagaccgacgugagcagcagcgugaucaccagccugggcgccaucgugagcugcuacggcaagaccaagugcaccgccagcaacaagaacagaggcaucaucaagaccuucagcaacggcugcgacuacgugagcaacaagggcguggacaccgugagcgugggcaacacccuguacugcgugaacaagcaggagggccagagccuguacgugaagggcgagcccaucaucaacuucuacgacccccugguguuccccagcgacgaguucgacgccagcaucagccaggugaacgagaagaucaaccagagccuggccuucaucagaaagagcgacgagcugcugcacaacgugaacgccggcaagagcaccaccaacaucaugaucaccaccaucaucaucgugaucaucgugauccugcugagccugaucgccgugggccugcugcuguacugcaaggccagaagcacccccgugacccugagcaaggaccagcugagcggcaucaacaacaucgccuucagcaacugaggacuaguacuggcugcaucucccuuuccucuguccuccauccuucucccaggauggugaagggggaccugguacccagugauccccaccccaggauccuaaaucaugacuuaccugcuaauaaaaacucauuggaaaagugagaagaucuaaaaaaaaaaaaaaaaaaaaaaaaaaaaaaaaaaaaaaaaaaaaaaaaaaaaaaaaaaaaaaaaugcaucccccccccccccccccccccccccccccccaaaggcucuuuucagagccaccagaauu

SEQ ID NO: 2628 - RNA, 1956 nt, Artificial Sequence
  mRNA product Design f-5 comprising derived and/or modified sequence from HRSV(A2)__F_DSCav1_mut2 (opt5)
gggagacuuucccauucuguagcagaauuugguguugccuguggucuuggucccgcggagaagcuuaccauggagcugcucauccugaaggccaacgcuauuaccacaauccuuacggccgugaccuucugcuuugcgagcggccagaauauuacagaagaguucuaccaauccaccuguucugcugucagcaaaggguaucugggagcccucagaacaggcugguacaccuccguuaucacaauugaacugucuaacaucaaggagaauaaaugcaacgggaccgacgccaaggugaaacuuaucaagcaggaacuggauaaguauaaaaaugcugugacggaccuccagcugcugaugcagagcacccccgccacaggauccggcucugcuauuuguagcggggucgccgugugcaagguucuccaccuggagggagaggugaacaaaaucaaguccgcgcuucugagcaccaauaaagccgucgugucucucuccaacggcguuagcgugcugacauuuaagguccuugaucugaagaauuacauugacaaacaacuccugccuauccugaacaagcagucuuguuccauuccgaauaucgaaaccgugauugaguuccagcagaaaaacaaucggcuccuggaaaucacgcgcgaguuuagcgugaacgcuggcgucacaacccccguuucuacauauaugcuuaccaauuccgagcugcucagccugaucaacgauaugccuauuaccaacgaccaaaagaaacuuauguccaauaacgugcagaucgugagacagcagucuuacagcauuaugugcaucauuaaggaagagguccuggccuaugugguucaacucccccuguacggggugaucgauacaccuuguuggaaacugcauacgagcccccucugcaccacaaauaccaaggaaggauccaacaucugucugacacggaccgaccgcggcugguacugcgauaaugcugggucugucuccuucuuuccucaggccgagacguguaaggugcagagcaacagaguuuucugcgacacaaugaacucucuuacccugccgagcgaagugaaucucugcaaugucgauauuuuuaaccccaaauaugacuguaagaucaugaccuccaaaacagaugugucuagcuccgucauuaccagccugggagcgaucgugucuugcuacggcaagacaaaauguacggccuccaauaagaaccgggggauuaucaagaccuucagcaauggaugcgacuauguuucuaacaaaggcguggacacagucuccgugggcaauacccuuuacuguguuaacaagcaagaggggcagagccuguaugugaaaggagagccuaucauuaacuuuuacgauccccucgucuucccuuccgacgaauuugaugcuucuaucagccaggugaaugagaagauuaaccagucccuggccuucauccgcaaaucugacgaacugcuccacaaugugaacgcuggcaagagcacaaccaauauuaugaucacgaccauuaucaucguuauuaucgucauucugcuuucccugaucgccguggggcuccugcuguauugcaaggccagaagcacacccgugacccuuucuaaagaucaacucuccggaauuaacaauaucgcuuucagcaacugaggacuaguacuggcugcaucucccuuuccucuguccuccauccuucucccaggauggugaagggggaccugguacccagugauccccaccccaggauccuaaaucaugacuuaccugcuaauaaaaacucauuggaaaagugagaagaucuaaaaaaaaaaaaaaaaaaaaaaaaaaaaaaaaaaaaaaaaaaaaaaaaaaaaaaaaaaaaaaaaugcaucccccccccccccccccccccccccccccccaaaggcucuuuucagagccaccagaauu

SEQ ID NO: 2629 - RNA, 1956 nt, Artificial Sequence
  mRNA product Design f-5 comprising derived and/or modified sequence from HRSV(A2)__F_DSCav1_mut2 (opt6)
gggagacuuucccauucuguagcagaauuugguguugccuguggucuuggucccgcggagaagcuuaccauggaacuacuaauccuaaaagcaaacgcaauuacaacuauacuuaccgccguaacauuuugcuucgcaucugggcaaaacauuaccgaagaauuuuaucaaucaacaugcucagcagucuccaaaggauaccuuggagcauuaagaaccggcugguauaccuccguaauaacaauugaacuaucuaauauaaaagaaaauaaauguaauggaacugacgcaaaaguuaaacuaauaaaacaagaacucgacaaauacaaaaacgccgucacagaccuacaacuacuaaugcaaucaacccccgcaacaggaucaggauccgcaaucugcagcggcgucgcaguuugcaaaguccuacauuuagaaggagaaguaaacaaaauaaaaucugcucuccucucuacaaacaaagcaguagugucacuuucaaacggaguaucaguucuaacauucaaaguacuagaccuaaaaaauuacauagacaaacaacuacuuccaauucuaaacaaacaauccuguuccauacccaacauagaaacaguaauagaauuucaacaaaaaaauaacagacuccuagaaauuacaagagaauuuuccgucaaugcaggaguaacaaccccaguaucaaccuacauguuaacuaacucagaacucuuaucacuaauaaacgacaugccaaucacuaaugaccaaaaaaaacucaugucaaauaacguacaaauaguccgacaacaaucauacuccaucaugugcauuauaaaagaagaaguacuagcauacgucguccaauuaccacuauacggcgucauagacacaccauguuggaaacuccacacaucaccacuaugcacuacaaauacaaaagaaggcuccaacaucugccuaacaagaacagacagagguugguauugcgacaacgcaggaucaguaucauuuuucccccaagcagaaacauguaaaguacaaucaaauagagucuucugcgacaccaugaacucauuaacacuaccuucagaagucaaccuaugcaacguagacaucuucaacccuaaauaugacugcaaaaucaugaccagcaaaaccgacguuucaucuuccguaauaacaucacuaggcgcaauagucucauguuacggcaaaacaaaauguacagcaucaaauaaaaaccguggaauaauaaaaacauuuucuaaugguugugacuacguaagcaauaaaggaguagauacaguaucagucggcaacaccuuauacuguguaaacaaacaagaaggccaaaguuuauacgucaaaggagaacccaucaucaacuucuacgacccauuaguauucccaucagacgaauuugaugcaagcauuucacaagucaacgaaaaaaucaaucaaucauuagcauucauccgaaaaucagacgaauuauuacacaacguaaacgccggaaaaucaaccacuaauauaaugauaaccacaauaaucaucguaauaauaguaauacuucucucacuaaucgcagucggacuccuucuauacugcaaagcaagaucuacaccaguaacacuauccaaagaucaacuaaguggcauaaacaacauagcauuuucuaacuaaggacuaguacuggcugcaucucccuuuccucuguccuccauccuucucccaggauggugaagggggaccugguacccagugauccccaccccaggauccuaaaucaugacuuaccugcuaauaaaaacucauuggaaaagugagaagaucuaaaaaaaaaaaaaaaaaaaaaaaaaaaaaaaaaaaaaaaaaaaaaaaaaaaaaaaaaaaaaaaaugcaucccccccccccccccccccccccccccccccaaaggcucuuuucagagccaccagaauu

SEQ ID NO: 2630 - RNA, 1956 nt, Artificial Sequence
  mRNA product Design f-5 comprising derived and/or modified sequence from HRSV(A2)__F_DSCav1_mut2 (opt11)
gggagacuuucccauucuguagcagaauuugguguugccuguggucuuggucccgcggagaagcuuaccauggaacuccucauccuaaaagccaacgcgaucaccacaauccugacagccgucaccuucugcuucgccuccggccaaaacaucaccgaagaguucuaccaauccacaugcuccgccgucuccaagggcuaccugggcgcacuucguacaggcugguacaccuccguaauaaccaucgaacucuccaacaucaaagaaaacaaaugcaacggcacagacgcaaaagucaaacucaucaagcaagaacuugacaaauacaaaaaugcagucaccgaccuucaacuccucaugcaaucuacccccgccacaggcuccggcuccgcuaucugcuccggcgucgccgucugcaaaguccuccaccucgaaggugaaguaaacaaaauaaaauccgcccuccucuccaccaacaaagccgucgucucccuaucaaacggcgucuccgugcucaccuucaagguucucgaccugaaaaacuacauagacaaacagcuccuaccaauccuuaacaaacagagcugcuccauuccgaauaucgaaacgguaaucgaauuucaacagaaaaacaaccgccuccucgaaauaacgcgagaguucuccguaaacgcuggcgucaccacacccgucagcaccuacaugcuaacgaacuccgaacucuugucgcucaucaacgacaugcccauaaccaacgaccaaaagaaacuaauguccaauaacguacaaaucguacgccaacaaucuuacuccaucaugugcaucauaaaagaagaaguacuagcuuacgucguccaacucccacuguacggagucaucgacacccccugcuggaaacuccacaccucuccccucugcaccaccaacaccaaagagggcuccaacauuugccugacacgcaccgaccgcggcugguacugcgacaacgcaggcuccgucucguucuucccccaagccgaaaccugcaaaguccaauccaaccgcgucuucugcgacaccaugaacucccucacccuccccuccgaagucaaucuaugcaacguagacaucuucaacccgaaauaugacugcaaaauuaugacaucuaaaaccgacguguccuccucagucaucacuucccuaggagccaucguuuccuguuacggcaagaccaaaugcaccgccagcaacaaaaaccgaggcaucaucaaaaccuucuccaacggaugugacuaugucuccaacaagggcgucgacaccgucagcgucggcaacacccucuacugcgucaacaaacaagaaggccaaucccucuacgucaaaggagagcccauaaucaacuucuacgacccccucgucuucccauccgacgaguucgacgccucaaucucccaagucaacgagaaaaucaaccaauccuuagccuucauccguaaguccgacgaacuccuucacaacgucaacgccgguaaaucuaccaccaacaucaugauaacaacaauaauuaucgucaucaucgucauccuccuuucccucaucgcggucgggcuauugcucuacugcaaagcccgguccaccccaguaacccucucuaaagaccaacucagcggaaucaauaacauagccuucagcaauuaaggacuaguacuggcugcaucucccuuuccucuguccuccauccuucucccaggauggugaagggggaccugguacccagugauccccaccccaggauccuaaaucaugacuuaccugcuaauaaaaacucauuggaaaagugagaagaucuaaaaaaaaaaaaaaaaaaaaaaaaaaaaaaaaaaaaaaaaaaaaaaaaaaaaaaaaaaaaaaaaugcaucccccccccccccccccccccccccccccccaaaggcucuuuucagagccaccagaauu

SEQ ID NO: 2631 - RNA, 1952 nt, Artificial Sequence
  mRNA product Design g-1 comprising derived and/or modified sequence from HRSV(A2)__F_DSCav1_mut2 (opt1)
gggagacuuucccauucuguagcagaauuugguguugccuguggucuuggucccgcggagaagcuuaccauggagcugcucauccugaaggccaacgccaucaccaccauccugacggcggugaccuucugcuucgccagcggccagaacaucaccgaggaguucuaccaguccacgugcagcgccgucuccaagggguaccucggcgcccugcggaccggcugguacaccuccgugaucaccaucgagcugagcaacaucaaggagaacaagugcaacgggaccgacgccaaggugaagcucaucaagcaggagcuggacaaguacaagaacgcggucacggaccugcagcuccugaugcaguccaccccggcaaccggcuccggcuccgccaucugcagcggcgucgccgugugcaaggugcugcaccucgagggggaggucaacaagaucaagagcgcccugcuguccaccaacaaggccguggugagccucuccaacggcgucagcgugcugaccuucaaggugcuggaccucaagaacuacaucgacaagcagcugcugcccauccugaacaagcagagcugcuccauccccaacaucgagacggugaucgaguuccagcagaagaacaaccggcuccuggagaucacccgcgaguucagcgugaacgccggggucaccacccccguguccacguacaugcugaccaacagcgagcuccugucccugaucaacgacaugccgaucaccaacgaccagaagaagcucaugagcaacaacgugcagaucguccggcagcaguccuacagcaucaugugcaucaucaaggaggaggugcuggcguacgugguccagcugccccucuacggcgugaucgacacccccugcuggaagcugcacacgagcccccugugcaccaccaacaccaaggagggguccaacaucugccucacgcgcaccgaccggggcugguacugcgacaacgccggcagcgucuccuucuucccgcaggccgagaccugcaaggugcagagcaaccgcguguucugcgacaccaugaacucccugacgcugcccagcgagguaaaccucugcaacgucgacaucuucaaccccaaguacgacugcaagaucaugaccuccaagaccgacgugagcuccagcgugaucaccucccugggggccaucgucagcugcuacggcaagacgaagugcaccgccagcaacaagaaccgggggaucaucaagaccuucuccaacggcugcgacuacgugagcaacaagggcguggacaccguguccgucgggaacacccuguacugcgugaacaagcaggagggccagagccucuacgugaagggggagcccaucaucaacuucuacgacccgcuggucuuccccuccgacgaguucgacgcgagcaucucccaggugaacgagaagaucaaccagagccuggccuucauccgcaaguccgacgagcugcuccacaacgugaacgccggcaagagcacgaccaacaucaugaucaccaccaucaucaucgucaucaucgugauccugcugucccucaucgccguggggcugcugcucuacugcaaggcccggagcacgcccgucacccuguccaaggaccagcugagcggcaucaacaacaucgcguucuccaacugaggacuaguggaagcauuuuccuggcugauuaaaagaaauuacucagcuauggucaucuguuccuguuagaaggcuaugcagcauauuauauacuaugcgcauguuaugaaaugcauaauaaaaaauuuuaaaaaaucuaaaagaucuaaaaaaaaaaaaaaaaaaaaaaaaaaaaaaaaaaaaaaaaaaaaaaaaaaaaaaaaaaaaaaaaugcaucccccccccccccccccccccccccccccccaaaggcucuuuucagagccaccagaauu

SEQ ID NO: 2632 - RNA, 1952 nt, Artificial Sequence
  mRNA product Design g-1 comprising derived and/or modified sequence from HRSV(A2)__F_DSCav1_mut2 (opt1)
gggagacuuucccauucuguagcagaauuugguguugccuguggucuuggucccgcggagaagcuuaccauggagcugcucauccugaaggccaacgccaucaccaccauccugacggcggugaccuucugcuucgccagcggccagaacaucaccgaggaguucuaccaguccacgugcagcgccgucuccaagggguaccucggcgcccugcgcaccgggugguacaccagcgugaucaccaucgagcuguccaacaucaaggagaacaagugcaacggcaccgacgccaaggugaagcucaucaagcaggagcuggacaaguacaagaacgcggucacggaccugcagcuccugaugcagagcacccccgccaccggguccggcagcgccaucugcuccggcguggccgugugcaagguccugcaccucgagggggaggugaacaagaucaagagcgcgcugcuguccaccaacaaggccguggucagccucuccaacggcgugagcgugcugacguucaagguccuggaccucaagaacuacaucgacaagcagcugcugccgauccucaacaagcaguccugcagcauccccaacaucgagaccgugaucgaguuccagcagaagaacaaccggcugcuggagaucacccgcgaguucuccgugaacgccggggucaccacgcccgugagcaccuacaugcucaccaacuccgagcugcugagccucaucaacgacaugcccaucaccaacgaccagaagaagcugaugagcaacaacgugcagaucguccggcagcaguccuacagcaucaugugcaucaucaaggaggaggugcuggccuacgugguccagcucccgcuguacggcgugaucgacacgcccugcuggaagcugcacaccagcccccucugcaccaccaacacgaaggagggguccaacaucugccugacccgcaccgaccggggcugguacugcgacaacgccggcuccgugagcuucuucccccaggcggagaccugcaagguccaguccaaccgcguguucugcgacacgaugaacagccugacccucccguccgaggucaaccugugcaacguggacaucuucaaccccaaguacgacugcaagaucaugaccagcaagaccgacguguccagcuccgucaucacgagccugggggccaucguguccugcuacggcaagaccaagugcaccgccagcaacaagaaccgggggaucaucaagaccuucuccaacggcugcgacuacgugagcaacaagggcgucgacacgguguccguggggaacacccucuacugcgucaacaagcaggagggccagagccuguacgugaagggggagcccaucaucaacuucuacgacccccugguguucccgagcgacgaguucgacgccuccaucagccaggucaacgagaagaucaaccagucccucgccuucauccgcaagagcgacgagcugcugcacaacgugaacgcgggcaaguccaccaccaacaucaugaucaccacgaucaucaucgugaucaucgucauccuccugagccugaucgccguggggcuccugcuguacugcaaggcccgguccacccccgugacccugagcaaggaccagcucuccggcaucaacaacaucgccuucagcaacugaggacuaguggaagcauuuuccuggcugauuaaaagaaauuacucagcuauggucaucuguuccuguuagaaggcuaugcagcauauuauauacuaugcgcauguuaugaaaugcauaauaaaaaauuuuaaaaaaucuaaaagaucuaaaaaaaaaaaaaaaaaaaaaaaaaaaaaaaaaaaaaaaaaaaaaaaaaaaaaaaaaaaaaaaaugcaucccccccccccccccccccccccccccccccaaaggcucuuuucagagccaccagaauu

SEQ ID NO: 2633 - RNA, 1952 nt, Artificial Sequence
  mRNA product Design g-1 comprising derived and/or modified sequence from HRSV(A2)__F_DSCav1_mut2 (opt2)
gggagacuuucccauucuguagcagaauuugguguugccuguggucuuggucccgcggagaagcuuaccauggagcuccucauccucaaggccaacgccaucaccaccauccucaccgccgucaccuucugcuucgccuccggccagaacaucaccgaggaguucuaccaguccaccugcuccgccgucuccaagggcuaccucggcgcccuccgcaccggcugguacaccuccgucaucaccaucgagcucuccaacaucaaggagaacaagugcaacggcaccgacgccaaggucaagcucaucaagcaggagcucgacaaguacaagaacgccgucaccgaccuccagcuccucaugcaguccacccccgccaccggcuccggcuccgccaucugcuccggcgucgccgucugcaagguccuccaccucgagggcgaggucaacaagaucaaguccgcccuccucuccaccaacaaggccgucgucucccucuccaacggcgucuccguccucaccuucaagguccucgaccucaagaacuacaucgacaagcagcuccuccccauccucaacaagcaguccugcuccauccccaacaucgagaccgucaucgaguuccagcagaagaacaaccgccuccucgagaucacccgcgaguucuccgucaacgccggcgucaccacccccgucuccaccuacaugcucaccaacuccgagcuccucucccucaucaacgacaugcccaucaccaacgaccagaagaagcucauguccaacaacguccagaucguccgccagcaguccuacuccaucaugugcaucaucaaggaggagguccucgccuacgucguccagcucccccucuacggcgucaucgacacccccugcuggaagcuccacaccuccccccucugcaccaccaacaccaaggagggcuccaacaucugccucacccgcaccgaccgcggcugguacugcgacaacgccggcuccgucuccuucuucccccaggccgagaccugcaagguccaguccaaccgcgucuucugcgacaccaugaacucccucacccuccccuccgaggucaaccucugcaacgucgacaucuucaaccccaaguacgacugcaagaucaugaccuccaagaccgacgucuccuccuccgucaucaccucccucggcgccaucgucuccugcuacggcaagaccaagugcaccgccuccaacaagaaccgcggcaucaucaagaccuucuccaacggcugcgacuacgucuccaacaagggcgucgacaccgucuccgucggcaacacccucuacugcgucaacaagcaggagggccagucccucuacgucaagggcgagcccaucaucaacuucuacgacccccucgucuuccccuccgacgaguucgacgccuccaucucccaggucaacgagaagaucaaccagucccucgccuucauccgcaaguccgacgagcuccuccacaacgucaacgccggcaaguccaccaccaacaucaugaucaccaccaucaucaucgucaucaucgucauccuccucucccucaucgccgucggccuccuccucuacugcaaggcccgcuccacccccgucacccucuccaaggaccagcucuccggcaucaacaacaucgccuucuccaacugaggacuaguggaagcauuuuccuggcugauuaaaagaaauuacucagcuauggucaucuguuccuguuagaaggcuaugcagcauauuauauacuaugcgcauguuaugaaaugcauaauaaaaaauuuuaaaaaaucuaaaagaucuaaaaaaaaaaaaaaaaaaaaaaaaaaaaaaaaaaaaaaaaaaaaaaaaaaaaaaaaaaaaaaaaugcaucccccccccccccccccccccccccccccccaaaggcucuuuucagagccaccagaauu

SEQ ID NO: 2634 - RNA, 1952 nt, Artificial Sequence
  mRNA product Design g-1 comprising derived and/or modified sequence from HRSV(A2)__F_DSCav1_mut2 (opt3)
gggagacuuucccauucuguagcagaauuugguguugccuguggucuuggucccgcggagaagcuuaccauggagcugcucauccuuaaggccaacgcuauuaccacaauacugacugcagugacguucugcuuugccagcggccagaauaucaccgaagaguucuaccaauccacauguucugcggucucaaaaggguauuugggagcuuuaagaacugguugguacaccaguguuauuacaaucgaacugagcaacauuaaggagaauaaaugcaacggcaccgacgccaaggugaaacuaaucaagcaggaacucgauaaguauaaaaaugcaguaacugaccugcagcuucugaugcaguccacacccgccaccgggucuggaucggcuauauguucaggcguggcagucugcaagguguugcaccucgagggugagguuaacaaaaucaagagcgcccugcugaguacgaauaaagcuguggucucccucucuaacggggugagcguauuaacuuuuaagguucuggaucuuaagaauuacauugacaaacaauugcugccuauccuaaacaagcaguccuguucaauuccaaauaucgaaaccgugauagaguuccagcagaaaaacaauaggcuccuggaaauuacacgggaguuuagugucaacgccggagugacuaccccggugagcacauauaugcuuaccaauucugagcuguugucccucaucaacgauaugcccauuacgaacgaccaaaagaaacugaugucaaauaacguccagaucguucgccagcagagcuacaguaucaugugcauuauaaaggaagagguguuagcguauguagugcaacugccucucuacggcgucaucgauacuccauguuggaaacuucauacaucuccccugugcaccacuaauacaaaggaaggcuccaacauuuguuugacccgaacggaccgugggugguacugcgauaaugcaggaagcgugucguucuuuccucaggccgagaccuguaagguucagucuaacagaguguucugcgacacaaugaacucccuaacucugccaucagaagucaaucucugcaauguggauaucuuuaaccccaaauaugacuguaagauaaugaccaguaaaacagauguaagcuccucuguuauuacuagccugggugcuaucgugucaugcuacggcaagaccaaauguacagccaguaauaagaacagggggaucauuaagaccuucuccaauggaugcgacuaugucagcaacaaaggcguggacacugucucuguggguaauacgcuuuacuguguuaacaagcaagaggggcagucacuguaugugaaaggagagccuaucauuaacuuuuacgauccauugguauucccgagugacgaauuugaugcaagcauaucccaggucaaugagaagaucaaccagucucucgcuuucauucggaaaucggacgaacuguuacacaaugugaacgccggcaagagcacaaccaauaucaugaucacuaccauuauaaucguuauuaucgugauucugcuaucccucaucgcggucggccugcuuuuguauugcaaggcccgcucaacacccgugacccugaguaaagaucaacucucugggauaaacaauaucgcauucagcaacugaggacuaguggaagcauuuuccuggcugauuaaaagaaauuacucagcuauggucaucuguuccuguuagaaggcuaugcagcauauuauauacuaugcgcauguuaugaaaugcauaauaaaaaauuuuaaaaaaucuaaaagaucuaaaaaaaaaaaaaaaaaaaaaaaaaaaaaaaaaaaaaaaaaaaaaaaaaaaaaaaaaaaaaaaaugcaucccccccccccccccccccccccccccccccaaaggcucuuuucagagccaccagaauu

SEQ ID NO: 2635 - RNA, 1952 nt, Artificial Sequence
  mRNA product Design g-1 comprising derived and/or modified sequence from HRSV(A2)__F_DSCav1_mut2 (opt4)
gggagacuuucccauucuguagcagaauuugguguugccuguggucuuggucccgcggagaagcuuaccauggagcugcugauccugaaggccaacgccaucaccaccauccugaccgccgugaccuucugcuucgccagcggccagaacaucaccgaggaguucuaccagagcaccugcagcgccgugagcaagggcuaccugggcgcccugagaaccggcugguacaccagcgugaucaccaucgagcugagcaacaucaaggagaacaagugcaacggcaccgacgccaaggugaagcugaucaagcaggagcuggacaaguacaagaacgccgugaccgaccugcagcugcugaugcagagcacccccgccaccggcagcggcagcgccaucugcagcggcguggccgugugcaaggugcugcaccuggagggcgaggugaacaagaucaagagcgcccugcugagcaccaacaaggccguggugagccugagcaacggcgugagcgugcugaccuucaaggugcuggaccugaagaacuacaucgacaagcagcugcugcccauccugaacaagcagagcugcagcauccccaacaucgagaccgugaucgaguuccagcagaagaacaacagacugcuggagaucaccagagaguucagcgugaacgccggcgugaccacccccgugagcaccuacaugcugaccaacagcgagcugcugagccugaucaacgacaugcccaucaccaacgaccagaagaagcugaugagcaacaacgugcagaucgugagacagcagagcuacagcaucaugugcaucaucaaggaggaggugcuggccuacguggugcagcugccccuguacggcgugaucgacacccccugcuggaagcugcacaccagcccccugugcaccaccaacaccaaggagggcagcaacaucugccugaccagaaccgacagaggcugguacugcgacaacgccggcagcgugagcuucuucccccaggccgagaccugcaaggugcagagcaacagaguguucugcgacaccaugaacagccugacccugcccagcgaggugaaccugugcaacguggacaucuucaaccccaaguacgacugcaagaucaugaccagcaagaccgacgugagcagcagcgugaucaccagccugggcgccaucgugagcugcuacggcaagaccaagugcaccgccagcaacaagaacagaggcaucaucaagaccuucagcaacggcugcgacuacgugagcaacaagggcguggacaccgugagcgugggcaacacccuguacugcgugaacaagcaggagggccagagccuguacgugaagggcgagcccaucaucaacuucuacgacccccugguguuccccagcgacgaguucgacgccagcaucagccaggugaacgagaagaucaaccagagccuggccuucaucagaaagagcgacgagcugcugcacaacgugaacgccggcaagagcaccaccaacaucaugaucaccaccaucaucaucgugaucaucgugauccugcugagccugaucgccgugggccugcugcuguacugcaaggccagaagcacccccgugacccugagcaaggaccagcugagcggcaucaacaacaucgccuucagcaacugaggacuaguggaagcauuuuccuggcugauuaaaagaaauuacucagcuauggucaucuguuccuguuagaaggcuaugcagcauauuauauacuaugcgcauguuaugaaaugcauaauaaaaaauuuuaaaaaaucuaaaagaucuaaaaaaaaaaaaaaaaaaaaaaaaaaaaaaaaaaaaaaaaaaaaaaaaaaaaaaaaaaaaaaaaugcaucccccccccccccccccccccccccccccccaaaggcucuuuucagagccaccagaauu

SEQ ID NO: 2636 - RNA, 1952 nt, Artificial Sequence
  mRNA product Design g-1 comprising derived and/or modified sequence from HRSV(A2)__F_DSCav1_mut2 (opt5)
gggagacuuucccauucuguagcagaauuugguguugccuguggucuuggucccgcggagaagcuuaccauggagcugcucauccugaaggccaacgcuauuaccacaauccuuacggccgugaccuucugcuuugcgagcggccagaauauuacagaagaguucuaccaauccaccuguucugcugucagcaaaggguaucugggagcccucagaacaggcugguacaccuccguuaucacaauugaacugucuaacaucaaggagaauaaaugcaacgggaccgacgccaaggugaaacuuaucaagcaggaacuggauaaguauaaaaaugcugugacggaccuccagcugcugaugcagagcacccccgccacaggauccggcucugcuauuuguagcggggucgccgugugcaagguucuccaccuggagggagaggugaacaaaaucaaguccgcgcuucugagcaccaauaaagccgucgugucucucuccaacggcguuagcgugcugacauuuaagguccuugaucugaagaauuacauugacaaacaacuccugccuauccugaacaagcagucuuguuccauuccgaauaucgaaaccgugauugaguuccagcagaaaaacaaucggcuccuggaaaucacgcgcgaguuuagcgugaacgcuggcgucacaacccccguuucuacauauaugcuuaccaauuccgagcugcucagccugaucaacgauaugccuauuaccaacgaccaaaagaaacuuauguccaauaacgugcagaucgugagacagcagucuuacagcauuaugugcaucauuaaggaagagguccuggccuaugugguucaacucccccuguacggggugaucgauacaccuuguuggaaacugcauacgagcccccucugcaccacaaauaccaaggaaggauccaacaucugucugacacggaccgaccgcggcugguacugcgauaaugcugggucugucuccuucuuuccucaggccgagacguguaaggugcagagcaacagaguuuucugcgacacaaugaacucucuuacccugccgagcgaagugaaucucugcaaugucgauauuuuuaaccccaaauaugacuguaagaucaugaccuccaaaacagaugugucuagcuccgucauuaccagccugggagcgaucgugucuugcuacggcaagacaaaauguacggccuccaauaagaaccgggggauuaucaagaccuucagcaauggaugcgacuauguuucuaacaaaggcguggacacagucuccgugggcaauacccuuuacuguguuaacaagcaagaggggcagagccuguaugugaaaggagagccuaucauuaacuuuuacgauccccucgucuucccuuccgacgaauuugaugcuucuaucagccaggugaaugagaagauuaaccagucccuggccuucauccgcaaaucugacgaacugcuccacaaugugaacgcuggcaagagcacaaccaauauuaugaucacgaccauuaucaucguuauuaucgucauucugcuuucccugaucgccguggggcuccugcuguauugcaaggccagaagcacacccgugacccuuucuaaagaucaacucuccggaauuaacaauaucgcuuucagcaacugaggacuaguggaagcauuuuccuggcugauuaaaagaaauuacucagcuauggucaucuguuccuguuagaaggcuaugcagcauauuauauacuaugcgcauguuaugaaaugcauaauaaaaaauuuuaaaaaaucuaaaagaucuaaaaaaaaaaaaaaaaaaaaaaaaaaaaaaaaaaaaaaaaaaaaaaaaaaaaaaaaaaaaaaaaugcaucccccccccccccccccccccccccccccccaaaggcucuuuucagagccaccagaauu

SEQ ID NO: 2637 - RNA, 1952 nt, Artificial Sequence
  mRNA product Design g-1 comprising derived and/or modified sequence from HRSV(A2)__F_DSCav1_mut2 (opt6)
gggagacuuucccauucuguagcagaauuugguguugccuguggucuuggucccgcggagaagcuuaccauggaacuacuaauccuaaaagcaaacgcaauuacaacuauacuuaccgccguaacauuuugcuucgcaucugggcaaaacauuaccgaagaauuuuaucaaucaacaugcucagcagucuccaaaggauaccuuggagcauuaagaaccggcugguauaccuccguaauaacaauugaacuaucuaauauaaaagaaaauaaauguaauggaacugacgcaaaaguuaaacuaauaaaacaagaacucgacaaauacaaaaacgccgucacagaccuacaacuacuaaugcaaucaacccccgcaacaggaucaggauccgcaaucugcagcggcgucgcaguuugcaaaguccuacauuuagaaggagaaguaaacaaaauaaaaucugcucuccucucuacaaacaaagcaguagugucacuuucaaacggaguaucaguucuaacauucaaaguacuagaccuaaaaaauuacauagacaaacaacuacuuccaauucuaaacaaacaauccuguuccauacccaacauagaaacaguaauagaauuucaacaaaaaaauaacagacuccuagaaauuacaagagaauuuuccgucaaugcaggaguaacaaccccaguaucaaccuacauguuaacuaacucagaacucuuaucacuaauaaacgacaugccaaucacuaaugaccaaaaaaaacucaugucaaauaacguacaaauaguccgacaacaaucauacuccaucaugugcauuauaaaagaagaaguacuagcauacgucguccaauuaccacuauacggcgucauagacacaccauguuggaaacuccacacaucaccacuaugcacuacaaauacaaaagaaggcuccaacaucugccuaacaagaacagacagagguugguauugcgacaacgcaggaucaguaucauuuuucccccaagcagaaacauguaaaguacaaucaaauagagucuucugcgacaccaugaacucauuaacacuaccuucagaagucaaccuaugcaacguagacaucuucaacccuaaauaugacugcaaaaucaugaccagcaaaaccgacguuucaucuuccguaauaacaucacuaggcgcaauagucucauguuacggcaaaacaaaauguacagcaucaaauaaaaaccguggaauaauaaaaacauuuucuaaugguugugacuacguaagcaauaaaggaguagauacaguaucagucggcaacaccuuauacuguguaaacaaacaagaaggccaaaguuuauacgucaaaggagaacccaucaucaacuucuacgacccauuaguauucccaucagacgaauuugaugcaagcauuucacaagucaacgaaaaaaucaaucaaucauuagcauucauccgaaaaucagacgaauuauuacacaacguaaacgccggaaaaucaaccacuaauauaaugauaaccacaauaaucaucguaauaauaguaauacuucucucacuaaucgcagucggacuccuucuauacugcaaagcaagaucuacaccaguaacacuauccaaagaucaacuaaguggcauaaacaacauagcauuuucuaacuaaggacuaguggaagcauuuuccuggcugauuaaaagaaauuacucagcuauggucaucuguuccuguuagaaggcuaugcagcauauuauauacuaugcgcauguuaugaaaugcauaauaaaaaauuuuaaaaaaucuaaaagaucuaaaaaaaaaaaaaaaaaaaaaaaaaaaaaaaaaaaaaaaaaaaaaaaaaaaaaaaaaaaaaaaaugcaucccccccccccccccccccccccccccccccaaaggcucuuuucagagccaccagaauu

SEQ ID NO: 2638 - RNA, 1952 nt, Artificial Sequence
  mRNA product Design g-1 comprising derived and/or modified sequence from HRSV(A2)__F_DSCav1_mut2 (opt11)
gggagacuuucccauucuguagcagaauuugguguugccuguggucuuggucccgcggagaagcuuaccauggaacuccucauccuaaaagccaacgcgaucaccacaauccugacagccgucaccuucugcuucgccuccggccaaaacaucaccgaagaguucuaccaauccacaugcuccgccgucuccaagggcuaccugggcgcacuucguacaggcugguacaccuccguaauaaccaucgaacucuccaacaucaaagaaaacaaaugcaacggcacagacgcaaaagucaaacucaucaagcaagaacuugacaaauacaaaaaugcagucaccgaccuucaacuccucaugcaaucuacccccgccacaggcuccggcuccgcuaucugcuccggcgucgccgucugcaaaguccuccaccucgaaggugaaguaaacaaaauaaaauccgcccuccucuccaccaacaaagccgucgucucccuaucaaacggcgucuccgugcucaccuucaagguucucgaccugaaaaacuacauagacaaacagcuccuaccaauccuuaacaaacagagcugcuccauuccgaauaucgaaacgguaaucgaauuucaacagaaaaacaaccgccuccucgaaauaacgcgagaguucuccguaaacgcuggcgucaccacacccgucagcaccuacaugcuaacgaacuccgaacucuugucgcucaucaacgacaugcccauaaccaacgaccaaaagaaacuaauguccaauaacguacaaaucguacgccaacaaucuuacuccaucaugugcaucauaaaagaagaaguacuagcuuacgucguccaacucccacuguacggagucaucgacacccccugcuggaaacuccacaccucuccccucugcaccaccaacaccaaagagggcuccaacauuugccugacacgcaccgaccgcggcugguacugcgacaacgcaggcuccgucucguucuucccccaagccgaaaccugcaaaguccaauccaaccgcgucuucugcgacaccaugaacucccucacccuccccuccgaagucaaucuaugcaacguagacaucuucaacccgaaauaugacugcaaaauuaugacaucuaaaaccgacguguccuccucagucaucacuucccuaggagccaucguuuccuguuacggcaagaccaaaugcaccgccagcaacaaaaaccgaggcaucaucaaaaccuucuccaacggaugugacuaugucuccaacaagggcgucgacaccgucagcgucggcaacacccucuacugcgucaacaaacaagaaggccaaucccucuacgucaaaggagagcccauaaucaacuucuacgacccccucgucuucccauccgacgaguucgacgccucaaucucccaagucaacgagaaaaucaaccaauccuuagccuucauccguaaguccgacgaacuccuucacaacgucaacgccgguaaaucuaccaccaacaucaugauaacaacaauaauuaucgucaucaucgucauccuccuuucccucaucgcggucgggcuauugcucuacugcaaagcccgguccaccccaguaacccucucuaaagaccaacucagcggaaucaauaacauagccuucagcaauuaaggacuaguggaagcauuuuccuggcugauuaaaagaaauuacucagcuauggucaucuguuccuguuagaaggcuaugcagcauauuauauacuaugcgcauguuaugaaaugcauaauaaaaaauuuuaaaaaaucuaaaagaucuaaaaaaaaaaaaaaaaaaaaaaaaaaaaaaaaaaaaaaaaaaaaaaaaaaaaaaaaaaaaaaaaugcaucccccccccccccccccccccccccccccccaaaggcucuuuucagagccaccagaauu

SEQ ID NO: 2639 - RNA, 1967 nt, Artificial Sequence
  mRNA product Design g-2 comprising derived and/or modified sequence from HRSV(A2)__F_DSCav1_mut2 (opt1)
gggagaguccgcucagccagguugcagaagcggcuuagcguguguccuaaucuucucucugcguguagguaggccugugccgcaaacaagcuuaccauggagcugcucauccugaaggccaacgccaucaccaccauccugacggcggugaccuucugcuucgccagcggccagaacaucaccgaggaguucuaccaguccacgugcagcgccgucuccaagggguaccucggcgcccugcggaccggcugguacaccuccgugaucaccaucgagcugagcaacaucaaggagaacaagugcaacgggaccgacgccaaggugaagcucaucaagcaggagcuggacaaguacaagaacgcggucacggaccugcagcuccugaugcaguccaccccggcaaccggcuccggcuccgccaucugcagcggcgucgccgugugcaaggugcugcaccucgagggggaggucaacaagaucaagagcgcccugcuguccaccaacaaggccguggugagccucuccaacggcgucagcgugcugaccuucaaggugcuggaccucaagaacuacaucgacaagcagcugcugcccauccugaacaagcagagcugcuccauccccaacaucgagacggugaucgaguuccagcagaagaacaaccggcuccuggagaucacccgcgaguucagcgugaacgccggggucaccacccccguguccacguacaugcugaccaacagcgagcuccugucccugaucaacgacaugccgaucaccaacgaccagaagaagcucaugagcaacaacgugcagaucguccggcagcaguccuacagcaucaugugcaucaucaaggaggaggugcuggcguacgugguccagcugccccucuacggcgugaucgacacccccugcuggaagcugcacacgagcccccugugcaccaccaacaccaaggagggguccaacaucugccucacgcgcaccgaccggggcugguacugcgacaacgccggcagcgucuccuucuucccgcaggccgagaccugcaaggugcagagcaaccgcguguucugcgacaccaugaacucccugacgcugcccagcgagguaaaccucugcaacgucgacaucuucaaccccaaguacgacugcaagaucaugaccuccaagaccgacgugagcuccagcgugaucaccucccugggggccaucgucagcugcuacggcaagacgaagugcaccgccagcaacaagaaccgggggaucaucaagaccuucuccaacggcugcgacuacgugagcaacaagggcguggacaccguguccgucgggaacacccuguacugcgugaacaagcaggagggccagagccucuacgugaagggggagcccaucaucaacuucuacgacccgcuggucuuccccuccgacgaguucgacgcgagcaucucccaggugaacgagaagaucaaccagagccuggccuucauccgcaaguccgacgagcugcuccacaacgugaacgccggcaagagcacgaccaacaucaugaucaccaccaucaucaucgucaucaucgugauccugcugucccucaucgccguggggcugcugcucuacugcaaggcccggagcacgcccgucacccuguccaaggaccagcugagcggcaucaacaacaucgcguucuccaacugaggacuaguaauaaggaaacuguaugaaugucugugggcaggaagugaagagauccuucuguaaagguuuuuggaauuaugucugcugaauaauaaacuuuuuugaaauaauaaaucugguagaaaaaugagaucuaaaaaaaaaaaaaaaaaaaaaaaaaaaaaaaaaaaaaaaaaaaaaaaaaaaaaaaaaaaaaaaaugcaucccccccccccccccccccccccccccccccaaaggcucuuuucagagccaccagaauu

SEQ ID NO: 2640 - RNA, 1967 nt, Artificial Sequence
  mRNA product Design g-2 comprising derived and/or modified sequence from HRSV(A2)__F_DSCav1_mut2 (opt1)
gggagaguccgcucagccagguugcagaagcggcuuagcguguguccuaaucuucucucugcguguagguaggccugugccgcaaacaagcuuaccauggagcugcucauccugaaggccaacgccaucaccaccauccugacggcggugaccuucugcuucgccagcggccagaacaucaccgaggaguucuaccaguccacgugcagcgccgucuccaagggguaccucggcgcccugcgcaccgggugguacaccagcgugaucaccaucgagcuguccaacaucaaggagaacaagugcaacggcaccgacgccaaggugaagcucaucaagcaggagcuggacaaguacaagaacgcggucacggaccugcagcuccugaugcagagcacccccgccaccggguccggcagcgccaucugcuccggcguggccgugugcaagguccugcaccucgagggggaggugaacaagaucaagagcgcgcugcuguccaccaacaaggccguggucagccucuccaacggcgugagcgugcugacguucaagguccuggaccucaagaacuacaucgacaagcagcugcugccgauccucaacaagcaguccugcagcauccccaacaucgagaccgugaucgaguuccagcagaagaacaaccggcugcuggagaucacccgcgaguucuccgugaacgccggggucaccacgcccgugagcaccuacaugcucaccaacuccgagcugcugagccucaucaacgacaugcccaucaccaacgaccagaagaagcugaugagcaacaacgugcagaucguccggcagcaguccuacagcaucaugugcaucaucaaggaggaggugcuggccuacgugguccagcucccgcuguacggcgugaucgacacgcccugcuggaagcugcacaccagcccccucugcaccaccaacacgaaggagggguccaacaucugccugacccgcaccgaccggggcugguacugcgacaacgccggcuccgugagcuucuucccccaggcggagaccugcaagguccaguccaaccgcguguucugcgacacgaugaacagccugacccucccguccgaggucaaccugugcaacguggacaucuucaaccccaaguacgacugcaagaucaugaccagcaagaccgacguguccagcuccgucaucacgagccugggggccaucguguccugcuacggcaagaccaagugcaccgccagcaacaagaaccgggggaucaucaagaccuucuccaacggcugcgacuacgugagcaacaagggcgucgacacgguguccguggggaacacccucuacugcgucaacaagcaggagggccagagccuguacgugaagggggagcccaucaucaacuucuacgacccccugguguucccgagcgacgaguucgacgccuccaucagccaggucaacgagaagaucaaccagucccucgccuucauccgcaagagcgacgagcugcugcacaacgugaacgcgggcaaguccaccaccaacaucaugaucaccacgaucaucaucgugaucaucgucauccuccugagccugaucgccguggggcuccugcuguacugcaaggcccgguccacccccgugacccugagcaaggaccagcucuccggcaucaacaacaucgccuucagcaacugaggacuaguaauaaggaaacuguaugaaugucugugggcaggaagugaagagauccuucuguaaagguuuuuggaauuaugucugcugaauaauaaacuuuuuugaaauaauaaaucugguagaaaaaugagaucuaaaaaaaaaaaaaaaaaaaaaaaaaaaaaaaaaaaaaaaaaaaaaaaaaaaaaaaaaaaaaaaaugcaucccccccccccccccccccccccccccccccaaaggcucuuuucagagccaccagaauu

SEQ ID NO: 2641 - RNA, 1967 nt, Artificial Sequence
  mRNA product Design g-2 comprising derived and/or modified sequence from HRSV(A2)__F_DSCav1_mut2 (opt2)
gggagaguccgcucagccagguugcagaagcggcuuagcguguguccuaaucuucucucugcguguagguaggccugugccgcaaacaagcuuaccauggagcuccucauccucaaggccaacgccaucaccaccauccucaccgccgucaccuucugcuucgccuccggccagaacaucaccgaggaguucuaccaguccaccugcuccgccgucuccaagggcuaccucggcgcccuccgcaccggcugguacaccuccgucaucaccaucgagcucuccaacaucaaggagaacaagugcaacggcaccgacgccaaggucaagcucaucaagcaggagcucgacaaguacaagaacgccgucaccgaccuccagcuccucaugcaguccacccccgccaccggcuccggcuccgccaucugcuccggcgucgccgucugcaagguccuccaccucgagggcgaggucaacaagaucaaguccgcccuccucuccaccaacaaggccgucgucucccucuccaacggcgucuccguccucaccuucaagguccucgaccucaagaacuacaucgacaagcagcuccuccccauccucaacaagcaguccugcuccauccccaacaucgagaccgucaucgaguuccagcagaagaacaaccgccuccucgagaucacccgcgaguucuccgucaacgccggcgucaccacccccgucuccaccuacaugcucaccaacuccgagcuccucucccucaucaacgacaugcccaucaccaacgaccagaagaagcucauguccaacaacguccagaucguccgccagcaguccuacuccaucaugugcaucaucaaggaggagguccucgccuacgucguccagcucccccucuacggcgucaucgacacccccugcuggaagcuccacaccuccccccucugcaccaccaacaccaaggagggcuccaacaucugccucacccgcaccgaccgcggcugguacugcgacaacgccggcuccgucuccuucuucccccaggccgagaccugcaagguccaguccaaccgcgucuucugcgacaccaugaacucccucacccuccccuccgaggucaaccucugcaacgucgacaucuucaaccccaaguacgacugcaagaucaugaccuccaagaccgacgucuccuccuccgucaucaccucccucggcgccaucgucuccugcuacggcaagaccaagugcaccgccuccaacaagaaccgcggcaucaucaagaccuucuccaacggcugcgacuacgucuccaacaagggcgucgacaccgucuccgucggcaacacccucuacugcgucaacaagcaggagggccagucccucuacgucaagggcgagcccaucaucaacuucuacgacccccucgucuuccccuccgacgaguucgacgccuccaucucccaggucaacgagaagaucaaccagucccucgccuucauccgcaaguccgacgagcuccuccacaacgucaacgccggcaaguccaccaccaacaucaugaucaccaccaucaucaucgucaucaucgucauccuccucucccucaucgccgucggccuccuccucuacugcaaggcccgcuccacccccgucacccucuccaaggaccagcucuccggcaucaacaacaucgccuucuccaacugaggacuaguaauaaggaaacuguaugaaugucugugggcaggaagugaagagauccuucuguaaagguuuuuggaauuaugucugcugaauaauaaacuuuuuugaaauaauaaaucugguagaaaaaugagaucuaaaaaaaaaaaaaaaaaaaaaaaaaaaaaaaaaaaaaaaaaaaaaaaaaaaaaaaaaaaaaaaaugcaucccccccccccccccccccccccccccccccaaaggcucuuuucagagccaccagaauu

SEQ ID NO: 2642 - RNA, 1967 nt, Artificial Sequence
  mRNA product Design g-2 comprising derived and/or modified sequence from HRSV(A2)__F_DSCav1_mut2 (opt3)
gggagaguccgcucagccagguugcagaagcggcuuagcguguguccuaaucuucucucugcguguagguaggccugugccgcaaacaagcuuaccauggagcugcucauccuuaaggccaacgcuauuaccacaauacugacugcagugacguucugcuuugccagcggccagaauaucaccgaagaguucuaccaauccacauguucugcggucucaaaaggguauuugggagcuuuaagaacugguugguacaccaguguuauuacaaucgaacugagcaacauuaaggagaauaaaugcaacggcaccgacgccaaggugaaacuaaucaagcaggaacucgauaaguauaaaaaugcaguaacugaccugcagcuucugaugcaguccacacccgccaccgggucuggaucggcuauauguucaggcguggcagucugcaagguguugcaccucgagggugagguuaacaaaaucaagagcgcccugcugaguacgaauaaagcuguggucucccucucuaacggggugagcguauuaacuuuuaagguucuggaucuuaagaauuacauugacaaacaauugcugccuauccuaaacaagcaguccuguucaauuccaaauaucgaaaccgugauagaguuccagcagaaaaacaauaggcuccuggaaauuacacgggaguuuagugucaacgccggagugacuaccccggugagcacauauaugcuuaccaauucugagcuguugucccucaucaacgauaugcccauuacgaacgaccaaaagaaacugaugucaaauaacguccagaucguucgccagcagagcuacaguaucaugugcauuauaaaggaagagguguuagcguauguagugcaacugccucucuacggcgucaucgauacuccauguuggaaacuucauacaucuccccugugcaccacuaauacaaaggaaggcuccaacauuuguuugacccgaacggaccgugggugguacugcgauaaugcaggaagcgugucguucuuuccucaggccgagaccuguaagguucagucuaacagaguguucugcgacacaaugaacucccuaacucugccaucagaagucaaucucugcaauguggauaucuuuaaccccaaauaugacuguaagauaaugaccaguaaaacagauguaagcuccucuguuauuacuagccugggugcuaucgugucaugcuacggcaagaccaaauguacagccaguaauaagaacagggggaucauuaagaccuucuccaauggaugcgacuaugucagcaacaaaggcguggacacugucucuguggguaauacgcuuuacuguguuaacaagcaagaggggcagucacuguaugugaaaggagagccuaucauuaacuuuuacgauccauugguauucccgagugacgaauuugaugcaagcauaucccaggucaaugagaagaucaaccagucucucgcuuucauucggaaaucggacgaacuguuacacaaugugaacgccggcaagagcacaaccaauaucaugaucacuaccauuauaaucguuauuaucgugauucugcuaucccucaucgcggucggccugcuuuuguauugcaaggcccgcucaacacccgugacccugaguaaagaucaacucucugggauaaacaauaucgcauucagcaacugaggacuaguaauaaggaaacuguaugaaugucugugggcaggaagugaagagauccuucuguaaagguuuuuggaauuaugucugcugaauaauaaacuuuuuugaaauaauaaaucugguagaaaaaugagaucuaaaaaaaaaaaaaaaaaaaaaaaaaaaaaaaaaaaaaaaaaaaaaaaaaaaaaaaaaaaaaaaaugcaucccccccccccccccccccccccccccccccaaaggcucuuuucagagccaccagaauu

SEQ ID NO: 2643 - RNA, 1967 nt, Artificial Sequence
  mRNA product Design g-2 comprising derived and/or modified sequence from HRSV(A2)__F_DSCav1_mut2 (opt4)
gggagaguccgcucagccagguugcagaagcggcuuagcguguguccuaaucuucucucugcguguagguaggccugugccgcaaacaagcuuaccauggagcugcugauccugaaggccaacgccaucaccaccauccugaccgccgugaccuucugcuucgccagcggccagaacaucaccgaggaguucuaccagagcaccugcagcgccgugagcaagggcuaccugggcgcccugagaaccggcugguacaccagcgugaucaccaucgagcugagcaacaucaaggagaacaagugcaacggcaccgacgccaaggugaagcugaucaagcaggagcuggacaaguacaagaacgccgugaccgaccugcagcugcugaugcagagcacccccgccaccggcagcggcagcgccaucugcagcggcguggccgugugcaaggugcugcaccuggagggcgaggugaacaagaucaagagcgcccugcugagcaccaacaaggccguggugagccugagcaacggcgugagcgugcugaccuucaaggugcuggaccugaagaacuacaucgacaagcagcugcugcccauccugaacaagcagagcugcagcauccccaacaucgagaccgugaucgaguuccagcagaagaacaacagacugcuggagaucaccagagaguucagcgugaacgccggcgugaccacccccgugagcaccuacaugcugaccaacagcgagcugcugagccugaucaacgacaugcccaucaccaacgaccagaagaagcugaugagcaacaacgugcagaucgugagacagcagagcuacagcaucaugugcaucaucaaggaggaggugcuggccuacguggugcagcugccccuguacggcgugaucgacacccccugcuggaagcugcacaccagcccccugugcaccaccaacaccaaggagggcagcaacaucugccugaccagaaccgacagaggcugguacugcgacaacgccggcagcgugagcuucuucccccaggccgagaccugcaaggugcagagcaacagaguguucugcgacaccaugaacagccugacccugcccagcgaggugaaccugugcaacguggacaucuucaaccccaaguacgacugcaagaucaugaccagcaagaccgacgugagcagcagcgugaucaccagccugggcgccaucgugagcugcuacggcaagaccaagugcaccgccagcaacaagaacagaggcaucaucaagaccuucagcaacggcugcgacuacgugagcaacaagggcguggacaccgugagcgugggcaacacccuguacugcgugaacaagcaggagggccagagccuguacgugaagggcgagcccaucaucaacuucuacgacccccugguguuccccagcgacgaguucgacgccagcaucagccaggugaacgagaagaucaaccagagccuggccuucaucagaaagagcgacgagcugcugcacaacgugaacgccggcaagagcaccaccaacaucaugaucaccaccaucaucaucgugaucaucgugauccugcugagccugaucgccgugggccugcugcuguacugcaaggccagaagcacccccgugacccugagcaaggaccagcugagcggcaucaacaacaucgccuucagcaacugaggacuaguaauaaggaaacuguaugaaugucugugggcaggaagugaagagauccuucuguaaagguuuuuggaauuaugucugcugaauaauaaacuuuuuugaaauaauaaaucugguagaaaaaugagaucuaaaaaaaaaaaaaaaaaaaaaaaaaaaaaaaaaaaaaaaaaaaaaaaaaaaaaaaaaaaaaaaaugcaucccccccccccccccccccccccccccccccaaaggcucuuuucagagccaccagaauu

SEQ ID NO: 2644 - RNA, 1967 nt, Artificial Sequence
  mRNA product Design g-2 comprising derived and/or modified sequence from HRSV(A2)__F_DSCav1_mut2 (opt5)
gggagaguccgcucagccagguugcagaagcggcuuagcguguguccuaaucuucucucugcguguagguaggccugugccgcaaacaagcuuaccauggagcugcucauccugaaggccaacgcuauuaccacaauccuuacggccgugaccuucugcuuugcgagcggccagaauauuacagaagaguucuaccaauccaccuguucugcugucagcaaaggguaucugggagcccucagaacaggcugguacaccuccguuaucacaauugaacugucuaacaucaaggagaauaaaugcaacgggaccgacgccaaggugaaacuuaucaagcaggaacuggauaaguauaaaaaugcugugacggaccuccagcugcugaugcagagcacccccgccacaggauccggcucugcuauuuguagcggggucgccgugugcaagguucuccaccuggagggagaggugaacaaaaucaaguccgcgcuucugagcaccaauaaagccgucgugucucucuccaacggcguuagcgugcugacauuuaagguccuugaucugaagaauuacauugacaaacaacuccugccuauccugaacaagcagucuuguuccauuccgaauaucgaaaccgugauugaguuccagcagaaaaacaaucggcuccuggaaaucacgcgcgaguuuagcgugaacgcuggcgucacaacccccguuucuacauauaugcuuaccaauuccgagcugcucagccugaucaacgauaugccuauuaccaacgaccaaaagaaacuuauguccaauaacgugcagaucgugagacagcagucuuacagcauuaugugcaucauuaaggaagagguccuggccuaugugguucaacucccccuguacggggugaucgauacaccuuguuggaaacugcauacgagcccccucugcaccacaaauaccaaggaaggauccaacaucugucugacacggaccgaccgcggcugguacugcgauaaugcugggucugucuccuucuuuccucaggccgagacguguaaggugcagagcaacagaguuuucugcgacacaaugaacucucuuacccugccgagcgaagugaaucucugcaaugucgauauuuuuaaccccaaauaugacuguaagaucaugaccuccaaaacagaugugucuagcuccgucauuaccagccugggagcgaucgugucuugcuacggcaagacaaaauguacggccuccaauaagaaccgggggauuaucaagaccuucagcaauggaugcgacuauguuucuaacaaaggcguggacacagucuccgugggcaauacccuuuacuguguuaacaagcaagaggggcagagccuguaugugaaaggagagccuaucauuaacuuuuacgauccccucgucuucccuuccgacgaauuugaugcuucuaucagccaggugaaugagaagauuaaccagucccuggccuucauccgcaaaucugacgaacugcuccacaaugugaacgcuggcaagagcacaaccaauauuaugaucacgaccauuaucaucguuauuaucgucauucugcuuucccugaucgccguggggcuccugcuguauugcaaggccagaagcacacccgugacccuuucuaaagaucaacucuccggaauuaacaauaucgcuuucagcaacugaggacuaguaauaaggaaacuguaugaaugucugugggcaggaagugaagagauccuucuguaaagguuuuuggaauuaugucugcugaauaauaaacuuuuuugaaauaauaaaucugguagaaaaaugagaucuaaaaaaaaaaaaaaaaaaaaaaaaaaaaaaaaaaaaaaaaaaaaaaaaaaaaaaaaaaaaaaaaugcaucccccccccccccccccccccccccccccccaaaggcucuuuucagagccaccagaauu

SEQ ID NO: 2645 - RNA, 1967 nt, Artificial Sequence
  mRNA product Design g-2 comprising derived and/or modified sequence from HRSV(A2)__F_DSCav1_mut2 (opt6)
gggagaguccgcucagccagguugcagaagcggcuuagcguguguccuaaucuucucucugcguguagguaggccugugccgcaaacaagcuuaccauggaacuacuaauccuaaaagcaaacgcaauuacaacuauacuuaccgccguaacauuuugcuucgcaucugggcaaaacauuaccgaagaauuuuaucaaucaacaugcucagcagucuccaaaggauaccuuggagcauuaagaaccggcugguauaccuccguaauaacaauugaacuaucuaauauaaaagaaaauaaauguaauggaacugacgcaaaaguuaaacuaauaaaacaagaacucgacaaauacaaaaacgccgucacagaccuacaacuacuaaugcaaucaacccccgcaacaggaucaggauccgcaaucugcagcggcgucgcaguuugcaaaguccuacauuuagaaggagaaguaaacaaaauaaaaucugcucuccucucuacaaacaaagcaguagugucacuuucaaacggaguaucaguucuaacauucaaaguacuagaccuaaaaaauuacauagacaaacaacuacuuccaauucuaaacaaacaauccuguuccauacccaacauagaaacaguaauagaauuucaacaaaaaaauaacagacuccuagaaauuacaagagaauuuuccgucaaugcaggaguaacaaccccaguaucaaccuacauguuaacuaacucagaacucuuaucacuaauaaacgacaugccaaucacuaaugaccaaaaaaaacucaugucaaauaacguacaaauaguccgacaacaaucauacuccaucaugugcauuauaaaagaagaaguacuagcauacgucguccaauuaccacuauacggcgucauagacacaccauguuggaaacuccacacaucaccacuaugcacuacaaauacaaaagaaggcuccaacaucugccuaacaagaacagacagagguugguauugcgacaacgcaggaucaguaucauuuuucccccaagcagaaacauguaaaguacaaucaaauagagucuucugcgacaccaugaacucauuaacacuaccuucagaagucaaccuaugcaacguagacaucuucaacccuaaauaugacugcaaaaucaugaccagcaaaaccgacguuucaucuuccguaauaacaucacuaggcgcaauagucucauguuacggcaaaacaaaauguacagcaucaaauaaaaaccguggaauaauaaaaacauuuucuaaugguugugacuacguaagcaauaaaggaguagauacaguaucagucggcaacaccuuauacuguguaaacaaacaagaaggccaaaguuuauacgucaaaggagaacccaucaucaacuucuacgacccauuaguauucccaucagacgaauuugaugcaagcauuucacaagucaacgaaaaaaucaaucaaucauuagcauucauccgaaaaucagacgaauuauuacacaacguaaacgccggaaaaucaaccacuaauauaaugauaaccacaauaaucaucguaauaauaguaauacuucucucacuaaucgcagucggacuccuucuauacugcaaagcaagaucuacaccaguaacacuauccaaagaucaacuaaguggcauaaacaacauagcauuuucuaacuaaggacuaguaauaaggaaacuguaugaaugucugugggcaggaagugaagagauccuucuguaaagguuuuuggaauuaugucugcugaauaauaaacuuuuuugaaauaauaaaucugguagaaaaaugagaucuaaaaaaaaaaaaaaaaaaaaaaaaaaaaaaaaaaaaaaaaaaaaaaaaaaaaaaaaaaaaaaaaugcaucccccccccccccccccccccccccccccccaaaggcucuuuucagagccaccagaauu

SEQ ID NO: 2646 - RNA, 1967 nt, Artificial Sequence
  mRNA product Design g-2 comprising derived and/or modified sequence from HRSV(A2)__F_DSCav1_mut2 (opt11)
gggagaguccgcucagccagguugcagaagcggcuuagcguguguccuaaucuucucucugcguguagguaggccugugccgcaaacaagcuuaccauggaacuccucauccuaaaagccaacgcgaucaccacaauccugacagccgucaccuucugcuucgccuccggccaaaacaucaccgaagaguucuaccaauccacaugcuccgccgucuccaagggcuaccugggcgcacuucguacaggcugguacaccuccguaauaaccaucgaacucuccaacaucaaagaaaacaaaugcaacggcacagacgcaaaagucaaacucaucaagcaagaacuugacaaauacaaaaaugcagucaccgaccuucaacuccucaugcaaucuacccccgccacaggcuccggcuccgcuaucugcuccggcgucgccgucugcaaaguccuccaccucgaaggugaaguaaacaaaauaaaauccgcccuccucuccaccaacaaagccgucgucucccuaucaaacggcgucuccgugcucaccuucaagguucucgaccugaaaaacuacauagacaaacagcuccuaccaauccuuaacaaacagagcugcuccauuccgaauaucgaaacgguaaucgaauuucaacagaaaaacaaccgccuccucgaaauaacgcgagaguucuccguaaacgcuggcgucaccacacccgucagcaccuacaugcuaacgaacuccgaacucuugucgcucaucaacgacaugcccauaaccaacgaccaaaagaaacuaauguccaauaacguacaaaucguacgccaacaaucuuacuccaucaugugcaucauaaaagaagaaguacuagcuuacgucguccaacucccacuguacggagucaucgacacccccugcuggaaacuccacaccucuccccucugcaccaccaacaccaaagagggcuccaacauuugccugacacgcaccgaccgcggcugguacugcgacaacgcaggcuccgucucguucuucccccaagccgaaaccugcaaaguccaauccaaccgcgucuucugcgacaccaugaacucccucacccuccccuccgaagucaaucuaugcaacguagacaucuucaacccgaaauaugacugcaaaauuaugacaucuaaaaccgacguguccuccucagucaucacuucccuaggagccaucguuuccuguuacggcaagaccaaaugcaccgccagcaacaaaaaccgaggcaucaucaaaaccuucuccaacggaugugacuaugucuccaacaagggcgucgacaccgucagcgucggcaacacccucuacugcgucaacaaacaagaaggccaaucccucuacgucaaaggagagcccauaaucaacuucuacgacccccucgucuucccauccgacgaguucgacgccucaaucucccaagucaacgagaaaaucaaccaauccuuagccuucauccguaaguccgacgaacuccuucacaacgucaacgccgguaaaucuaccaccaacaucaugauaacaacaauaauuaucgucaucaucgucauccuccuuucccucaucgcggucgggcuauugcucuacugcaaagcccgguccaccccaguaacccucucuaaagaccaacucagcggaaucaauaacauagccuucagcaauuaaggacuaguaauaaggaaacuguaugaaugucugugggcaggaagugaagagauccuucuguaaagguuuuuggaauuaugucugcugaauaauaaacuuuuuugaaauaauaaaucugguagaaaaaugagaucuaaaaaaaaaaaaaaaaaaaaaaaaaaaaaaaaaaaaaaaaaaaaaaaaaaaaaaaaaaaaaaaaugcaucccccccccccccccccccccccccccccccaaaggcucuuuucagagccaccagaauu

SEQ ID NO: 2647 - RNA, 2199 nt, Artificial Sequence
  mRNA product Design g-3 comprising derived and/or modified sequence from HRSV(A2)__F_DSCav1_mut2 (opt1)
gggagaguccgcucagccagguugcagaagcggcuuagcguguguccuaaucuucucucugcguguagguaggccugugccgcaaacaagcuuaccauggagcugcucauccugaaggccaacgccaucaccaccauccugacggcggugaccuucugcuucgccagcggccagaacaucaccgaggaguucuaccaguccacgugcagcgccgucuccaagggguaccucggcgcccugcggaccggcugguacaccuccgugaucaccaucgagcugagcaacaucaaggagaacaagugcaacgggaccgacgccaaggugaagcucaucaagcaggagcuggacaaguacaagaacgcggucacggaccugcagcuccugaugcaguccaccccggcaaccggcuccggcuccgccaucugcagcggcgucgccgugugcaaggugcugcaccucgagggggaggucaacaagaucaagagcgcccugcuguccaccaacaaggccguggugagccucuccaacggcgucagcgugcugaccuucaaggugcuggaccucaagaacuacaucgacaagcagcugcugcccauccugaacaagcagagcugcuccauccccaacaucgagacggugaucgaguuccagcagaagaacaaccggcuccuggagaucacccgcgaguucagcgugaacgccggggucaccacccccguguccacguacaugcugaccaacagcgagcuccugucccugaucaacgacaugccgaucaccaacgaccagaagaagcucaugagcaacaacgugcagaucguccggcagcaguccuacagcaucaugugcaucaucaaggaggaggugcuggcguacgugguccagcugccccucuacggcgugaucgacacccccugcuggaagcugcacacgagcccccugugcaccaccaacaccaaggagggguccaacaucugccucacgcgcaccgaccggggcugguacugcgacaacgccggcagcgucuccuucuucccgcaggccgagaccugcaaggugcagagcaaccgcguguucugcgacaccaugaacucccugacgcugcccagcgagguaaaccucugcaacgucgacaucuucaaccccaaguacgacugcaagaucaugaccuccaagaccgacgugagcuccagcgugaucaccucccugggggccaucgucagcugcuacggcaagacgaagugcaccgccagcaacaagaaccgggggaucaucaagaccuucuccaacggcugcgacuacgugagcaacaagggcguggacaccguguccgucgggaacacccuguacugcgugaacaagcaggagggccagagccucuacgugaagggggagcccaucaucaacuucuacgacccgcuggucuuccccuccgacgaguucgacgcgagcaucucccaggugaacgagaagaucaaccagagccuggccuucauccgcaaguccgacgagcugcuccacaacgugaacgccggcaagagcacgaccaacaucaugaucaccaccaucaucaucgucaucaucgugauccugcugucccucaucgccguggggcugcugcucuacugcaaggcccggagcacgcccgucacccuguccaaggaccagcugagcggcaucaacaacaucgcguucuccaacugaggacuagugaagggaacacccaaauuuaauucagccuuaagcacaauuaauuaagagugaaacguaauuguacaagcaguuggucacccaccauagggcaugaucaacaccgcaaccuuuccuuuuucccccagugauucugaaaaaccccucuucccuucagcuugcuuagauguuccaaauuuaguaagcuuaaggcggccuacagaagaaaaagaaaaaaaaggccacaaaaguucccucucacuuucaguaaauaaaauaaaagcagcaacagaaauaaagaaauaaaugaaauucaaaaugaaauaaauauuguguugugcagcauuaaaaaaucaauaaaaauuaaaaaugagcaagaucuaaaaaaaaaaaaaaaaaaaaaaaaaaaaaaaaaaaaaaaaaaaaaaaaaaaaaaaaaaaaaaaaugcaucccccccccccccccccccccccccccccccaaaggcucuuuucagagccaccagaauu

SEQ ID NO: 2648 - RNA, 2199 nt, Artificial Sequence
  mRNA product Design g-3 comprising derived and/or modified sequence from HRSV(A2)__F_DSCav1_mut2 (opt1)
gggagaguccgcucagccagguugcagaagcggcuuagcguguguccuaaucuucucucugcguguagguaggccugugccgcaaacaagcuuaccauggagcugcucauccugaaggccaacgccaucaccaccauccugacggcggugaccuucugcuucgccagcggccagaacaucaccgaggaguucuaccaguccacgugcagcgccgucuccaagggguaccucggcgcccugcgcaccgggugguacaccagcgugaucaccaucgagcuguccaacaucaaggagaacaagugcaacggcaccgacgccaaggugaagcucaucaagcaggagcuggacaaguacaagaacgcggucacggaccugcagcuccugaugcagagcacccccgccaccggguccggcagcgccaucugcuccggcguggccgugugcaagguccugcaccucgagggggaggugaacaagaucaagagcgcgcugcuguccaccaacaaggccguggucagccucuccaacggcgugagcgugcugacguucaagguccuggaccucaagaacuacaucgacaagcagcugcugccgauccucaacaagcaguccugcagcauccccaacaucgagaccgugaucgaguuccagcagaagaacaaccggcugcuggagaucacccgcgaguucuccgugaacgccggggucaccacgcccgugagcaccuacaugcucaccaacuccgagcugcugagccucaucaacgacaugcccaucaccaacgaccagaagaagcugaugagcaacaacgugcagaucguccggcagcaguccuacagcaucaugugcaucaucaaggaggaggugcuggccuacgugguccagcucccgcuguacggcgugaucgacacgcccugcuggaagcugcacaccagcccccucugcaccaccaacacgaaggagggguccaacaucugccugacccgcaccgaccggggcugguacugcgacaacgccggcuccgugagcuucuucccccaggcggagaccugcaagguccaguccaaccgcguguucugcgacacgaugaacagccugacccucccguccgaggucaaccugugcaacguggacaucuucaaccccaaguacgacugcaagaucaugaccagcaagaccgacguguccagcuccgucaucacgagccugggggccaucguguccugcuacggcaagaccaagugcaccgccagcaacaagaaccgggggaucaucaagaccuucuccaacggcugcgacuacgugagcaacaagggcgucgacacgguguccguggggaacacccucuacugcgucaacaagcaggagggccagagccuguacgugaagggggagcccaucaucaacuucuacgacccccugguguucccgagcgacgaguucgacgccuccaucagccaggucaacgagaagaucaaccagucccucgccuucauccgcaagagcgacgagcugcugcacaacgugaacgcgggcaaguccaccaccaacaucaugaucaccacgaucaucaucgugaucaucgucauccuccugagccugaucgccguggggcuccugcuguacugcaaggcccgguccacccccgugacccugagcaaggaccagcucuccggcaucaacaacaucgccuucagcaacugaggacuagugaagggaacacccaaauuuaauucagccuuaagcacaauuaauuaagagugaaacguaauuguacaagcaguuggucacccaccauagggcaugaucaacaccgcaaccuuuccuuuuucccccagugauucugaaaaaccccucuucccuucagcuugcuuagauguuccaaauuuaguaagcuuaaggcggccuacagaagaaaaagaaaaaaaaggccacaaaaguucccucucacuuucaguaaauaaaauaaaagcagcaacagaaauaaagaaauaaaugaaauucaaaaugaaauaaauauuguguugugcagcauuaaaaaaucaauaaaaauuaaaaaugagcaagaucuaaaaaaaaaaaaaaaaaaaaaaaaaaaaaaaaaaaaaaaaaaaaaaaaaaaaaaaaaaaaaaaaugcaucccccccccccccccccccccccccccccccaaaggcucuuuucagagccaccagaauu

SEQ ID NO: 2649 - RNA, 2199 nt, Artificial Sequence
  mRNA product Design g-3 comprising derived and/or modified sequence from HRSV(A2)__F_DSCav1_mut2 (opt2)
gggagaguccgcucagccagguugcagaagcggcuuagcguguguccuaaucuucucucugcguguagguaggccugugccgcaaacaagcuuaccauggagcuccucauccucaaggccaacgccaucaccaccauccucaccgccgucaccuucugcuucgccuccggccagaacaucaccgaggaguucuaccaguccaccugcuccgccgucuccaagggcuaccucggcgcccuccgcaccggcugguacaccuccgucaucaccaucgagcucuccaacaucaaggagaacaagugcaacggcaccgacgccaaggucaagcucaucaagcaggagcucgacaaguacaagaacgccgucaccgaccuccagcuccucaugcaguccacccccgccaccggcuccggcuccgccaucugcuccggcgucgccgucugcaagguccuccaccucgagggcgaggucaacaagaucaaguccgcccuccucuccaccaacaaggccgucgucucccucuccaacggcgucuccguccucaccuucaagguccucgaccucaagaacuacaucgacaagcagcuccuccccauccucaacaagcaguccugcuccauccccaacaucgagaccgucaucgaguuccagcagaagaacaaccgccuccucgagaucacccgcgaguucuccgucaacgccggcgucaccacccccgucuccaccuacaugcucaccaacuccgagcuccucucccucaucaacgacaugcccaucaccaacgaccagaagaagcucauguccaacaacguccagaucguccgccagcaguccuacuccaucaugugcaucaucaaggaggagguccucgccuacgucguccagcucccccucuacggcgucaucgacacccccugcuggaagcuccacaccuccccccucugcaccaccaacaccaaggagggcuccaacaucugccucacccgcaccgaccgcggcugguacugcgacaacgccggcuccgucuccuucuucccccaggccgagaccugcaagguccaguccaaccgcgucuucugcgacaccaugaacucccucacccuccccuccgaggucaaccucugcaacgucgacaucuucaaccccaaguacgacugcaagaucaugaccuccaagaccgacgucuccuccuccgucaucaccucccucggcgccaucgucuccugcuacggcaagaccaagugcaccgccuccaacaagaaccgcggcaucaucaagaccuucuccaacggcugcgacuacgucuccaacaagggcgucgacaccgucuccgucggcaacacccucuacugcgucaacaagcaggagggccagucccucuacgucaagggcgagcccaucaucaacuucuacgacccccucgucuuccccuccgacgaguucgacgccuccaucucccaggucaacgagaagaucaaccagucccucgccuucauccgcaaguccgacgagcuccuccacaacgucaacgccggcaaguccaccaccaacaucaugaucaccaccaucaucaucgucaucaucgucauccuccucucccucaucgccgucggccuccuccucuacugcaaggcccgcuccacccccgucacccucuccaaggaccagcucuccggcaucaacaacaucgccuucuccaacugaggacuagugaagggaacacccaaauuuaauucagccuuaagcacaauuaauuaagagugaaacguaauuguacaagcaguuggucacccaccauagggcaugaucaacaccgcaaccuuuccuuuuucccccagugauucugaaaaaccccucuucccuucagcuugcuuagauguuccaaauuuaguaagcuuaaggcggccuacagaagaaaaagaaaaaaaaggccacaaaaguucccucucacuuucaguaaauaaaauaaaagcagcaacagaaauaaagaaauaaaugaaauucaaaaugaaauaaauauuguguugugcagcauuaaaaaaucaauaaaaauuaaaaaugagcaagaucuaaaaaaaaaaaaaaaaaaaaaaaaaaaaaaaaaaaaaaaaaaaaaaaaaaaaaaaaaaaaaaaaugcaucccccccccccccccccccccccccccccccaaaggcucuuuucagagccaccagaauu

SEQ ID NO: 2650 - RNA, 2199 nt, Artificial Sequence
  mRNA product Design g-3 comprising derived and/or modified sequence from HRSV(A2)__F_DSCav1_mut2 (opt3)
gggagaguccgcucagccagguugcagaagcggcuuagcguguguccuaaucuucucucugcguguagguaggccugugccgcaaacaagcuuaccauggagcugcucauccuuaaggccaacgcuauuaccacaauacugacugcagugacguucugcuuugccagcggccagaauaucaccgaagaguucuaccaauccacauguucugcggucucaaaaggguauuugggagcuuuaagaacugguugguacaccaguguuauuacaaucgaacugagcaacauuaaggagaauaaaugcaacggcaccgacgccaaggugaaacuaaucaagcaggaacucgauaaguauaaaaaugcaguaacugaccugcagcuucugaugcaguccacacccgccaccgggucuggaucggcuauauguucaggcguggcagucugcaagguguugcaccucgagggugagguuaacaaaaucaagagcgcccugcugaguacgaauaaagcuguggucucccucucuaacggggugagcguauuaacuuuuaagguucuggaucuuaagaauuacauugacaaacaauugcugccuauccuaaacaagcaguccuguucaauuccaaauaucgaaaccgugauagaguuccagcagaaaaacaauaggcuccuggaaauuacacgggaguuuagugucaacgccggagugacuaccccggugagcacauauaugcuuaccaauucugagcuguugucccucaucaacgauaugcccauuacgaacgaccaaaagaaacugaugucaaauaacguccagaucguucgccagcagagcuacaguaucaugugcauuauaaaggaagagguguuagcguauguagugcaacugccucucuacggcgucaucgauacuccauguuggaaacuucauacaucuccccugugcaccacuaauacaaaggaaggcuccaacauuuguuugacccgaacggaccgugggugguacugcgauaaugcaggaagcgugucguucuuuccucaggccgagaccuguaagguucagucuaacagaguguucugcgacacaaugaacucccuaacucugccaucagaagucaaucucugcaauguggauaucuuuaaccccaaauaugacuguaagauaaugaccaguaaaacagauguaagcuccucuguuauuacuagccugggugcuaucgugucaugcuacggcaagaccaaauguacagccaguaauaagaacagggggaucauuaagaccuucuccaauggaugcgacuaugucagcaacaaaggcguggacacugucucuguggguaauacgcuuuacuguguuaacaagcaagaggggcagucacuguaugugaaaggagagccuaucauuaacuuuuacgauccauugguauucccgagugacgaauuugaugcaagcauaucccaggucaaugagaagaucaaccagucucucgcuuucauucggaaaucggacgaacuguuacacaaugugaacgccggcaagagcacaaccaauaucaugaucacuaccauuauaaucguuauuaucgugauucugcuaucccucaucgcggucggccugcuuuuguauugcaaggcccgcucaacacccgugacccugaguaaagaucaacucucugggauaaacaauaucgcauucagcaacugaggacuagugaagggaacacccaaauuuaauucagccuuaagcacaauuaauuaagagugaaacguaauuguacaagcaguuggucacccaccauagggcaugaucaacaccgcaaccuuuccuuuuucccccagugauucugaaaaaccccucuucccuucagcuugcuuagauguuccaaauuuaguaagcuuaaggcggccuacagaagaaaaagaaaaaaaaggccacaaaaguucccucucacuuucaguaaauaaaauaaaagcagcaacagaaauaaagaaauaaaugaaauucaaaaugaaauaaauauuguguugugcagcauuaaaaaaucaauaaaaauuaaaaaugagcaagaucuaaaaaaaaaaaaaaaaaaaaaaaaaaaaaaaaaaaaaaaaaaaaaaaaaaaaaaaaaaaaaaaaugcaucccccccccccccccccccccccccccccccaaaggcucuuuucagagccaccagaauu

SEQ ID NO: 2651 - RNA, 2199 nt, Artificial Sequence
  mRNA product Design g-3 comprising derived and/or modified sequence from HRSV(A2)__F_DSCav1_mut2 (opt4)
gggagaguccgcucagccagguugcagaagcggcuuagcguguguccuaaucuucucucugcguguagguaggccugugccgcaaacaagcuuaccauggagcugcugauccugaaggccaacgccaucaccaccauccugaccgccgugaccuucugcuucgccagcggccagaacaucaccgaggaguucuaccagagcaccugcagcgccgugagcaagggcuaccugggcgcccugagaaccggcugguacaccagcgugaucaccaucgagcugagcaacaucaaggagaacaagugcaacggcaccgacgccaaggugaagcugaucaagcaggagcuggacaaguacaagaacgccgugaccgaccugcagcugcugaugcagagcacccccgccaccggcagcggcagcgccaucugcagcggcguggccgugugcaaggugcugcaccuggagggcgaggugaacaagaucaagagcgcccugcugagcaccaacaaggccguggugagccugagcaacggcgugagcgugcugaccuucaaggugcuggaccugaagaacuacaucgacaagcagcugcugcccauccugaacaagcagagcugcagcauccccaacaucgagaccgugaucgaguuccagcagaagaacaacagacugcuggagaucaccagagaguucagcgugaacgccggcgugaccacccccgugagcaccuacaugcugaccaacagcgagcugcugagccugaucaacgacaugcccaucaccaacgaccagaagaagcugaugagcaacaacgugcagaucgugagacagcagagcuacagcaucaugugcaucaucaaggaggaggugcuggccuacguggugcagcugccccuguacggcgugaucgacacccccugcuggaagcugcacaccagcccccugugcaccaccaacaccaaggagggcagcaacaucugccugaccagaaccgacagaggcugguacugcgacaacgccggcagcgugagcuucuucccccaggccgagaccugcaaggugcagagcaacagaguguucugcgacaccaugaacagccugacccugcccagcgaggugaaccugugcaacguggacaucuucaaccccaaguacgacugcaagaucaugaccagcaagaccgacgugagcagcagcgugaucaccagccugggcgccaucgugagcugcuacggcaagaccaagugcaccgccagcaacaagaacagaggcaucaucaagaccuucagcaacggcugcgacuacgugagcaacaagggcguggacaccgugagcgugggcaacacccuguacugcgugaacaagcaggagggccagagccuguacgugaagggcgagcccaucaucaacuucuacgacccccugguguuccccagcgacgaguucgacgccagcaucagccaggugaacgagaagaucaaccagagccuggccuucaucagaaagagcgacgagcugcugcacaacgugaacgccggcaagagcaccaccaacaucaugaucaccaccaucaucaucgugaucaucgugauccugcugagccugaucgccgugggccugcugcuguacugcaaggccagaagcacccccgugacccugagcaaggaccagcugagcggcaucaacaacaucgccuucagcaacugaggacuagugaagggaacacccaaauuuaauucagccuuaagcacaauuaauuaagagugaaacguaauuguacaagcaguuggucacccaccauagggcaugaucaacaccgcaaccuuuccuuuuucccccagugauucugaaaaaccccucuucccuucagcuugcuuagauguuccaaauuuaguaagcuuaaggcggccuacagaagaaaaagaaaaaaaaggccacaaaaguucccucucacuuucaguaaauaaaauaaaagcagcaacagaaauaaagaaauaaaugaaauucaaaaugaaauaaauauuguguugugcagcauuaaaaaaucaauaaaaauuaaaaaugagcaagaucuaaaaaaaaaaaaaaaaaaaaaaaaaaaaaaaaaaaaaaaaaaaaaaaaaaaaaaaaaaaaaaaaugcaucccccccccccccccccccccccccccccccaaaggcucuuuucagagccaccagaauu

SEQ ID NO: 2652 - RNA, 2199 nt, Artificial Sequence
  mRNA product Design g-3 comprising derived and/or modified sequence from HRSV(A2)__F_DSCav1_mut2 (opt5)
gggagaguccgcucagccagguugcagaagcggcuuagcguguguccuaaucuucucucugcguguagguaggccugugccgcaaacaagcuuaccauggagcugcucauccugaaggccaacgcuauuaccacaauccuuacggccgugaccuucugcuuugcgagcggccagaauauuacagaagaguucuaccaauccaccuguucugcugucagcaaaggguaucugggagcccucagaacaggcugguacaccuccguuaucacaauugaacugucuaacaucaaggagaauaaaugcaacgggaccgacgccaaggugaaacuuaucaagcaggaacuggauaaguauaaaaaugcugugacggaccuccagcugcugaugcagagcacccccgccacaggauccggcucugcuauuuguagcggggucgccgugugcaagguucuccaccuggagggagaggugaacaaaaucaaguccgcgcuucugagcaccaauaaagccgucgugucucucuccaacggcguuagcgugcugacauuuaagguccuugaucugaagaauuacauugacaaacaacuccugccuauccugaacaagcagucuuguuccauuccgaauaucgaaaccgugauugaguuccagcagaaaaacaaucggcuccuggaaaucacgcgcgaguuuagcgugaacgcuggcgucacaacccccguuucuacauauaugcuuaccaauuccgagcugcucagccugaucaacgauaugccuauuaccaacgaccaaaagaaacuuauguccaauaacgugcagaucgugagacagcagucuuacagcauuaugugcaucauuaaggaagagguccuggccuaugugguucaacucccccuguacggggugaucgauacaccuuguuggaaacugcauacgagcccccucugcaccacaaauaccaaggaaggauccaacaucugucugacacggaccgaccgcggcugguacugcgauaaugcugggucugucuccuucuuuccucaggccgagacguguaaggugcagagcaacagaguuuucugcgacacaaugaacucucuuacccugccgagcgaagugaaucucugcaaugucgauauuuuuaaccccaaauaugacuguaagaucaugaccuccaaaacagaugugucuagcuccgucauuaccagccugggagcgaucgugucuugcuacggcaagacaaaauguacggccuccaauaagaaccgggggauuaucaagaccuucagcaauggaugcgacuauguuucuaacaaaggcguggacacagucuccgugggcaauacccuuuacuguguuaacaagcaagaggggcagagccuguaugugaaaggagagccuaucauuaacuuuuacgauccccucgucuucccuuccgacgaauuugaugcuucuaucagccaggugaaugagaagauuaaccagucccuggccuucauccgcaaaucugacgaacugcuccacaaugugaacgcuggcaagagcacaaccaauauuaugaucacgaccauuaucaucguuauuaucgucauucugcuuucccugaucgccguggggcuccugcuguauugcaaggccagaagcacacccgugacccuuucuaaagaucaacucuccggaauuaacaauaucgcuuucagcaacugaggacuagugaagggaacacccaaauuuaauucagccuuaagcacaauuaauuaagagugaaacguaauuguacaagcaguuggucacccaccauagggcaugaucaacaccgcaaccuuuccuuuuucccccagugauucugaaaaaccccucuucccuucagcuugcuuagauguuccaaauuuaguaagcuuaaggcggccuacagaagaaaaagaaaaaaaaggccacaaaaguucccucucacuuucaguaaauaaaauaaaagcagcaacagaaauaaagaaauaaaugaaauucaaaaugaaauaaauauuguguugugcagcauuaaaaaaucaauaaaaauuaaaaaugagcaagaucuaaaaaaaaaaaaaaaaaaaaaaaaaaaaaaaaaaaaaaaaaaaaaaaaaaaaaaaaaaaaaaaaugcaucccccccccccccccccccccccccccccccaaaggcucuuuucagagccaccagaauu

SEQ ID NO: 2653 - RNA, 2199 nt, Artificial Sequence
  mRNA product Design g-3 comprising derived and/or modified sequence from HRSV(A2)__F_DSCav1_mut2 (opt6)
gggagaguccgcucagccagguugcagaagcggcuuagcguguguccuaaucuucucucugcguguagguaggccugugccgcaaacaagcuuaccauggaacuacuaauccuaaaagcaaacgcaauuacaacuauacuuaccgccguaacauuuugcuucgcaucugggcaaaacauuaccgaagaauuuuaucaaucaacaugcucagcagucuccaaaggauaccuuggagcauuaagaaccggcugguauaccuccguaauaacaauugaacuaucuaauauaaaagaaaauaaauguaauggaacugacgcaaaaguuaaacuaauaaaacaagaacucgacaaauacaaaaacgccgucacagaccuacaacuacuaaugcaaucaacccccgcaacaggaucaggauccgcaaucugcagcggcgucgcaguuugcaaaguccuacauuuagaaggagaaguaaacaaaauaaaaucugcucuccucucuacaaacaaagcaguagugucacuuucaaacggaguaucaguucuaacauucaaaguacuagaccuaaaaaauuacauagacaaacaacuacuuccaauucuaaacaaacaauccuguuccauacccaacauagaaacaguaauagaauuucaacaaaaaaauaacagacuccuagaaauuacaagagaauuuuccgucaaugcaggaguaacaaccccaguaucaaccuacauguuaacuaacucagaacucuuaucacuaauaaacgacaugccaaucacuaaugaccaaaaaaaacucaugucaaauaacguacaaauaguccgacaacaaucauacuccaucaugugcauuauaaaagaagaaguacuagcauacgucguccaauuaccacuauacggcgucauagacacaccauguuggaaacuccacacaucaccacuaugcacuacaaauacaaaagaaggcuccaacaucugccuaacaagaacagacagagguugguauugcgacaacgcaggaucaguaucauuuuucccccaagcagaaacauguaaaguacaaucaaauagagucuucugcgacaccaugaacucauuaacacuaccuucagaagucaaccuaugcaacguagacaucuucaacccuaaauaugacugcaaaaucaugaccagcaaaaccgacguuucaucuuccguaauaacaucacuaggcgcaauagucucauguuacggcaaaacaaaauguacagcaucaaauaaaaaccguggaauaauaaaaacauuuucuaaugguugugacuacguaagcaauaaaggaguagauacaguaucagucggcaacaccuuauacuguguaaacaaacaagaaggccaaaguuuauacgucaaaggagaacccaucaucaacuucuacgacccauuaguauucccaucagacgaauuugaugcaagcauuucacaagucaacgaaaaaaucaaucaaucauuagcauucauccgaaaaucagacgaauuauuacacaacguaaacgccggaaaaucaaccacuaauauaaugauaaccacaauaaucaucguaauaauaguaauacuucucucacuaaucgcagucggacuccuucuauacugcaaagcaagaucuacaccaguaacacuauccaaagaucaacuaaguggcauaaacaacauagcauuuucuaacuaaggacuagugaagggaacacccaaauuuaauucagccuuaagcacaauuaauuaagagugaaacguaauuguacaagcaguuggucacccaccauagggcaugaucaacaccgcaaccuuuccuuuuucccccagugauucugaaaaaccccucuucccuucagcuugcuuagauguuccaaauuuaguaagcuuaaggcggccuacagaagaaaaagaaaaaaaaggccacaaaaguucccucucacuuucaguaaauaaaauaaaagcagcaacagaaauaaagaaauaaaugaaauucaaaaugaaauaaauauuguguugugcagcauuaaaaaaucaauaaaaauuaaaaaugagcaagaucuaaaaaaaaaaaaaaaaaaaaaaaaaaaaaaaaaaaaaaaaaaaaaaaaaaaaaaaaaaaaaaaaugcaucccccccccccccccccccccccccccccccaaaggcucuuuucagagccaccagaauu

SEQ ID NO: 2654 - RNA, 2199 nt, Artificial Sequence
  mRNA product Design g-3 comprising derived and/or modified sequence from HRSV(A2)__F_DSCav1_mut2 (opt11)
gggagaguccgcucagccagguugcagaagcggcuuagcguguguccuaaucuucucucugcguguagguaggccugugccgcaaacaagcuuaccauggaacuccucauccuaaaagccaacgcgaucaccacaauccugacagccgucaccuucugcuucgccuccggccaaaacaucaccgaagaguucuaccaauccacaugcuccgccgucuccaagggcuaccugggcgcacuucguacaggcugguacaccuccguaauaaccaucgaacucuccaacaucaaagaaaacaaaugcaacggcacagacgcaaaagucaaacucaucaagcaagaacuugacaaauacaaaaaugcagucaccgaccuucaacuccucaugcaaucuacccccgccacaggcuccggcuccgcuaucugcuccggcgucgccgucugcaaaguccuccaccucgaaggugaaguaaacaaaauaaaauccgcccuccucuccaccaacaaagccgucgucucccuaucaaacggcgucuccgugcucaccuucaagguucucgaccugaaaaacuacauagacaaacagcuccuaccaauccuuaacaaacagagcugcuccauuccgaauaucgaaacgguaaucgaauuucaacagaaaaacaaccgccuccucgaaauaacgcgagaguucuccguaaacgcuggcgucaccacacccgucagcaccuacaugcuaacgaacuccgaacucuugucgcucaucaacgacaugcccauaaccaacgaccaaaagaaacuaauguccaauaacguacaaaucguacgccaacaaucuuacuccaucaugugcaucauaaaagaagaaguacuagcuuacgucguccaacucccacuguacggagucaucgacacccccugcuggaaacuccacaccucuccccucugcaccaccaacaccaaagagggcuccaacauuugccugacacgcaccgaccgcggcugguacugcgacaacgcaggcuccgucucguucuucccccaagccgaaaccugcaaaguccaauccaaccgcgucuucugcgacaccaugaacucccucacccuccccuccgaagucaaucuaugcaacguagacaucuucaacccgaaauaugacugcaaaauuaugacaucuaaaaccgacguguccuccucagucaucacuucccuaggagccaucguuuccuguuacggcaagaccaaaugcaccgccagcaacaaaaaccgaggcaucaucaaaaccuucuccaacggaugugacuaugucuccaacaagggcgucgacaccgucagcgucggcaacacccucuacugcgucaacaaacaagaaggccaaucccucuacgucaaaggagagcccauaaucaacuucuacgacccccucgucuucccauccgacgaguucgacgccucaaucucccaagucaacgagaaaaucaaccaauccuuagccuucauccguaaguccgacgaacuccuucacaacgucaacgccgguaaaucuaccaccaacaucaugauaacaacaauaauuaucgucaucaucgucauccuccuuucccucaucgcggucgggcuauugcucuacugcaaagcccgguccaccccaguaacccucucuaaagaccaacucagcggaaucaauaacauagccuucagcaauuaaggacuagugaagggaacacccaaauuuaauucagccuuaagcacaauuaauuaagagugaaacguaauuguacaagcaguuggucacccaccauagggcaugaucaacaccgcaaccuuuccuuuuucccccagugauucugaaaaaccccucuucccuucagcuugcuuagauguuccaaauuuaguaagcuuaaggcggccuacagaagaaaaagaaaaaaaaggccacaaaaguucccucucacuuucaguaaauaaaauaaaagcagcaacagaaauaaagaaauaaaugaaauucaaaaugaaauaaauauuguguugugcagcauuaaaaaaucaauaaaaauuaaaaaugagcaagaucuaaaaaaaaaaaaaaaaaaaaaaaaaaaaaaaaaaaaaaaaaaaaaaaaaaaaaaaaaaaaaaaaugcaucccccccccccccccccccccccccccccccaaaggcucuuuucagagccaccagaauu

SEQ ID NO: 2655 - RNA, 1994 nt, Artificial Sequence
  mRNA product Design g-4 comprising derived and/or modified sequence from HRSV(A2)__F_DSCav1_mut2 (opt1)
gggagacuccugucgggcggaaguaggaggaguagaguuuaaaaacaguacucuuuuuccgguucgggacguaguugaagcaacgacaagccggauaaccgcucuugagacaggaagcuuaccauggagcugcucauccugaaggccaacgccaucaccaccauccugacggcggugaccuucugcuucgccagcggccagaacaucaccgaggaguucuaccaguccacgugcagcgccgucuccaagggguaccucggcgcccugcggaccggcugguacaccuccgugaucaccaucgagcugagcaacaucaaggagaacaagugcaacgggaccgacgccaaggugaagcucaucaagcaggagcuggacaaguacaagaacgcggucacggaccugcagcuccugaugcaguccaccccggcaaccggcuccggcuccgccaucugcagcggcgucgccgugugcaaggugcugcaccucgagggggaggucaacaagaucaagagcgcccugcuguccaccaacaaggccguggugagccucuccaacggcgucagcgugcugaccuucaaggugcuggaccucaagaacuacaucgacaagcagcugcugcccauccugaacaagcagagcugcuccauccccaacaucgagacggugaucgaguuccagcagaagaacaaccggcuccuggagaucacccgcgaguucagcgugaacgccggggucaccacccccguguccacguacaugcugaccaacagcgagcuccugucccugaucaacgacaugccgaucaccaacgaccagaagaagcucaugagcaacaacgugcagaucguccggcagcaguccuacagcaucaugugcaucaucaaggaggaggugcuggcguacgugguccagcugccccucuacggcgugaucgacacccccugcuggaagcugcacacgagcccccugugcaccaccaacaccaaggagggguccaacaucugccucacgcgcaccgaccggggcugguacugcgacaacgccggcagcgucuccuucuucccgcaggccgagaccugcaaggugcagagcaaccgcguguucugcgacaccaugaacucccugacgcugcccagcgagguaaaccucugcaacgucgacaucuucaaccccaaguacgacugcaagaucaugaccuccaagaccgacgugagcuccagcgugaucaccucccugggggccaucgucagcugcuacggcaagacgaagugcaccgccagcaacaagaaccgggggaucaucaagaccuucuccaacggcugcgacuacgugagcaacaagggcguggacaccguguccgucgggaacacccuguacugcgugaacaagcaggagggccagagccucuacgugaagggggagcccaucaucaacuucuacgacccgcuggucuuccccuccgacgaguucgacgcgagcaucucccaggugaacgagaagaucaaccagagccuggccuucauccgcaaguccgacgagcugcuccacaacgugaacgccggcaagagcacgaccaacaucaugaucaccaccaucaucaucgucaucaucgugauccugcugucccucaucgccguggggcugcugcucuacugcaaggcccggagcacgcccgucacccuguccaaggaccagcugagcggcaucaacaacaucgcguucuccaacugaggacuaguaauaaggaaacuguaugaaugucugugggcaggaagugaagagauccuucuguaaagguuuuuggaauuaugucugcugaauaauaaacuuuuuugaaauaauaaaucugguagaaaaaugagaucuaaaaaaaaaaaaaaaaaaaaaaaaaaaaaaaaaaaaaaaaaaaaaaaaaaaaaaaaaaaaaaaaugcaucccccccccccccccccccccccccccccccaaaggcucuuuucagagccaccagaauu

SEQ ID NO: 2656 - RNA, 1994 nt, Artificial Sequence
  mRNA product Design g-4 comprising derived and/or modified sequence from HRSV(A2)__F_DSCav1_mut2 (opt1)
gggagacuccugucgggcggaaguaggaggaguagaguuuaaaaacaguacucuuuuuccgguucgggacguaguugaagcaacgacaagccggauaaccgcucuugagacaggaagcuuaccauggagcugcucauccugaaggccaacgccaucaccaccauccugacggcggugaccuucugcuucgccagcggccagaacaucaccgaggaguucuaccaguccacgugcagcgccgucuccaagggguaccucggcgcccugcgcaccgggugguacaccagcgugaucaccaucgagcuguccaacaucaaggagaacaagugcaacggcaccgacgccaaggugaagcucaucaagcaggagcuggacaaguacaagaacgcggucacggaccugcagcuccugaugcagagcacccccgccaccggguccggcagcgccaucugcuccggcguggccgugugcaagguccugcaccucgagggggaggugaacaagaucaagagcgcgcugcuguccaccaacaaggccguggucagccucuccaacggcgugagcgugcugacguucaagguccuggaccucaagaacuacaucgacaagcagcugcugccgauccucaacaagcaguccugcagcauccccaacaucgagaccgugaucgaguuccagcagaagaacaaccggcugcuggagaucacccgcgaguucuccgugaacgccggggucaccacgcccgugagcaccuacaugcucaccaacuccgagcugcugagccucaucaacgacaugcccaucaccaacgaccagaagaagcugaugagcaacaacgugcagaucguccggcagcaguccuacagcaucaugugcaucaucaaggaggaggugcuggccuacgugguccagcucccgcuguacggcgugaucgacacgcccugcuggaagcugcacaccagcccccucugcaccaccaacacgaaggagggguccaacaucugccugacccgcaccgaccggggcugguacugcgacaacgccggcuccgugagcuucuucccccaggcggagaccugcaagguccaguccaaccgcguguucugcgacacgaugaacagccugacccucccguccgaggucaaccugugcaacguggacaucuucaaccccaaguacgacugcaagaucaugaccagcaagaccgacguguccagcuccgucaucacgagccugggggccaucguguccugcuacggcaagaccaagugcaccgccagcaacaagaaccgggggaucaucaagaccuucuccaacggcugcgacuacgugagcaacaagggcgucgacacgguguccguggggaacacccucuacugcgucaacaagcaggagggccagagccuguacgugaagggggagcccaucaucaacuucuacgacccccugguguucccgagcgacgaguucgacgccuccaucagccaggucaacgagaagaucaaccagucccucgccuucauccgcaagagcgacgagcugcugcacaacgugaacgcgggcaaguccaccaccaacaucaugaucaccacgaucaucaucgugaucaucgucauccuccugagccugaucgccguggggcuccugcuguacugcaaggcccgguccacccccgugacccugagcaaggaccagcucuccggcaucaacaacaucgccuucagcaacugaggacuaguaauaaggaaacuguaugaaugucugugggcaggaagugaagagauccuucuguaaagguuuuuggaauuaugucugcugaauaauaaacuuuuuugaaauaauaaaucugguagaaaaaugagaucuaaaaaaaaaaaaaaaaaaaaaaaaaaaaaaaaaaaaaaaaaaaaaaaaaaaaaaaaaaaaaaaaugcaucccccccccccccccccccccccccccccccaaaggcucuuuucagagccaccagaauu

SEQ ID NO: 2657 - RNA, 1994 nt, Artificial Sequence
  mRNA product Design g-4 comprising derived and/or modified sequence from HRSV(A2)__F_DSCav1_mut2 (opt2)
gggagacuccugucgggcggaaguaggaggaguagaguuuaaaaacaguacucuuuuuccgguucgggacguaguugaagcaacgacaagccggauaaccgcucuugagacaggaagcuuaccauggagcuccucauccucaaggccaacgccaucaccaccauccucaccgccgucaccuucugcuucgccuccggccagaacaucaccgaggaguucuaccaguccaccugcuccgccgucuccaagggcuaccucggcgcccuccgcaccggcugguacaccuccgucaucaccaucgagcucuccaacaucaaggagaacaagugcaacggcaccgacgccaaggucaagcucaucaagcaggagcucgacaaguacaagaacgccgucaccgaccuccagcuccucaugcaguccacccccgccaccggcuccggcuccgccaucugcuccggcgucgccgucugcaagguccuccaccucgagggcgaggucaacaagaucaaguccgcccuccucuccaccaacaaggccgucgucucccucuccaacggcgucuccguccucaccuucaagguccucgaccucaagaacuacaucgacaagcagcuccuccccauccucaacaagcaguccugcuccauccccaacaucgagaccgucaucgaguuccagcagaagaacaaccgccuccucgagaucacccgcgaguucuccgucaacgccggcgucaccacccccgucuccaccuacaugcucaccaacuccgagcuccucucccucaucaacgacaugcccaucaccaacgaccagaagaagcucauguccaacaacguccagaucguccgccagcaguccuacuccaucaugugcaucaucaaggaggagguccucgccuacgucguccagcucccccucuacggcgucaucgacacccccugcuggaagcuccacaccuccccccucugcaccaccaacaccaaggagggcuccaacaucugccucacccgcaccgaccgcggcugguacugcgacaacgccggcuccgucuccuucuucccccaggccgagaccugcaagguccaguccaaccgcgucuucugcgacaccaugaacucccucacccuccccuccgaggucaaccucugcaacgucgacaucuucaaccccaaguacgacugcaagaucaugaccuccaagaccgacgucuccuccuccgucaucaccucccucggcgccaucgucuccugcuacggcaagaccaagugcaccgccuccaacaagaaccgcggcaucaucaagaccuucuccaacggcugcgacuacgucuccaacaagggcgucgacaccgucuccgucggcaacacccucuacugcgucaacaagcaggagggccagucccucuacgucaagggcgagcccaucaucaacuucuacgacccccucgucuuccccuccgacgaguucgacgccuccaucucccaggucaacgagaagaucaaccagucccucgccuucauccgcaaguccgacgagcuccuccacaacgucaacgccggcaaguccaccaccaacaucaugaucaccaccaucaucaucgucaucaucgucauccuccucucccucaucgccgucggccuccuccucuacugcaaggcccgcuccacccccgucacccucuccaaggaccagcucuccggcaucaacaacaucgccuucuccaacugaggacuaguaauaaggaaacuguaugaaugucugugggcaggaagugaagagauccuucuguaaagguuuuuggaauuaugucugcugaauaauaaacuuuuuugaaauaauaaaucugguagaaaaaugagaucuaaaaaaaaaaaaaaaaaaaaaaaaaaaaaaaaaaaaaaaaaaaaaaaaaaaaaaaaaaaaaaaaugcaucccccccccccccccccccccccccccccccaaaggcucuuuucagagccaccagaauu

SEQ ID NO: 2658 - RNA, 1994 nt, Artificial Sequence
  mRNA product Design g-4 comprising derived and/or modified sequence from HRSV(A2)__F_DSCav1_mut2 (opt3)
gggagacuccugucgggcggaaguaggaggaguagaguuuaaaaacaguacucuuuuuccgguucgggacguaguugaagcaacgacaagccggauaaccgcucuugagacaggaagcuuaccauggagcugcucauccuuaaggccaacgcuauuaccacaauacugacugcagugacguucugcuuugccagcggccagaauaucaccgaagaguucuaccaauccacauguucugcggucucaaaaggguauuugggagcuuuaagaacugguugguacaccaguguuauuacaaucgaacugagcaacauuaaggagaauaaaugcaacggcaccgacgccaaggugaaacuaaucaagcaggaacucgauaaguauaaaaaugcaguaacugaccugcagcuucugaugcaguccacacccgccaccgggucuggaucggcuauauguucaggcguggcagucugcaagguguugcaccucgagggugagguuaacaaaaucaagagcgcccugcugaguacgaauaaagcuguggucucccucucuaacggggugagcguauuaacuuuuaagguucuggaucuuaagaauuacauugacaaacaauugcugccuauccuaaacaagcaguccuguucaauuccaaauaucgaaaccgugauagaguuccagcagaaaaacaauaggcuccuggaaauuacacgggaguuuagugucaacgccggagugacuaccccggugagcacauauaugcuuaccaauucugagcuguugucccucaucaacgauaugcccauuacgaacgaccaaaagaaacugaugucaaauaacguccagaucguucgccagcagagcuacaguaucaugugcauuauaaaggaagagguguuagcguauguagugcaacugccucucuacggcgucaucgauacuccauguuggaaacuucauacaucuccccugugcaccacuaauacaaaggaaggcuccaacauuuguuugacccgaacggaccgugggugguacugcgauaaugcaggaagcgugucguucuuuccucaggccgagaccuguaagguucagucuaacagaguguucugcgacacaaugaacucccuaacucugccaucagaagucaaucucugcaauguggauaucuuuaaccccaaauaugacuguaagauaaugaccaguaaaacagauguaagcuccucuguuauuacuagccugggugcuaucgugucaugcuacggcaagaccaaauguacagccaguaauaagaacagggggaucauuaagaccuucuccaauggaugcgacuaugucagcaacaaaggcguggacacugucucuguggguaauacgcuuuacuguguuaacaagcaagaggggcagucacuguaugugaaaggagagccuaucauuaacuuuuacgauccauugguauucccgagugacgaauuugaugcaagcauaucccaggucaaugagaagaucaaccagucucucgcuuucauucggaaaucggacgaacuguuacacaaugugaacgccggcaagagcacaaccaauaucaugaucacuaccauuauaaucguuauuaucgugauucugcuaucccucaucgcggucggccugcuuuuguauugcaaggcccgcucaacacccgugacccugaguaaagaucaacucucugggauaaacaauaucgcauucagcaacugaggacuaguaauaaggaaacuguaugaaugucugugggcaggaagugaagagauccuucuguaaagguuuuuggaauuaugucugcugaauaauaaacuuuuuugaaauaauaaaucugguagaaaaaugagaucuaaaaaaaaaaaaaaaaaaaaaaaaaaaaaaaaaaaaaaaaaaaaaaaaaaaaaaaaaaaaaaaaugcaucccccccccccccccccccccccccccccccaaaggcucuuuucagagccaccagaauu

SEQ ID NO: 2659 - RNA, 1994 nt, Artificial Sequence
  mRNA product Design g-4 comprising derived and/or modified sequence from HRSV(A2)__F_DSCav1_mut2 (opt4)
gggagacuccugucgggcggaaguaggaggaguagaguuuaaaaacaguacucuuuuuccgguucgggacguaguugaagcaacgacaagccggauaaccgcucuugagacaggaagcuuaccauggagcugcugauccugaaggccaacgccaucaccaccauccugaccgccgugaccuucugcuucgccagcggccagaacaucaccgaggaguucuaccagagcaccugcagcgccgugagcaagggcuaccugggcgcccugagaaccggcugguacaccagcgugaucaccaucgagcugagcaacaucaaggagaacaagugcaacggcaccgacgccaaggugaagcugaucaagcaggagcuggacaaguacaagaacgccgugaccgaccugcagcugcugaugcagagcacccccgccaccggcagcggcagcgccaucugcagcggcguggccgugugcaaggugcugcaccuggagggcgaggugaacaagaucaagagcgcccugcugagcaccaacaaggccguggugagccugagcaacggcgugagcgugcugaccuucaaggugcuggaccugaagaacuacaucgacaagcagcugcugcccauccugaacaagcagagcugcagcauccccaacaucgagaccgugaucgaguuccagcagaagaacaacagacugcuggagaucaccagagaguucagcgugaacgccggcgugaccacccccgugagcaccuacaugcugaccaacagcgagcugcugagccugaucaacgacaugcccaucaccaacgaccagaagaagcugaugagcaacaacgugcagaucgugagacagcagagcuacagcaucaugugcaucaucaaggaggaggugcuggccuacguggugcagcugccccuguacggcgugaucgacacccccugcuggaagcugcacaccagcccccugugcaccaccaacaccaaggagggcagcaacaucugccugaccagaaccgacagaggcugguacugcgacaacgccggcagcgugagcuucuucccccaggccgagaccugcaaggugcagagcaacagaguguucugcgacaccaugaacagccugacccugcccagcgaggugaaccugugcaacguggacaucuucaaccccaaguacgacugcaagaucaugaccagcaagaccgacgugagcagcagcgugaucaccagccugggcgccaucgugagcugcuacggcaagaccaagugcaccgccagcaacaagaacagaggcaucaucaagaccuucagcaacggcugcgacuacgugagcaacaagggcguggacaccgugagcgugggcaacacccuguacugcgugaacaagcaggagggccagagccuguacgugaagggcgagcccaucaucaacuucuacgacccccugguguuccccagcgacgaguucgacgccagcaucagccaggugaacgagaagaucaaccagagccuggccuucaucagaaagagcgacgagcugcugcacaacgugaacgccggcaagagcaccaccaacaucaugaucaccaccaucaucaucgugaucaucgugauccugcugagccugaucgccgugggccugcugcuguacugcaaggccagaagcacccccgugacccugagcaaggaccagcugagcggcaucaacaacaucgccuucagcaacugaggacuaguaauaaggaaacuguaugaaugucugugggcaggaagugaagagauccuucuguaaagguuuuuggaauuaugucugcugaauaauaaacuuuuuugaaauaauaaaucugguagaaaaaugagaucuaaaaaaaaaaaaaaaaaaaaaaaaaaaaaaaaaaaaaaaaaaaaaaaaaaaaaaaaaaaaaaaaugcaucccccccccccccccccccccccccccccccaaaggcucuuuucagagccaccagaauu

SEQ ID NO: 2660 - RNA, 1994 nt, Artificial Sequence
  mRNA product Design g-4 comprising derived and/or modified sequence from HRSV(A2)__F_DSCav1_mut2 (opt5)
gggagacuccugucgggcggaaguaggaggaguagaguuuaaaaacaguacucuuuuuccgguucgggacguaguugaagcaacgacaagccggauaaccgcucuugagacaggaagcuuaccauggagcugcucauccugaaggccaacgcuauuaccacaauccuuacggccgugaccuucugcuuugcgagcggccagaauauuacagaagaguucuaccaauccaccuguucugcugucagcaaaggguaucugggagcccucagaacaggcugguacaccuccguuaucacaauugaacugucuaacaucaaggagaauaaaugcaacgggaccgacgccaaggugaaacuuaucaagcaggaacuggauaaguauaaaaaugcugugacggaccuccagcugcugaugcagagcacccccgccacaggauccggcucugcuauuuguagcggggucgccgugugcaagguucuccaccuggagggagaggugaacaaaaucaaguccgcgcuucugagcaccaauaaagccgucgugucucucuccaacggcguuagcgugcugacauuuaagguccuugaucugaagaauuacauugacaaacaacuccugccuauccugaacaagcagucuuguuccauuccgaauaucgaaaccgugauugaguuccagcagaaaaacaaucggcuccuggaaaucacgcgcgaguuuagcgugaacgcuggcgucacaacccccguuucuacauauaugcuuaccaauuccgagcugcucagccugaucaacgauaugccuauuaccaacgaccaaaagaaacuuauguccaauaacgugcagaucgugagacagcagucuuacagcauuaugugcaucauuaaggaagagguccuggccuaugugguucaacucccccuguacggggugaucgauacaccuuguuggaaacugcauacgagcccccucugcaccacaaauaccaaggaaggauccaacaucugucugacacggaccgaccgcggcugguacugcgauaaugcugggucugucuccuucuuuccucaggccgagacguguaaggugcagagcaacagaguuuucugcgacacaaugaacucucuuacccugccgagcgaagugaaucucugcaaugucgauauuuuuaaccccaaauaugacuguaagaucaugaccuccaaaacagaugugucuagcuccgucauuaccagccugggagcgaucgugucuugcuacggcaagacaaaauguacggccuccaauaagaaccgggggauuaucaagaccuucagcaauggaugcgacuauguuucuaacaaaggcguggacacagucuccgugggcaauacccuuuacuguguuaacaagcaagaggggcagagccuguaugugaaaggagagccuaucauuaacuuuuacgauccccucgucuucccuuccgacgaauuugaugcuucuaucagccaggugaaugagaagauuaaccagucccuggccuucauccgcaaaucugacgaacugcuccacaaugugaacgcuggcaagagcacaaccaauauuaugaucacgaccauuaucaucguuauuaucgucauucugcuuucccugaucgccguggggcuccugcuguauugcaaggccagaagcacacccgugacccuuucuaaagaucaacucuccggaauuaacaauaucgcuuucagcaacugaggacuaguaauaaggaaacuguaugaaugucugugggcaggaagugaagagauccuucuguaaagguuuuuggaauuaugucugcugaauaauaaacuuuuuugaaauaauaaaucugguagaaaaaugagaucuaaaaaaaaaaaaaaaaaaaaaaaaaaaaaaaaaaaaaaaaaaaaaaaaaaaaaaaaaaaaaaaaugcaucccccccccccccccccccccccccccccccaaaggcucuuuucagagccaccagaauu

SEQ ID NO: 2661 - RNA, 1994 nt, Artificial Sequence
  mRNA product Design g-4 comprising derived and/or modified sequence from HRSV(A2)__F_DSCav1_mut2 (opt6)
gggagacuccugucgggcggaaguaggaggaguagaguuuaaaaacaguacucuuuuuccgguucgggacguaguugaagcaacgacaagccggauaaccgcucuugagacaggaagcuuaccauggaacuacuaauccuaaaagcaaacgcaauuacaacuauacuuaccgccguaacauuuugcuucgcaucugggcaaaacauuaccgaagaauuuuaucaaucaacaugcucagcagucuccaaaggauaccuuggagcauuaagaaccggcugguauaccuccguaauaacaauugaacuaucuaauauaaaagaaaauaaauguaauggaacugacgcaaaaguuaaacuaauaaaacaagaacucgacaaauacaaaaacgccgucacagaccuacaacuacuaaugcaaucaacccccgcaacaggaucaggauccgcaaucugcagcggcgucgcaguuugcaaaguccuacauuuagaaggagaaguaaacaaaauaaaaucugcucuccucucuacaaacaaagcaguagugucacuuucaaacggaguaucaguucuaacauucaaaguacuagaccuaaaaaauuacauagacaaacaacuacuuccaauucuaaacaaacaauccuguuccauacccaacauagaaacaguaauagaauuucaacaaaaaaauaacagacuccuagaaauuacaagagaauuuuccgucaaugcaggaguaacaaccccaguaucaaccuacauguuaacuaacucagaacucuuaucacuaauaaacgacaugccaaucacuaaugaccaaaaaaaacucaugucaaauaacguacaaauaguccgacaacaaucauacuccaucaugugcauuauaaaagaagaaguacuagcauacgucguccaauuaccacuauacggcgucauagacacaccauguuggaaacuccacacaucaccacuaugcacuacaaauacaaaagaaggcuccaacaucugccuaacaagaacagacagagguugguauugcgacaacgcaggaucaguaucauuuuucccccaagcagaaacauguaaaguacaaucaaauagagucuucugcgacaccaugaacucauuaacacuaccuucagaagucaaccuaugcaacguagacaucuucaacccuaaauaugacugcaaaaucaugaccagcaaaaccgacguuucaucuuccguaauaacaucacuaggcgcaauagucucauguuacggcaaaacaaaauguacagcaucaaauaaaaaccguggaauaauaaaaacauuuucuaaugguugugacuacguaagcaauaaaggaguagauacaguaucagucggcaacaccuuauacuguguaaacaaacaagaaggccaaaguuuauacgucaaaggagaacccaucaucaacuucuacgacccauuaguauucccaucagacgaauuugaugcaagcauuucacaagucaacgaaaaaaucaaucaaucauuagcauucauccgaaaaucagacgaauuauuacacaacguaaacgccggaaaaucaaccacuaauauaaugauaaccacaauaaucaucguaauaauaguaauacuucucucacuaaucgcagucggacuccuucuauacugcaaagcaagaucuacaccaguaacacuauccaaagaucaacuaaguggcauaaacaacauagcauuuucuaacuaaggacuaguaauaaggaaacuguaugaaugucugugggcaggaagugaagagauccuucuguaaagguuuuuggaauuaugucugcugaauaauaaacuuuuuugaaauaauaaaucugguagaaaaaugagaucuaaaaaaaaaaaaaaaaaaaaaaaaaaaaaaaaaaaaaaaaaaaaaaaaaaaaaaaaaaaaaaaaugcaucccccccccccccccccccccccccccccccaaaggcucuuuucagagccaccagaauu

SEQ ID NO: 2662 - RNA, 1994 nt, Artificial Sequence
  mRNA product Design g-4 comprising derived and/or modified sequence from HRSV(A2)__F_DSCav1_mut2 (opt11)
gggagacuccugucgggcggaaguaggaggaguagaguuuaaaaacaguacucuuuuuccgguucgggacguaguugaagcaacgacaagccggauaaccgcucuugagacaggaagcuuaccauggaacuccucauccuaaaagccaacgcgaucaccacaauccugacagccgucaccuucugcuucgccuccggccaaaacaucaccgaagaguucuaccaauccacaugcuccgccgucuccaagggcuaccugggcgcacuucguacaggcugguacaccuccguaauaaccaucgaacucuccaacaucaaagaaaacaaaugcaacggcacagacgcaaaagucaaacucaucaagcaagaacuugacaaauacaaaaaugcagucaccgaccuucaacuccucaugcaaucuacccccgccacaggcuccggcuccgcuaucugcuccggcgucgccgucugcaaaguccuccaccucgaaggugaaguaaacaaaauaaaauccgcccuccucuccaccaacaaagccgucgucucccuaucaaacggcgucuccgugcucaccuucaagguucucgaccugaaaaacuacauagacaaacagcuccuaccaauccuuaacaaacagagcugcuccauuccgaauaucgaaacgguaaucgaauuucaacagaaaaacaaccgccuccucgaaauaacgcgagaguucuccguaaacgcuggcgucaccacacccgucagcaccuacaugcuaacgaacuccgaacucuugucgcucaucaacgacaugcccauaaccaacgaccaaaagaaacuaauguccaauaacguacaaaucguacgccaacaaucuuacuccaucaugugcaucauaaaagaagaaguacuagcuuacgucguccaacucccacuguacggagucaucgacacccccugcuggaaacuccacaccucuccccucugcaccaccaacaccaaagagggcuccaacauuugccugacacgcaccgaccgcggcugguacugcgacaacgcaggcuccgucucguucuucccccaagccgaaaccugcaaaguccaauccaaccgcgucuucugcgacaccaugaacucccucacccuccccuccgaagucaaucuaugcaacguagacaucuucaacccgaaauaugacugcaaaauuaugacaucuaaaaccgacguguccuccucagucaucacuucccuaggagccaucguuuccuguuacggcaagaccaaaugcaccgccagcaacaaaaaccgaggcaucaucaaaaccuucuccaacggaugugacuaugucuccaacaagggcgucgacaccgucagcgucggcaacacccucuacugcgucaacaaacaagaaggccaaucccucuacgucaaaggagagcccauaaucaacuucuacgacccccucgucuucccauccgacgaguucgacgccucaaucucccaagucaacgagaaaaucaaccaauccuuagccuucauccguaaguccgacgaacuccuucacaacgucaacgccgguaaaucuaccaccaacaucaugauaacaacaauaauuaucgucaucaucgucauccuccuuucccucaucgcggucgggcuauugcucuacugcaaagcccgguccaccccaguaacccucucuaaagaccaacucagcggaaucaauaacauagccuucagcaauuaaggacuaguaauaaggaaacuguaugaaugucugugggcaggaagugaagagauccuucuguaaagguuuuuggaauuaugucugcugaauaauaaacuuuuuugaaauaauaaaucugguagaaaaaugagaucuaaaaaaaaaaaaaaaaaaaaaaaaaaaaaaaaaaaaaaaaaaaaaaaaaaaaaaaaaaaaaaaaugcaucccccccccccccccccccccccccccccccaaaggcucuuuucagagccaccagaauu

SEQ ID NO: 2663 - RNA, 1970 nt, Artificial Sequence
  mRNA product Design g-5 comprising derived and/or modified sequence from HRSV(A2)__F_DSCav1_mut2 (opt1)
gggagacccgugacccggaaguuguacggcuacgcgacuuucccucccacaaacccucgcgcccuuccuuuccuacuugggcccggcagaaagcuuaccauggagcugcucauccugaaggccaacgccaucaccaccauccugacggcggugaccuucugcuucgccagcggccagaacaucaccgaggaguucuaccaguccacgugcagcgccgucuccaagggguaccucggcgcccugcggaccggcugguacaccuccgugaucaccaucgagcugagcaacaucaaggagaacaagugcaacgggaccgacgccaaggugaagcucaucaagcaggagcuggacaaguacaagaacgcggucacggaccugcagcuccugaugcaguccaccccggcaaccggcuccggcuccgccaucugcagcggcgucgccgugugcaaggugcugcaccucgagggggaggucaacaagaucaagagcgcccugcuguccaccaacaaggccguggugagccucuccaacggcgucagcgugcugaccuucaaggugcuggaccucaagaacuacaucgacaagcagcugcugcccauccugaacaagcagagcugcuccauccccaacaucgagacggugaucgaguuccagcagaagaacaaccggcuccuggagaucacccgcgaguucagcgugaacgccggggucaccacccccguguccacguacaugcugaccaacagcgagcuccugucccugaucaacgacaugccgaucaccaacgaccagaagaagcucaugagcaacaacgugcagaucguccggcagcaguccuacagcaucaugugcaucaucaaggaggaggugcuggcguacgugguccagcugccccucuacggcgugaucgacacccccugcuggaagcugcacacgagcccccugugcaccaccaacaccaaggagggguccaacaucugccucacgcgcaccgaccggggcugguacugcgacaacgccggcagcgucuccuucuucccgcaggccgagaccugcaaggugcagagcaaccgcguguucugcgacaccaugaacucccugacgcugcccagcgagguaaaccucugcaacgucgacaucuucaaccccaaguacgacugcaagaucaugaccuccaagaccgacgugagcuccagcgugaucaccucccugggggccaucgucagcugcuacggcaagacgaagugcaccgccagcaacaagaaccgggggaucaucaagaccuucuccaacggcugcgacuacgugagcaacaagggcguggacaccguguccgucgggaacacccuguacugcgugaacaagcaggagggccagagccucuacgugaagggggagcccaucaucaacuucuacgacccgcuggucuuccccuccgacgaguucgacgcgagcaucucccaggugaacgagaagaucaaccagagccuggccuucauccgcaaguccgacgagcugcuccacaacgugaacgccggcaagagcacgaccaacaucaugaucaccaccaucaucaucgucaucaucgugauccugcugucccucaucgccguggggcugcugcucuacugcaaggcccggagcacgcccgucacccuguccaaggaccagcugagcggcaucaacaacaucgcguucuccaacugaggacuaguaauaaggaaacuguaugaaugucugugggcaggaagugaagagauccuucuguaaagguuuuuggaauuaugucugcugaauaauaaacuuuuuugaaauaauaaaucugguagaaaaaugagaucuaaaaaaaaaaaaaaaaaaaaaaaaaaaaaaaaaaaaaaaaaaaaaaaaaaaaaaaaaaaaaaaaugcaucccccccccccccccccccccccccccccccaaaggcucuuuucagagccaccagaauu

SEQ ID NO: 2664 - RNA, 1970 nt, Artificial Sequence
  mRNA product Design g-5 comprising derived and/or modified sequence from HRSV(A2)__F_DSCav1_mut2 (opt1)
gggagacccgugacccggaaguuguacggcuacgcgacuuucccucccacaaacccucgcgcccuuccuuuccuacuugggcccggcagaaagcuuaccauggagcugcucauccugaaggccaacgccaucaccaccauccugacggcggugaccuucugcuucgccagcggccagaacaucaccgaggaguucuaccaguccacgugcagcgccgucuccaagggguaccucggcgcccugcgcaccgggugguacaccagcgugaucaccaucgagcuguccaacaucaaggagaacaagugcaacggcaccgacgccaaggugaagcucaucaagcaggagcuggacaaguacaagaacgcggucacggaccugcagcuccugaugcagagcacccccgccaccggguccggcagcgccaucugcuccggcguggccgugugcaagguccugcaccucgagggggaggugaacaagaucaagagcgcgcugcuguccaccaacaaggccguggucagccucuccaacggcgugagcgugcugacguucaagguccuggaccucaagaacuacaucgacaagcagcugcugccgauccucaacaagcaguccugcagcauccccaacaucgagaccgugaucgaguuccagcagaagaacaaccggcugcuggagaucacccgcgaguucuccgugaacgccggggucaccacgcccgugagcaccuacaugcucaccaacuccgagcugcugagccucaucaacgacaugcccaucaccaacgaccagaagaagcugaugagcaacaacgugcagaucguccggcagcaguccuacagcaucaugugcaucaucaaggaggaggugcuggccuacgugguccagcucccgcuguacggcgugaucgacacgcccugcuggaagcugcacaccagcccccucugcaccaccaacacgaaggagggguccaacaucugccugacccgcaccgaccggggcugguacugcgacaacgccggcuccgugagcuucuucccccaggcggagaccugcaagguccaguccaaccgcguguucugcgacacgaugaacagccugacccucccguccgaggucaaccugugcaacguggacaucuucaaccccaaguacgacugcaagaucaugaccagcaagaccgacguguccagcuccgucaucacgagccugggggccaucguguccugcuacggcaagaccaagugcaccgccagcaacaagaaccgggggaucaucaagaccuucuccaacggcugcgacuacgugagcaacaagggcgucgacacgguguccguggggaacacccucuacugcgucaacaagcaggagggccagagccuguacgugaagggggagcccaucaucaacuucuacgacccccugguguucccgagcgacgaguucgacgccuccaucagccaggucaacgagaagaucaaccagucccucgccuucauccgcaagagcgacgagcugcugcacaacgugaacgcgggcaaguccaccaccaacaucaugaucaccacgaucaucaucgugaucaucgucauccuccugagccugaucgccguggggcuccugcuguacugcaaggcccgguccacccccgugacccugagcaaggaccagcucuccggcaucaacaacaucgccuucagcaacugaggacuaguaauaaggaaacuguaugaaugucugugggcaggaagugaagagauccuucuguaaagguuuuuggaauuaugucugcugaauaauaaacuuuuuugaaauaauaaaucugguagaaaaaugagaucuaaaaaaaaaaaaaaaaaaaaaaaaaaaaaaaaaaaaaaaaaaaaaaaaaaaaaaaaaaaaaaaaugcaucccccccccccccccccccccccccccccccaaaggcucuuuucagagccaccagaauu

SEQ ID NO: 2665 - RNA, 1970 nt, Artificial Sequence
  mRNA product Design g-5 comprising derived and/or modified sequence from HRSV(A2)__F_DSCav1_mut2 (opt2)
gggagacccgugacccggaaguuguacggcuacgcgacuuucccucccacaaacccucgcgcccuuccuuuccuacuugggcccggcagaaagcuuaccauggagcuccucauccucaaggccaacgccaucaccaccauccucaccgccgucaccuucugcuucgccuccggccagaacaucaccgaggaguucuaccaguccaccugcuccgccgucuccaagggcuaccucggcgcccuccgcaccggcugguacaccuccgucaucaccaucgagcucuccaacaucaaggagaacaagugcaacggcaccgacgccaaggucaagcucaucaagcaggagcucgacaaguacaagaacgccgucaccgaccuccagcuccucaugcaguccacccccgccaccggcuccggcuccgccaucugcuccggcgucgccgucugcaagguccuccaccucgagggcgaggucaacaagaucaaguccgcccuccucuccaccaacaaggccgucgucucccucuccaacggcgucuccguccucaccuucaagguccucgaccucaagaacuacaucgacaagcagcuccuccccauccucaacaagcaguccugcuccauccccaacaucgagaccgucaucgaguuccagcagaagaacaaccgccuccucgagaucacccgcgaguucuccgucaacgccggcgucaccacccccgucuccaccuacaugcucaccaacuccgagcuccucucccucaucaacgacaugcccaucaccaacgaccagaagaagcucauguccaacaacguccagaucguccgccagcaguccuacuccaucaugugcaucaucaaggaggagguccucgccuacgucguccagcucccccucuacggcgucaucgacacccccugcuggaagcuccacaccuccccccucugcaccaccaacaccaaggagggcuccaacaucugccucacccgcaccgaccgcggcugguacugcgacaacgccggcuccgucuccuucuucccccaggccgagaccugcaagguccaguccaaccgcgucuucugcgacaccaugaacucccucacccuccccuccgaggucaaccucugcaacgucgacaucuucaaccccaaguacgacugcaagaucaugaccuccaagaccgacgucuccuccuccgucaucaccucccucggcgccaucgucuccugcuacggcaagaccaagugcaccgccuccaacaagaaccgcggcaucaucaagaccuucuccaacggcugcgacuacgucuccaacaagggcgucgacaccgucuccgucggcaacacccucuacugcgucaacaagcaggagggccagucccucuacgucaagggcgagcccaucaucaacuucuacgacccccucgucuuccccuccgacgaguucgacgccuccaucucccaggucaacgagaagaucaaccagucccucgccuucauccgcaaguccgacgagcuccuccacaacgucaacgccggcaaguccaccaccaacaucaugaucaccaccaucaucaucgucaucaucgucauccuccucucccucaucgccgucggccuccuccucuacugcaaggcccgcuccacccccgucacccucuccaaggaccagcucuccggcaucaacaacaucgccuucuccaacugaggacuaguaauaaggaaacuguaugaaugucugugggcaggaagugaagagauccuucuguaaagguuuuuggaauuaugucugcugaauaauaaacuuuuuugaaauaauaaaucugguagaaaaaugagaucuaaaaaaaaaaaaaaaaaaaaaaaaaaaaaaaaaaaaaaaaaaaaaaaaaaaaaaaaaaaaaaaaugcaucccccccccccccccccccccccccccccccaaaggcucuuuucagagccaccagaauu

SEQ ID NO: 2666 - RNA, 1970 nt, Artificial Sequence
  mRNA product Design g-5 comprising derived and/or modified sequence from HRSV(A2)__F_DSCav1_mut2 (opt3)
gggagacccgugacccggaaguuguacggcuacgcgacuuucccucccacaaacccucgcgcccuuccuuuccuacuugggcccggcagaaagcuuaccauggagcugcucauccuuaaggccaacgcuauuaccacaauacugacugcagugacguucugcuuugccagcggccagaauaucaccgaagaguucuaccaauccacauguucugcggucucaaaaggguauuugggagcuuuaagaacugguugguacaccaguguuauuacaaucgaacugagcaacauuaaggagaauaaaugcaacggcaccgacgccaaggugaaacuaaucaagcaggaacucgauaaguauaaaaaugcaguaacugaccugcagcuucugaugcaguccacacccgccaccgggucuggaucggcuauauguucaggcguggcagucugcaagguguugcaccucgagggugagguuaacaaaaucaagagcgcccugcugaguacgaauaaagcuguggucucccucucuaacggggugagcguauuaacuuuuaagguucuggaucuuaagaauuacauugacaaacaauugcugccuauccuaaacaagcaguccuguucaauuccaaauaucgaaaccgugauagaguuccagcagaaaaacaauaggcuccuggaaauuacacgggaguuuagugucaacgccggagugacuaccccggugagcacauauaugcuuaccaauucugagcuguugucccucaucaacgauaugcccauuacgaacgaccaaaagaaacugaugucaaauaacguccagaucguucgccagcagagcuacaguaucaugugcauuauaaaggaagagguguuagcguauguagugcaacugccucucuacggcgucaucgauacuccauguuggaaacuucauacaucuccccugugcaccacuaauacaaaggaaggcuccaacauuuguuugacccgaacggaccgugggugguacugcgauaaugcaggaagcgugucguucuuuccucaggccgagaccuguaagguucagucuaacagaguguucugcgacacaaugaacucccuaacucugccaucagaagucaaucucugcaauguggauaucuuuaaccccaaauaugacuguaagauaaugaccaguaaaacagauguaagcuccucuguuauuacuagccugggugcuaucgugucaugcuacggcaagaccaaauguacagccaguaauaagaacagggggaucauuaagaccuucuccaauggaugcgacuaugucagcaacaaaggcguggacacugucucuguggguaauacgcuuuacuguguuaacaagcaagaggggcagucacuguaugugaaaggagagccuaucauuaacuuuuacgauccauugguauucccgagugacgaauuugaugcaagcauaucccaggucaaugagaagaucaaccagucucucgcuuucauucggaaaucggacgaacuguuacacaaugugaacgccggcaagagcacaaccaauaucaugaucacuaccauuauaaucguuauuaucgugauucugcuaucccucaucgcggucggccugcuuuuguauugcaaggcccgcucaacacccgugacccugaguaaagaucaacucucugggauaaacaauaucgcauucagcaacugaggacuaguaauaaggaaacuguaugaaugucugugggcaggaagugaagagauccuucuguaaagguuuuuggaauuaugucugcugaauaauaaacuuuuuugaaauaauaaaucugguagaaaaaugagaucuaaaaaaaaaaaaaaaaaaaaaaaaaaaaaaaaaaaaaaaaaaaaaaaaaaaaaaaaaaaaaaaaugcaucccccccccccccccccccccccccccccccaaaggcucuuuucagagccaccagaauu

SEQ ID NO: 2667 - RNA, 1970 nt, Artificial Sequence
  mRNA product Design g-5 comprising derived and/or modified sequence from HRSV(A2)__F_DSCav1_mut2 (opt4)
gggagacccgugacccggaaguuguacggcuacgcgacuuucccucccacaaacccucgcgcccuuccuuuccuacuugggcccggcagaaagcuuaccauggagcugcugauccugaaggccaacgccaucaccaccauccugaccgccgugaccuucugcuucgccagcggccagaacaucaccgaggaguucuaccagagcaccugcagcgccgugagcaagggcuaccugggcgcccugagaaccggcugguacaccagcgugaucaccaucgagcugagcaacaucaaggagaacaagugcaacggcaccgacgccaaggugaagcugaucaagcaggagcuggacaaguacaagaacgccgugaccgaccugcagcugcugaugcagagcacccccgccaccggcagcggcagcgccaucugcagcggcguggccgugugcaaggugcugcaccuggagggcgaggugaacaagaucaagagcgcccugcugagcaccaacaaggccguggugagccugagcaacggcgugagcgugcugaccuucaaggugcuggaccugaagaacuacaucgacaagcagcugcugcccauccugaacaagcagagcugcagcauccccaacaucgagaccgugaucgaguuccagcagaagaacaacagacugcuggagaucaccagagaguucagcgugaacgccggcgugaccacccccgugagcaccuacaugcugaccaacagcgagcugcugagccugaucaacgacaugcccaucaccaacgaccagaagaagcugaugagcaacaacgugcagaucgugagacagcagagcuacagcaucaugugcaucaucaaggaggaggugcuggccuacguggugcagcugccccuguacggcgugaucgacacccccugcuggaagcugcacaccagcccccugugcaccaccaacaccaaggagggcagcaacaucugccugaccagaaccgacagaggcugguacugcgacaacgccggcagcgugagcuucuucccccaggccgagaccugcaaggugcagagcaacagaguguucugcgacaccaugaacagccugacccugcccagcgaggugaaccugugcaacguggacaucuucaaccccaaguacgacugcaagaucaugaccagcaagaccgacgugagcagcagcgugaucaccagccugggcgccaucgugagcugcuacggcaagaccaagugcaccgccagcaacaagaacagaggcaucaucaagaccuucagcaacggcugcgacuacgugagcaacaagggcguggacaccgugagcgugggcaacacccuguacugcgugaacaagcaggagggccagagccuguacgugaagggcgagcccaucaucaacuucuacgacccccugguguuccccagcgacgaguucgacgccagcaucagccaggugaacgagaagaucaaccagagccuggccuucaucagaaagagcgacgagcugcugcacaacgugaacgccggcaagagcaccaccaacaucaugaucaccaccaucaucaucgugaucaucgugauccugcugagccugaucgccgugggccugcugcuguacugcaaggccagaagcacccccgugacccugagcaaggaccagcugagcggcaucaacaacaucgccuucagcaacugaggacuaguaauaaggaaacuguaugaaugucugugggcaggaagugaagagauccuucuguaaagguuuuuggaauuaugucugcugaauaauaaacuuuuuugaaauaauaaaucugguagaaaaaugagaucuaaaaaaaaaaaaaaaaaaaaaaaaaaaaaaaaaaaaaaaaaaaaaaaaaaaaaaaaaaaaaaaaugcaucccccccccccccccccccccccccccccccaaaggcucuuuucagagccaccagaauu

SEQ ID NO: 2668 - RNA, 1970 nt, Artificial Sequence
  mRNA product Design g-5 comprising derived and/or modified sequence from HRSV(A2)__F_DSCav1_mut2 (opt5)
gggagacccgugacccggaaguuguacggcuacgcgacuuucccucccacaaacccucgcgcccuuccuuuccuacuugggcccggcagaaagcuuaccauggagcugcucauccugaaggccaacgcuauuaccacaauccuuacggccgugaccuucugcuuugcgagcggccagaauauuacagaagaguucuaccaauccaccuguucugcugucagcaaaggguaucugggagcccucagaacaggcugguacaccuccguuaucacaauugaacugucuaacaucaaggagaauaaaugcaacgggaccgacgccaaggugaaacuuaucaagcaggaacuggauaaguauaaaaaugcugugacggaccuccagcugcugaugcagagcacccccgccacaggauccggcucugcuauuuguagcggggucgccgugugcaagguucuccaccuggagggagaggugaacaaaaucaaguccgcgcuucugagcaccaauaaagccgucgugucucucuccaacggcguuagcgugcugacauuuaagguccuugaucugaagaauuacauugacaaacaacuccugccuauccugaacaagcagucuuguuccauuccgaauaucgaaaccgugauugaguuccagcagaaaaacaaucggcuccuggaaaucacgcgcgaguuuagcgugaacgcuggcgucacaacccccguuucuacauauaugcuuaccaauuccgagcugcucagccugaucaacgauaugccuauuaccaacgaccaaaagaaacuuauguccaauaacgugcagaucgugagacagcagucuuacagcauuaugugcaucauuaaggaagagguccuggccuaugugguucaacucccccuguacggggugaucgauacaccuuguuggaaacugcauacgagcccccucugcaccacaaauaccaaggaaggauccaacaucugucugacacggaccgaccgcggcugguacugcgauaaugcugggucugucuccuucuuuccucaggccgagacguguaaggugcagagcaacagaguuuucugcgacacaaugaacucucuuacccugccgagcgaagugaaucucugcaaugucgauauuuuuaaccccaaauaugacuguaagaucaugaccuccaaaacagaugugucuagcuccgucauuaccagccugggagcgaucgugucuugcuacggcaagacaaaauguacggccuccaauaagaaccgggggauuaucaagaccuucagcaauggaugcgacuauguuucuaacaaaggcguggacacagucuccgugggcaauacccuuuacuguguuaacaagcaagaggggcagagccuguaugugaaaggagagccuaucauuaacuuuuacgauccccucgucuucccuuccgacgaauuugaugcuucuaucagccaggugaaugagaagauuaaccagucccuggccuucauccgcaaaucugacgaacugcuccacaaugugaacgcuggcaagagcacaaccaauauuaugaucacgaccauuaucaucguuauuaucgucauucugcuuucccugaucgccguggggcuccugcuguauugcaaggccagaagcacacccgugacccuuucuaaagaucaacucuccggaauuaacaauaucgcuuucagcaacugaggacuaguaauaaggaaacuguaugaaugucugugggcaggaagugaagagauccuucuguaaagguuuuuggaauuaugucugcugaauaauaaacuuuuuugaaauaauaaaucugguagaaaaaugagaucuaaaaaaaaaaaaaaaaaaaaaaaaaaaaaaaaaaaaaaaaaaaaaaaaaaaaaaaaaaaaaaaaugcaucccccccccccccccccccccccccccccccaaaggcucuuuucagagccaccagaauu

SEQ ID NO: 2669 - RNA, 1970 nt, Artificial Sequence
  mRNA product Design g-5 comprising derived and/or modified sequence from HRSV(A2)__F_DSCav1_mut2 (opt6)
gggagacccgugacccggaaguuguacggcuacgcgacuuucccucccacaaacccucgcgcccuuccuuuccuacuugggcccggcagaaagcuuaccauggaacuacuaauccuaaaagcaaacgcaauuacaacuauacuuaccgccguaacauuuugcuucgcaucugggcaaaacauuaccgaagaauuuuaucaaucaacaugcucagcagucuccaaaggauaccuuggagcauuaagaaccggcugguauaccuccguaauaacaauugaacuaucuaauauaaaagaaaauaaauguaauggaacugacgcaaaaguuaaacuaauaaaacaagaacucgacaaauacaaaaacgccgucacagaccuacaacuacuaaugcaaucaacccccgcaacaggaucaggauccgcaaucugcagcggcgucgcaguuugcaaaguccuacauuuagaaggagaaguaaacaaaauaaaaucugcucuccucucuacaaacaaagcaguagugucacuuucaaacggaguaucaguucuaacauucaaaguacuagaccuaaaaaauuacauagacaaacaacuacuuccaauucuaaacaaacaauccuguuccauacccaacauagaaacaguaauagaauuucaacaaaaaaauaacagacuccuagaaauuacaagagaauuuuccgucaaugcaggaguaacaaccccaguaucaaccuacauguuaacuaacucagaacucuuaucacuaauaaacgacaugccaaucacuaaugaccaaaaaaaacucaugucaaauaacguacaaauaguccgacaacaaucauacuccaucaugugcauuauaaaagaagaaguacuagcauacgucguccaauuaccacuauacggcgucauagacacaccauguuggaaacuccacacaucaccacuaugcacuacaaauacaaaagaaggcuccaacaucugccuaacaagaacagacagagguugguauugcgacaacgcaggaucaguaucauuuuucccccaagcagaaacauguaaaguacaaucaaauagagucuucugcgacaccaugaacucauuaacacuaccuucagaagucaaccuaugcaacguagacaucuucaacccuaaauaugacugcaaaaucaugaccagcaaaaccgacguuucaucuuccguaauaacaucacuaggcgcaauagucucauguuacggcaaaacaaaauguacagcaucaaauaaaaaccguggaauaauaaaaacauuuucuaaugguugugacuacguaagcaauaaaggaguagauacaguaucagucggcaacaccuuauacuguguaaacaaacaagaaggccaaaguuuauacgucaaaggagaacccaucaucaacuucuacgacccauuaguauucccaucagacgaauuugaugcaagcauuucacaagucaacgaaaaaaucaaucaaucauuagcauucauccgaaaaucagacgaauuauuacacaacguaaacgccggaaaaucaaccacuaauauaaugauaaccacaauaaucaucguaauaauaguaauacuucucucacuaaucgcagucggacuccuucuauacugcaaagcaagaucuacaccaguaacacuauccaaagaucaacuaaguggcauaaacaacauagcauuuucuaacuaaggacuaguaauaaggaaacuguaugaaugucugugggcaggaagugaagagauccuucuguaaagguuuuuggaauuaugucugcugaauaauaaacuuuuuugaaauaauaaaucugguagaaaaaugagaucuaaaaaaaaaaaaaaaaaaaaaaaaaaaaaaaaaaaaaaaaaaaaaaaaaaaaaaaaaaaaaaaaugcaucccccccccccccccccccccccccccccccaaaggcucuuuucagagccaccagaauu

SEQ ID NO: 2670 - RNA, 1970 nt, Artificial Sequence
  mRNA product Design g-5 comprising derived and/or modified sequence from HRSV(A2)__F_DSCav1_mut2 (opt11)
gggagacccgugacccggaaguuguacggcuacgcgacuuucccucccacaaacccucgcgcccuuccuuuccuacuugggcccggcagaaagcuuaccauggaacuccucauccuaaaagccaacgcgaucaccacaauccugacagccgucaccuucugcuucgccuccggccaaaacaucaccgaagaguucuaccaauccacaugcuccgccgucuccaagggcuaccugggcgcacuucguacaggcugguacaccuccguaauaaccaucgaacucuccaacaucaaagaaaacaaaugcaacggcacagacgcaaaagucaaacucaucaagcaagaacuugacaaauacaaaaaugcagucaccgaccuucaacuccucaugcaaucuacccccgccacaggcuccggcuccgcuaucugcuccggcgucgccgucugcaaaguccuccaccucgaaggugaaguaaacaaaauaaaauccgcccuccucuccaccaacaaagccgucgucucccuaucaaacggcgucuccgugcucaccuucaagguucucgaccugaaaaacuacauagacaaacagcuccuaccaauccuuaacaaacagagcugcuccauuccgaauaucgaaacgguaaucgaauuucaacagaaaaacaaccgccuccucgaaauaacgcgagaguucuccguaaacgcuggcgucaccacacccgucagcaccuacaugcuaacgaacuccgaacucuugucgcucaucaacgacaugcccauaaccaacgaccaaaagaaacuaauguccaauaacguacaaaucguacgccaacaaucuuacuccaucaugugcaucauaaaagaagaaguacuagcuuacgucguccaacucccacuguacggagucaucgacacccccugcuggaaacuccacaccucuccccucugcaccaccaacaccaaagagggcuccaacauuugccugacacgcaccgaccgcggcugguacugcgacaacgcaggcuccgucucguucuucccccaagccgaaaccugcaaaguccaauccaaccgcgucuucugcgacaccaugaacucccucacccuccccuccgaagucaaucuaugcaacguagacaucuucaacccgaaauaugacugcaaaauuaugacaucuaaaaccgacguguccuccucagucaucacuucccuaggagccaucguuuccuguuacggcaagaccaaaugcaccgccagcaacaaaaaccgaggcaucaucaaaaccuucuccaacggaugugacuaugucuccaacaagggcgucgacaccgucagcgucggcaacacccucuacugcgucaacaaacaagaaggccaaucccucuacgucaaaggagagcccauaaucaacuucuacgacccccucgucuucccauccgacgaguucgacgccucaaucucccaagucaacgagaaaaucaaccaauccuuagccuucauccguaaguccgacgaacuccuucacaacgucaacgccgguaaaucuaccaccaacaucaugauaacaacaauaauuaucgucaucaucgucauccuccuuucccucaucgcggucgggcuauugcucuacugcaaagcccgguccaccccaguaacccucucuaaagaccaacucagcggaaucaauaacauagccuucagcaauuaaggacuaguaauaaggaaacuguaugaaugucugugggcaggaagugaagagauccuucuguaaagguuuuuggaauuaugucugcugaauaauaaacuuuuuugaaauaauaaaucugguagaaaaaugagaucuaaaaaaaaaaaaaaaaaaaaaaaaaaaaaaaaaaaaaaaaaaaaaaaaaaaaaaaaaaaaaaaaugcaucccccccccccccccccccccccccccccccaaaggcucuuuucagagccaccagaauu

SEQ ID NO: 2671 - RNA, 1986 nt, Artificial Sequence
  mRNA product Design h-1 comprising derived and/or modified sequence from HRSV(A2)__F_DSCav1_mut2 (opt1)
gggagacccgugacccggaaguuguacggcuacgcgacuuucccucccacaaacccucgcgcccuuccuuuccuacuugggcccggcagaaagcuuaccauggagcugcucauccugaaggccaacgccaucaccaccauccugacggcggugaccuucugcuucgccagcggccagaacaucaccgaggaguucuaccaguccacgugcagcgccgucuccaagggguaccucggcgcccugcggaccggcugguacaccuccgugaucaccaucgagcugagcaacaucaaggagaacaagugcaacgggaccgacgccaaggugaagcucaucaagcaggagcuggacaaguacaagaacgcggucacggaccugcagcuccugaugcaguccaccccggcaaccggcuccggcuccgccaucugcagcggcgucgccgugugcaaggugcugcaccucgagggggaggucaacaagaucaagagcgcccugcuguccaccaacaaggccguggugagccucuccaacggcgucagcgugcugaccuucaaggugcuggaccucaagaacuacaucgacaagcagcugcugcccauccugaacaagcagagcugcuccauccccaacaucgagacggugaucgaguuccagcagaagaacaaccggcuccuggagaucacccgcgaguucagcgugaacgccggggucaccacccccguguccacguacaugcugaccaacagcgagcuccugucccugaucaacgacaugccgaucaccaacgaccagaagaagcucaugagcaacaacgugcagaucguccggcagcaguccuacagcaucaugugcaucaucaaggaggaggugcuggcguacgugguccagcugccccucuacggcgugaucgacacccccugcuggaagcugcacacgagcccccugugcaccaccaacaccaaggagggguccaacaucugccucacgcgcaccgaccggggcugguacugcgacaacgccggcagcgucuccuucuucccgcaggccgagaccugcaaggugcagagcaaccgcguguucugcgacaccaugaacucccugacgcugcccagcgagguaaaccucugcaacgucgacaucuucaaccccaaguacgacugcaagaucaugaccuccaagaccgacgugagcuccagcgugaucaccucccugggggccaucgucagcugcuacggcaagacgaagugcaccgccagcaacaagaaccgggggaucaucaagaccuucuccaacggcugcgacuacgugagcaacaagggcguggacaccguguccgucgggaacacccuguacugcgugaacaagcaggagggccagagccucuacgugaagggggagcccaucaucaacuucuacgacccgcuggucuuccccuccgacgaguucgacgcgagcaucucccaggugaacgagaagaucaaccagagccuggccuucauccgcaaguccgacgagcugcuccacaacgugaacgccggcaagagcacgaccaacaucaugaucaccaccaucaucaucgucaucaucgugauccugcugucccucaucgccguggggcugcugcucuacugcaaggcccggagcacgcccgucacccuguccaaggaccagcugagcggcaucaacaacaucgcguucuccaacugaggacuaguacuggcugcaucucccuuuccucuguccuccauccuucucccaggauggugaagggggaccugguacccagugauccccaccccaggauccuaaaucaugacuuaccugcuaauaaaaacucauuggaaaagugagaagaucuaaaaaaaaaaaaaaaaaaaaaaaaaaaaaaaaaaaaaaaaaaaaaaaaaaaaaaaaaaaaaaaaugcaucccccccccccccccccccccccccccccccaaaggcucuuuucagagccaccagaauu

SEQ ID NO: 2672 - RNA, 1986 nt, Artificial Sequence
  mRNA product Design h-1 comprising derived and/or modified sequence from HRSV(A2)__F_DSCav1_mut2 (opt1)
gggagacccgugacccggaaguuguacggcuacgcgacuuucccucccacaaacccucgcgcccuuccuuuccuacuugggcccggcagaaagcuuaccauggagcugcucauccugaaggccaacgccaucaccaccauccugacggcggugaccuucugcuucgccagcggccagaacaucaccgaggaguucuaccaguccacgugcagcgccgucuccaagggguaccucggcgcccugcgcaccgggugguacaccagcgugaucaccaucgagcuguccaacaucaaggagaacaagugcaacggcaccgacgccaaggugaagcucaucaagcaggagcuggacaaguacaagaacgcggucacggaccugcagcuccugaugcagagcacccccgccaccggguccggcagcgccaucugcuccggcguggccgugugcaagguccugcaccucgagggggaggugaacaagaucaagagcgcgcugcuguccaccaacaaggccguggucagccucuccaacggcgugagcgugcugacguucaagguccuggaccucaagaacuacaucgacaagcagcugcugccgauccucaacaagcaguccugcagcauccccaacaucgagaccgugaucgaguuccagcagaagaacaaccggcugcuggagaucacccgcgaguucuccgugaacgccggggucaccacgcccgugagcaccuacaugcucaccaacuccgagcugcugagccucaucaacgacaugcccaucaccaacgaccagaagaagcugaugagcaacaacgugcagaucguccggcagcaguccuacagcaucaugugcaucaucaaggaggaggugcuggccuacgugguccagcucccgcuguacggcgugaucgacacgcccugcuggaagcugcacaccagcccccucugcaccaccaacacgaaggagggguccaacaucugccugacccgcaccgaccggggcugguacugcgacaacgccggcuccgugagcuucuucccccaggcggagaccugcaagguccaguccaaccgcguguucugcgacacgaugaacagccugacccucccguccgaggucaaccugugcaacguggacaucuucaaccccaaguacgacugcaagaucaugaccagcaagaccgacguguccagcuccgucaucacgagccugggggccaucguguccugcuacggcaagaccaagugcaccgccagcaacaagaaccgggggaucaucaagaccuucuccaacggcugcgacuacgugagcaacaagggcgucgacacgguguccguggggaacacccucuacugcgucaacaagcaggagggccagagccuguacgugaagggggagcccaucaucaacuucuacgacccccugguguucccgagcgacgaguucgacgccuccaucagccaggucaacgagaagaucaaccagucccucgccuucauccgcaagagcgacgagcugcugcacaacgugaacgcgggcaaguccaccaccaacaucaugaucaccacgaucaucaucgugaucaucgucauccuccugagccugaucgccguggggcuccugcuguacugcaaggcccgguccacccccgugacccugagcaaggaccagcucuccggcaucaacaacaucgccuucagcaacugaggacuaguacuggcugcaucucccuuuccucuguccuccauccuucucccaggauggugaagggggaccugguacccagugauccccaccccaggauccuaaaucaugacuuaccugcuaauaaaaacucauuggaaaagugagaagaucuaaaaaaaaaaaaaaaaaaaaaaaaaaaaaaaaaaaaaaaaaaaaaaaaaaaaaaaaaaaaaaaaugcaucccccccccccccccccccccccccccccccaaaggcucuuuucagagccaccagaauu

SEQ ID NO: 2673 - RNA, 1986 nt, Artificial Sequence
  mRNA product Design h-1 comprising derived and/or modified sequence from HRSV(A2)__F_DSCav1_mut2 (opt2)
gggagacccgugacccggaaguuguacggcuacgcgacuuucccucccacaaacccucgcgcccuuccuuuccuacuugggcccggcagaaagcuuaccauggagcuccucauccucaaggccaacgccaucaccaccauccucaccgccgucaccuucugcuucgccuccggccagaacaucaccgaggaguucuaccaguccaccugcuccgccgucuccaagggcuaccucggcgcccuccgcaccggcugguacaccuccgucaucaccaucgagcucuccaacaucaaggagaacaagugcaacggcaccgacgccaaggucaagcucaucaagcaggagcucgacaaguacaagaacgccgucaccgaccuccagcuccucaugcaguccacccccgccaccggcuccggcuccgccaucugcuccggcgucgccgucugcaagguccuccaccucgagggcgaggucaacaagaucaaguccgcccuccucuccaccaacaaggccgucgucucccucuccaacggcgucuccguccucaccuucaagguccucgaccucaagaacuacaucgacaagcagcuccuccccauccucaacaagcaguccugcuccauccccaacaucgagaccgucaucgaguuccagcagaagaacaaccgccuccucgagaucacccgcgaguucuccgucaacgccggcgucaccacccccgucuccaccuacaugcucaccaacuccgagcuccucucccucaucaacgacaugcccaucaccaacgaccagaagaagcucauguccaacaacguccagaucguccgccagcaguccuacuccaucaugugcaucaucaaggaggagguccucgccuacgucguccagcucccccucuacggcgucaucgacacccccugcuggaagcuccacaccuccccccucugcaccaccaacaccaaggagggcuccaacaucugccucacccgcaccgaccgcggcugguacugcgacaacgccggcuccgucuccuucuucccccaggccgagaccugcaagguccaguccaaccgcgucuucugcgacaccaugaacucccucacccuccccuccgaggucaaccucugcaacgucgacaucuucaaccccaaguacgacugcaagaucaugaccuccaagaccgacgucuccuccuccgucaucaccucccucggcgccaucgucuccugcuacggcaagaccaagugcaccgccuccaacaagaaccgcggcaucaucaagaccuucuccaacggcugcgacuacgucuccaacaagggcgucgacaccgucuccgucggcaacacccucuacugcgucaacaagcaggagggccagucccucuacgucaagggcgagcccaucaucaacuucuacgacccccucgucuuccccuccgacgaguucgacgccuccaucucccaggucaacgagaagaucaaccagucccucgccuucauccgcaaguccgacgagcuccuccacaacgucaacgccggcaaguccaccaccaacaucaugaucaccaccaucaucaucgucaucaucgucauccuccucucccucaucgccgucggccuccuccucuacugcaaggcccgcuccacccccgucacccucuccaaggaccagcucuccggcaucaacaacaucgccuucuccaacugaggacuaguacuggcugcaucucccuuuccucuguccuccauccuucucccaggauggugaagggggaccugguacccagugauccccaccccaggauccuaaaucaugacuuaccugcuaauaaaaacucauuggaaaagugagaagaucuaaaaaaaaaaaaaaaaaaaaaaaaaaaaaaaaaaaaaaaaaaaaaaaaaaaaaaaaaaaaaaaaugcaucccccccccccccccccccccccccccccccaaaggcucuuuucagagccaccagaauu

SEQ ID NO: 2674 - RNA, 1986 nt, Artificial Sequence
  mRNA product Design h-1 comprising derived and/or modified sequence from HRSV(A2)__F_DSCav1_mut2 (opt3)
gggagacccgugacccggaaguuguacggcuacgcgacuuucccucccacaaacccucgcgcccuuccuuuccuacuugggcccggcagaaagcuuaccauggagcugcucauccuuaaggccaacgcuauuaccacaauacugacugcagugacguucugcuuugccagcggccagaauaucaccgaagaguucuaccaauccacauguucugcggucucaaaaggguauuugggagcuuuaagaacugguugguacaccaguguuauuacaaucgaacugagcaacauuaaggagaauaaaugcaacggcaccgacgccaaggugaaacuaaucaagcaggaacucgauaaguauaaaaaugcaguaacugaccugcagcuucugaugcaguccacacccgccaccgggucuggaucggcuauauguucaggcguggcagucugcaagguguugcaccucgagggugagguuaacaaaaucaagagcgcccugcugaguacgaauaaagcuguggucucccucucuaacggggugagcguauuaacuuuuaagguucuggaucuuaagaauuacauugacaaacaauugcugccuauccuaaacaagcaguccuguucaauuccaaauaucgaaaccgugauagaguuccagcagaaaaacaauaggcuccuggaaauuacacgggaguuuagugucaacgccggagugacuaccccggugagcacauauaugcuuaccaauucugagcuguugucccucaucaacgauaugcccauuacgaacgaccaaaagaaacugaugucaaauaacguccagaucguucgccagcagagcuacaguaucaugugcauuauaaaggaagagguguuagcguauguagugcaacugccucucuacggcgucaucgauacuccauguuggaaacuucauacaucuccccugugcaccacuaauacaaaggaaggcuccaacauuuguuugacccgaacggaccgugggugguacugcgauaaugcaggaagcgugucguucuuuccucaggccgagaccuguaagguucagucuaacagaguguucugcgacacaaugaacucccuaacucugccaucagaagucaaucucugcaauguggauaucuuuaaccccaaauaugacuguaagauaaugaccaguaaaacagauguaagcuccucuguuauuacuagccugggugcuaucgugucaugcuacggcaagaccaaauguacagccaguaauaagaacagggggaucauuaagaccuucuccaauggaugcgacuaugucagcaacaaaggcguggacacugucucuguggguaauacgcuuuacuguguuaacaagcaagaggggcagucacuguaugugaaaggagagccuaucauuaacuuuuacgauccauugguauucccgagugacgaauuugaugcaagcauaucccaggucaaugagaagaucaaccagucucucgcuuucauucggaaaucggacgaacuguuacacaaugugaacgccggcaagagcacaaccaauaucaugaucacuaccauuauaaucguuauuaucgugauucugcuaucccucaucgcggucggccugcuuuuguauugcaaggcccgcucaacacccgugacccugaguaaagaucaacucucugggauaaacaauaucgcauucagcaacugaggacuaguacuggcugcaucucccuuuccucuguccuccauccuucucccaggauggugaagggggaccugguacccagugauccccaccccaggauccuaaaucaugacuuaccugcuaauaaaaacucauuggaaaagugagaagaucuaaaaaaaaaaaaaaaaaaaaaaaaaaaaaaaaaaaaaaaaaaaaaaaaaaaaaaaaaaaaaaaaugcaucccccccccccccccccccccccccccccccaaaggcucuuuucagagccaccagaauu

SEQ ID NO: 2675 - RNA, 1986 nt, Artificial Sequence
  mRNA product Design h-1 comprising derived and/or modified sequence from HRSV(A2)__F_DSCav1_mut2 (opt4)
gggagacccgugacccggaaguuguacggcuacgcgacuuucccucccacaaacccucgcgcccuuccuuuccuacuugggcccggcagaaagcuuaccauggagcugcugauccugaaggccaacgccaucaccaccauccugaccgccgugaccuucugcuucgccagcggccagaacaucaccgaggaguucuaccagagcaccugcagcgccgugagcaagggcuaccugggcgcccugagaaccggcugguacaccagcgugaucaccaucgagcugagcaacaucaaggagaacaagugcaacggcaccgacgccaaggugaagcugaucaagcaggagcuggacaaguacaagaacgccgugaccgaccugcagcugcugaugcagagcacccccgccaccggcagcggcagcgccaucugcagcggcguggccgugugcaaggugcugcaccuggagggcgaggugaacaagaucaagagcgcccugcugagcaccaacaaggccguggugagccugagcaacggcgugagcgugcugaccuucaaggugcuggaccugaagaacuacaucgacaagcagcugcugcccauccugaacaagcagagcugcagcauccccaacaucgagaccgugaucgaguuccagcagaagaacaacagacugcuggagaucaccagagaguucagcgugaacgccggcgugaccacccccgugagcaccuacaugcugaccaacagcgagcugcugagccugaucaacgacaugcccaucaccaacgaccagaagaagcugaugagcaacaacgugcagaucgugagacagcagagcuacagcaucaugugcaucaucaaggaggaggugcuggccuacguggugcagcugccccuguacggcgugaucgacacccccugcuggaagcugcacaccagcccccugugcaccaccaacaccaaggagggcagcaacaucugccugaccagaaccgacagaggcugguacugcgacaacgccggcagcgugagcuucuucccccaggccgagaccugcaaggugcagagcaacagaguguucugcgacaccaugaacagccugacccugcccagcgaggugaaccugugcaacguggacaucuucaaccccaaguacgacugcaagaucaugaccagcaagaccgacgugagcagcagcgugaucaccagccugggcgccaucgugagcugcuacggcaagaccaagugcaccgccagcaacaagaacagaggcaucaucaagaccuucagcaacggcugcgacuacgugagcaacaagggcguggacaccgugagcgugggcaacacccuguacugcgugaacaagcaggagggccagagccuguacgugaagggcgagcccaucaucaacuucuacgacccccugguguuccccagcgacgaguucgacgccagcaucagccaggugaacgagaagaucaaccagagccuggccuucaucagaaagagcgacgagcugcugcacaacgugaacgccggcaagagcaccaccaacaucaugaucaccaccaucaucaucgugaucaucgugauccugcugagccugaucgccgugggccugcugcuguacugcaaggccagaagcacccccgugacccugagcaaggaccagcugagcggcaucaacaacaucgccuucagcaacugaggacuaguacuggcugcaucucccuuuccucuguccuccauccuucucccaggauggugaagggggaccugguacccagugauccccaccccaggauccuaaaucaugacuuaccugcuaauaaaaacucauuggaaaagugagaagaucuaaaaaaaaaaaaaaaaaaaaaaaaaaaaaaaaaaaaaaaaaaaaaaaaaaaaaaaaaaaaaaaaugcaucccccccccccccccccccccccccccccccaaaggcucuuuucagagccaccagaauu

SEQ ID NO: 2676 - RNA, 1986 nt, Artificial Sequence
  mRNA product Design h-1 comprising derived and/or modified sequence from HRSV(A2)__F_DSCav1_mut2 (opt5)
gggagacccgugacccggaaguuguacggcuacgcgacuuucccucccacaaacccucgcgcccuuccuuuccuacuugggcccggcagaaagcuuaccauggagcugcucauccugaaggccaacgcuauuaccacaauccuuacggccgugaccuucugcuuugcgagcggccagaauauuacagaagaguucuaccaauccaccuguucugcugucagcaaaggguaucugggagcccucagaacaggcugguacaccuccguuaucacaauugaacugucuaacaucaaggagaauaaaugcaacgggaccgacgccaaggugaaacuuaucaagcaggaacuggauaaguauaaaaaugcugugacggaccuccagcugcugaugcagagcacccccgccacaggauccggcucugcuauuuguagcggggucgccgugugcaagguucuccaccuggagggagaggugaacaaaaucaaguccgcgcuucugagcaccaauaaagccgucgugucucucuccaacggcguuagcgugcugacauuuaagguccuugaucugaagaauuacauugacaaacaacuccugccuauccugaacaagcagucuuguuccauuccgaauaucgaaaccgugauugaguuccagcagaaaaacaaucggcuccuggaaaucacgcgcgaguuuagcgugaacgcuggcgucacaacccccguuucuacauauaugcuuaccaauuccgagcugcucagccugaucaacgauaugccuauuaccaacgaccaaaagaaacuuauguccaauaacgugcagaucgugagacagcagucuuacagcauuaugugcaucauuaaggaagagguccuggccuaugugguucaacucccccuguacggggugaucgauacaccuuguuggaaacugcauacgagcccccucugcaccacaaauaccaaggaaggauccaacaucugucugacacggaccgaccgcggcugguacugcgauaaugcugggucugucuccuucuuuccucaggccgagacguguaaggugcagagcaacagaguuuucugcgacacaaugaacucucuuacccugccgagcgaagugaaucucugcaaugucgauauuuuuaaccccaaauaugacuguaagaucaugaccuccaaaacagaugugucuagcuccgucauuaccagccugggagcgaucgugucuugcuacggcaagacaaaauguacggccuccaauaagaaccgggggauuaucaagaccuucagcaauggaugcgacuauguuucuaacaaaggcguggacacagucuccgugggcaauacccuuuacuguguuaacaagcaagaggggcagagccuguaugugaaaggagagccuaucauuaacuuuuacgauccccucgucuucccuuccgacgaauuugaugcuucuaucagccaggugaaugagaagauuaaccagucccuggccuucauccgcaaaucugacgaacugcuccacaaugugaacgcuggcaagagcacaaccaauauuaugaucacgaccauuaucaucguuauuaucgucauucugcuuucccugaucgccguggggcuccugcuguauugcaaggccagaagcacacccgugacccuuucuaaagaucaacucuccggaauuaacaauaucgcuuucagcaacugaggacuaguacuggcugcaucucccuuuccucuguccuccauccuucucccaggauggugaagggggaccugguacccagugauccccaccccaggauccuaaaucaugacuuaccugcuaauaaaaacucauuggaaaagugagaagaucuaaaaaaaaaaaaaaaaaaaaaaaaaaaaaaaaaaaaaaaaaaaaaaaaaaaaaaaaaaaaaaaaugcaucccccccccccccccccccccccccccccccaaaggcucuuuucagagccaccagaauu

SEQ ID NO: 2677 - RNA, 1986 nt, Artificial Sequence
  mRNA product Design h-1 comprising derived and/or modified sequence from HRSV(A2)__F_DSCav1_mut2 (opt6)
gggagacccgugacccggaaguuguacggcuacgcgacuuucccucccacaaacccucgcgcccuuccuuuccuacuugggcccggcagaaagcuuaccauggaacuacuaauccuaaaagcaaacgcaauuacaacuauacuuaccgccguaacauuuugcuucgcaucugggcaaaacauuaccgaagaauuuuaucaaucaacaugcucagcagucuccaaaggauaccuuggagcauuaagaaccggcugguauaccuccguaauaacaauugaacuaucuaauauaaaagaaaauaaauguaauggaacugacgcaaaaguuaaacuaauaaaacaagaacucgacaaauacaaaaacgccgucacagaccuacaacuacuaaugcaaucaacccccgcaacaggaucaggauccgcaaucugcagcggcgucgcaguuugcaaaguccuacauuuagaaggagaaguaaacaaaauaaaaucugcucuccucucuacaaacaaagcaguagugucacuuucaaacggaguaucaguucuaacauucaaaguacuagaccuaaaaaauuacauagacaaacaacuacuuccaauucuaaacaaacaauccuguuccauacccaacauagaaacaguaauagaauuucaacaaaaaaauaacagacuccuagaaauuacaagagaauuuuccgucaaugcaggaguaacaaccccaguaucaaccuacauguuaacuaacucagaacucuuaucacuaauaaacgacaugccaaucacuaaugaccaaaaaaaacucaugucaaauaacguacaaauaguccgacaacaaucauacuccaucaugugcauuauaaaagaagaaguacuagcauacgucguccaauuaccacuauacggcgucauagacacaccauguuggaaacuccacacaucaccacuaugcacuacaaauacaaaagaaggcuccaacaucugccuaacaagaacagacagagguugguauugcgacaacgcaggaucaguaucauuuuucccccaagcagaaacauguaaaguacaaucaaauagagucuucugcgacaccaugaacucauuaacacuaccuucagaagucaaccuaugcaacguagacaucuucaacccuaaauaugacugcaaaaucaugaccagcaaaaccgacguuucaucuuccguaauaacaucacuaggcgcaauagucucauguuacggcaaaacaaaauguacagcaucaaauaaaaaccguggaauaauaaaaacauuuucuaaugguugugacuacguaagcaauaaaggaguagauacaguaucagucggcaacaccuuauacuguguaaacaaacaagaaggccaaaguuuauacgucaaaggagaacccaucaucaacuucuacgacccauuaguauucccaucagacgaauuugaugcaagcauuucacaagucaacgaaaaaaucaaucaaucauuagcauucauccgaaaaucagacgaauuauuacacaacguaaacgccggaaaaucaaccacuaauauaaugauaaccacaauaaucaucguaauaauaguaauacuucucucacuaaucgcagucggacuccuucuauacugcaaagcaagaucuacaccaguaacacuauccaaagaucaacuaaguggcauaaacaacauagcauuuucuaacuaaggacuaguacuggcugcaucucccuuuccucuguccuccauccuucucccaggauggugaagggggaccugguacccagugauccccaccccaggauccuaaaucaugacuuaccugcuaauaaaaacucauuggaaaagugagaagaucuaaaaaaaaaaaaaaaaaaaaaaaaaaaaaaaaaaaaaaaaaaaaaaaaaaaaaaaaaaaaaaaaugcaucccccccccccccccccccccccccccccccaaaggcucuuuucagagccaccagaauu

SEQ ID NO: 2678 - RNA, 1986 nt, Artificial Sequence
  mRNA product Design h-1 comprising derived and/or modified sequence from HRSV(A2)__F_DSCav1_mut2 (opt11)
gggagacccgugacccggaaguuguacggcuacgcgacuuucccucccacaaacccucgcgcccuuccuuuccuacuugggcccggcagaaagcuuaccauggaacuccucauccuaaaagccaacgcgaucaccacaauccugacagccgucaccuucugcuucgccuccggccaaaacaucaccgaagaguucuaccaauccacaugcuccgccgucuccaagggcuaccugggcgcacuucguacaggcugguacaccuccguaauaaccaucgaacucuccaacaucaaagaaaacaaaugcaacggcacagacgcaaaagucaaacucaucaagcaagaacuugacaaauacaaaaaugcagucaccgaccuucaacuccucaugcaaucuacccccgccacaggcuccggcuccgcuaucugcuccggcgucgccgucugcaaaguccuccaccucgaaggugaaguaaacaaaauaaaauccgcccuccucuccaccaacaaagccgucgucucccuaucaaacggcgucuccgugcucaccuucaagguucucgaccugaaaaacuacauagacaaacagcuccuaccaauccuuaacaaacagagcugcuccauuccgaauaucgaaacgguaaucgaauuucaacagaaaaacaaccgccuccucgaaauaacgcgagaguucuccguaaacgcuggcgucaccacacccgucagcaccuacaugcuaacgaacuccgaacucuugucgcucaucaacgacaugcccauaaccaacgaccaaaagaaacuaauguccaauaacguacaaaucguacgccaacaaucuuacuccaucaugugcaucauaaaagaagaaguacuagcuuacgucguccaacucccacuguacggagucaucgacacccccugcuggaaacuccacaccucuccccucugcaccaccaacaccaaagagggcuccaacauuugccugacacgcaccgaccgcggcugguacugcgacaacgcaggcuccgucucguucuucccccaagccgaaaccugcaaaguccaauccaaccgcgucuucugcgacaccaugaacucccucacccuccccuccgaagucaaucuaugcaacguagacaucuucaacccgaaauaugacugcaaaauuaugacaucuaaaaccgacguguccuccucagucaucacuucccuaggagccaucguuuccuguuacggcaagaccaaaugcaccgccagcaacaaaaaccgaggcaucaucaaaaccuucuccaacggaugugacuaugucuccaacaagggcgucgacaccgucagcgucggcaacacccucuacugcgucaacaaacaagaaggccaaucccucuacgucaaaggagagcccauaaucaacuucuacgacccccucgucuucccauccgacgaguucgacgccucaaucucccaagucaacgagaaaaucaaccaauccuuagccuucauccguaaguccgacgaacuccuucacaacgucaacgccgguaaaucuaccaccaacaucaugauaacaacaauaauuaucgucaucaucgucauccuccuuucccucaucgcggucgggcuauugcucuacugcaaagcccgguccaccccaguaacccucucuaaagaccaacucagcggaaucaauaacauagccuucagcaauuaaggacuaguacuggcugcaucucccuuuccucuguccuccauccuucucccaggauggugaagggggaccugguacccagugauccccaccccaggauccuaaaucaugacuuaccugcuaauaaaaacucauuggaaaagugagaagaucuaaaaaaaaaaaaaaaaaaaaaaaaaaaaaaaaaaaaaaaaaaaaaaaaaaaaaaaaaaaaaaaaugcaucccccccccccccccccccccccccccccccaaaggcucuuuucagagccaccagaauu

SEQ ID NO: 2679 - RNA, 2202 nt, Artificial Sequence
  mRNA product Design h-2 comprising derived and/or modified sequence from HRSV(A2)__F_DSCav1_mut2 (opt1)
gggagacccgugacccggaaguuguacggcuacgcgacuuucccucccacaaacccucgcgcccuuccuuuccuacuugggcccggcagaaagcuuaccauggagcugcucauccugaaggccaacgccaucaccaccauccugacggcggugaccuucugcuucgccagcggccagaacaucaccgaggaguucuaccaguccacgugcagcgccgucuccaagggguaccucggcgcccugcggaccggcugguacaccuccgugaucaccaucgagcugagcaacaucaaggagaacaagugcaacgggaccgacgccaaggugaagcucaucaagcaggagcuggacaaguacaagaacgcggucacggaccugcagcuccugaugcaguccaccccggcaaccggcuccggcuccgccaucugcagcggcgucgccgugugcaaggugcugcaccucgagggggaggucaacaagaucaagagcgcccugcuguccaccaacaaggccguggugagccucuccaacggcgucagcgugcugaccuucaaggugcuggaccucaagaacuacaucgacaagcagcugcugcccauccugaacaagcagagcugcuccauccccaacaucgagacggugaucgaguuccagcagaagaacaaccggcuccuggagaucacccgcgaguucagcgugaacgccggggucaccacccccguguccacguacaugcugaccaacagcgagcuccugucccugaucaacgacaugccgaucaccaacgaccagaagaagcucaugagcaacaacgugcagaucguccggcagcaguccuacagcaucaugugcaucaucaaggaggaggugcuggcguacgugguccagcugccccucuacggcgugaucgacacccccugcuggaagcugcacacgagcccccugugcaccaccaacaccaaggagggguccaacaucugccucacgcgcaccgaccggggcugguacugcgacaacgccggcagcgucuccuucuucccgcaggccgagaccugcaaggugcagagcaaccgcguguucugcgacaccaugaacucccugacgcugcccagcgagguaaaccucugcaacgucgacaucuucaaccccaaguacgacugcaagaucaugaccuccaagaccgacgugagcuccagcgugaucaccucccugggggccaucgucagcugcuacggcaagacgaagugcaccgccagcaacaagaaccgggggaucaucaagaccuucuccaacggcugcgacuacgugagcaacaagggcguggacaccguguccgucgggaacacccuguacugcgugaacaagcaggagggccagagccucuacgugaagggggagcccaucaucaacuucuacgacccgcuggucuuccccuccgacgaguucgacgcgagcaucucccaggugaacgagaagaucaaccagagccuggccuucauccgcaaguccgacgagcugcuccacaacgugaacgccggcaagagcacgaccaacaucaugaucaccaccaucaucaucgucaucaucgugauccugcugucccucaucgccguggggcugcugcucuacugcaaggcccggagcacgcccgucacccuguccaaggaccagcugagcggcaucaacaacaucgcguucuccaacugaggacuagugaagggaacacccaaauuuaauucagccuuaagcacaauuaauuaagagugaaacguaauuguacaagcaguuggucacccaccauagggcaugaucaacaccgcaaccuuuccuuuuucccccagugauucugaaaaaccccucuucccuucagcuugcuuagauguuccaaauuuaguaagcuuaaggcggccuacagaagaaaaagaaaaaaaaggccacaaaaguucccucucacuuucaguaaauaaaauaaaagcagcaacagaaauaaagaaauaaaugaaauucaaaaugaaauaaauauuguguugugcagcauuaaaaaaucaauaaaaauuaaaaaugagcaagaucuaaaaaaaaaaaaaaaaaaaaaaaaaaaaaaaaaaaaaaaaaaaaaaaaaaaaaaaaaaaaaaaaugcaucccccccccccccccccccccccccccccccaaaggcucuuuucagagccaccagaauu

SEQ ID NO: 2680 - RNA, 2202 nt, Artificial Sequence
  mRNA product Design h-2 comprising derived and/or modified sequence from HRSV(A2)__F_DSCav1_mut2 (opt1)
gggagacccgugacccggaaguuguacggcuacgcgacuuucccucccacaaacccucgcgcccuuccuuuccuacuugggcccggcagaaagcuuaccauggagcugcucauccugaaggccaacgccaucaccaccauccugacggcggugaccuucugcuucgccagcggccagaacaucaccgaggaguucuaccaguccacgugcagcgccgucuccaagggguaccucggcgcccugcgcaccgggugguacaccagcgugaucaccaucgagcuguccaacaucaaggagaacaagugcaacggcaccgacgccaaggugaagcucaucaagcaggagcuggacaaguacaagaacgcggucacggaccugcagcuccugaugcagagcacccccgccaccggguccggcagcgccaucugcuccggcguggccgugugcaagguccugcaccucgagggggaggugaacaagaucaagagcgcgcugcuguccaccaacaaggccguggucagccucuccaacggcgugagcgugcugacguucaagguccuggaccucaagaacuacaucgacaagcagcugcugccgauccucaacaagcaguccugcagcauccccaacaucgagaccgugaucgaguuccagcagaagaacaaccggcugcuggagaucacccgcgaguucuccgugaacgccggggucaccacgcccgugagcaccuacaugcucaccaacuccgagcugcugagccucaucaacgacaugcccaucaccaacgaccagaagaagcugaugagcaacaacgugcagaucguccggcagcaguccuacagcaucaugugcaucaucaaggaggaggugcuggccuacgugguccagcucccgcuguacggcgugaucgacacgcccugcuggaagcugcacaccagcccccucugcaccaccaacacgaaggagggguccaacaucugccugacccgcaccgaccggggcugguacugcgacaacgccggcuccgugagcuucuucccccaggcggagaccugcaagguccaguccaaccgcguguucugcgacacgaugaacagccugacccucccguccgaggucaaccugugcaacguggacaucuucaaccccaaguacgacugcaagaucaugaccagcaagaccgacguguccagcuccgucaucacgagccugggggccaucguguccugcuacggcaagaccaagugcaccgccagcaacaagaaccgggggaucaucaagaccuucuccaacggcugcgacuacgugagcaacaagggcgucgacacgguguccguggggaacacccucuacugcgucaacaagcaggagggccagagccuguacgugaagggggagcccaucaucaacuucuacgacccccugguguucccgagcgacgaguucgacgccuccaucagccaggucaacgagaagaucaaccagucccucgccuucauccgcaagagcgacgagcugcugcacaacgugaacgcgggcaaguccaccaccaacaucaugaucaccacgaucaucaucgugaucaucgucauccuccugagccugaucgccguggggcuccugcuguacugcaaggcccgguccacccccgugacccugagcaaggaccagcucuccggcaucaacaacaucgccuucagcaacugaggacuagugaagggaacacccaaauuuaauucagccuuaagcacaauuaauuaagagugaaacguaauuguacaagcaguuggucacccaccauagggcaugaucaacaccgcaaccuuuccuuuuucccccagugauucugaaaaaccccucuucccuucagcuugcuuagauguuccaaauuuaguaagcuuaaggcggccuacagaagaaaaagaaaaaaaaggccacaaaaguucccucucacuuucaguaaauaaaauaaaagcagcaacagaaauaaagaaauaaaugaaauucaaaaugaaauaaauauuguguugugcagcauuaaaaaaucaauaaaaauuaaaaaugagcaagaucuaaaaaaaaaaaaaaaaaaaaaaaaaaaaaaaaaaaaaaaaaaaaaaaaaaaaaaaaaaaaaaaaugcaucccccccccccccccccccccccccccccccaaaggcucuuuucagagccaccagaauu

SEQ ID NO: 2681 - RNA, 2202 nt, Artificial Sequence
  mRNA product Design h-2 comprising derived and/or modified sequence from HRSV(A2)__F_DSCav1_mut2 (opt2)
gggagacccgugacccggaaguuguacggcuacgcgacuuucccucccacaaacccucgcgcccuuccuuuccuacuugggcccggcagaaagcuuaccauggagcuccucauccucaaggccaacgccaucaccaccauccucaccgccgucaccuucugcuucgccuccggccagaacaucaccgaggaguucuaccaguccaccugcuccgccgucuccaagggcuaccucggcgcccuccgcaccggcugguacaccuccgucaucaccaucgagcucuccaacaucaaggagaacaagugcaacggcaccgacgccaaggucaagcucaucaagcaggagcucgacaaguacaagaacgccgucaccgaccuccagcuccucaugcaguccacccccgccaccggcuccggcuccgccaucugcuccggcgucgccgucugcaagguccuccaccucgagggcgaggucaacaagaucaaguccgcccuccucuccaccaacaaggccgucgucucccucuccaacggcgucuccguccucaccuucaagguccucgaccucaagaacuacaucgacaagcagcuccuccccauccucaacaagcaguccugcuccauccccaacaucgagaccgucaucgaguuccagcagaagaacaaccgccuccucgagaucacccgcgaguucuccgucaacgccggcgucaccacccccgucuccaccuacaugcucaccaacuccgagcuccucucccucaucaacgacaugcccaucaccaacgaccagaagaagcucauguccaacaacguccagaucguccgccagcaguccuacuccaucaugugcaucaucaaggaggagguccucgccuacgucguccagcucccccucuacggcgucaucgacacccccugcuggaagcuccacaccuccccccucugcaccaccaacaccaaggagggcuccaacaucugccucacccgcaccgaccgcggcugguacugcgacaacgccggcuccgucuccuucuucccccaggccgagaccugcaagguccaguccaaccgcgucuucugcgacaccaugaacucccucacccuccccuccgaggucaaccucugcaacgucgacaucuucaaccccaaguacgacugcaagaucaugaccuccaagaccgacgucuccuccuccgucaucaccucccucggcgccaucgucuccugcuacggcaagaccaagugcaccgccuccaacaagaaccgcggcaucaucaagaccuucuccaacggcugcgacuacgucuccaacaagggcgucgacaccgucuccgucggcaacacccucuacugcgucaacaagcaggagggccagucccucuacgucaagggcgagcccaucaucaacuucuacgacccccucgucuuccccuccgacgaguucgacgccuccaucucccaggucaacgagaagaucaaccagucccucgccuucauccgcaaguccgacgagcuccuccacaacgucaacgccggcaaguccaccaccaacaucaugaucaccaccaucaucaucgucaucaucgucauccuccucucccucaucgccgucggccuccuccucuacugcaaggcccgcuccacccccgucacccucuccaaggaccagcucuccggcaucaacaacaucgccuucuccaacugaggacuagugaagggaacacccaaauuuaauucagccuuaagcacaauuaauuaagagugaaacguaauuguacaagcaguuggucacccaccauagggcaugaucaacaccgcaaccuuuccuuuuucccccagugauucugaaaaaccccucuucccuucagcuugcuuagauguuccaaauuuaguaagcuuaaggcggccuacagaagaaaaagaaaaaaaaggccacaaaaguucccucucacuuucaguaaauaaaauaaaagcagcaacagaaauaaagaaauaaaugaaauucaaaaugaaauaaauauuguguugugcagcauuaaaaaaucaauaaaaauuaaaaaugagcaagaucuaaaaaaaaaaaaaaaaaaaaaaaaaaaaaaaaaaaaaaaaaaaaaaaaaaaaaaaaaaaaaaaaugcaucccccccccccccccccccccccccccccccaaaggcucuuuucagagccaccagaauu

SEQ ID NO: 2682 - RNA, 2202 nt, Artificial Sequence
  mRNA product Design h-2 comprising derived and/or modified sequence from HRSV(A2)__F_DSCav1_mut2 (opt3)
gggagacccgugacccggaaguuguacggcuacgcgacuuucccucccacaaacccucgcgcccuuccuuuccuacuugggcccggcagaaagcuuaccauggagcugcucauccuuaaggccaacgcuauuaccacaauacugacugcagugacguucugcuuugccagcggccagaauaucaccgaagaguucuaccaauccacauguucugcggucucaaaaggguauuugggagcuuuaagaacugguugguacaccaguguuauuacaaucgaacugagcaacauuaaggagaauaaaugcaacggcaccgacgccaaggugaaacuaaucaagcaggaacucgauaaguauaaaaaugcaguaacugaccugcagcuucugaugcaguccacacccgccaccgggucuggaucggcuauauguucaggcguggcagucugcaagguguugcaccucgagggugagguuaacaaaaucaagagcgcccugcugaguacgaauaaagcuguggucucccucucuaacggggugagcguauuaacuuuuaagguucuggaucuuaagaauuacauugacaaacaauugcugccuauccuaaacaagcaguccuguucaauuccaaauaucgaaaccgugauagaguuccagcagaaaaacaauaggcuccuggaaauuacacgggaguuuagugucaacgccggagugacuaccccggugagcacauauaugcuuaccaauucugagcuguugucccucaucaacgauaugcccauuacgaacgaccaaaagaaacugaugucaaauaacguccagaucguucgccagcagagcuacaguaucaugugcauuauaaaggaagagguguuagcguauguagugcaacugccucucuacggcgucaucgauacuccauguuggaaacuucauacaucuccccugugcaccacuaauacaaaggaaggcuccaacauuuguuugacccgaacggaccgugggugguacugcgauaaugcaggaagcgugucguucuuuccucaggccgagaccuguaagguucagucuaacagaguguucugcgacacaaugaacucccuaacucugccaucagaagucaaucucugcaauguggauaucuuuaaccccaaauaugacuguaagauaaugaccaguaaaacagauguaagcuccucuguuauuacuagccugggugcuaucgugucaugcuacggcaagaccaaauguacagccaguaauaagaacagggggaucauuaagaccuucuccaauggaugcgacuaugucagcaacaaaggcguggacacugucucuguggguaauacgcuuuacuguguuaacaagcaagaggggcagucacuguaugugaaaggagagccuaucauuaacuuuuacgauccauugguauucccgagugacgaauuugaugcaagcauaucccaggucaaugagaagaucaaccagucucucgcuuucauucggaaaucggacgaacuguuacacaaugugaacgccggcaagagcacaaccaauaucaugaucacuaccauuauaaucguuauuaucgugauucugcuaucccucaucgcggucggccugcuuuuguauugcaaggcccgcucaacacccgugacccugaguaaagaucaacucucugggauaaacaauaucgcauucagcaacugaggacuagugaagggaacacccaaauuuaauucagccuuaagcacaauuaauuaagagugaaacguaauuguacaagcaguuggucacccaccauagggcaugaucaacaccgcaaccuuuccuuuuucccccagugauucugaaaaaccccucuucccuucagcuugcuuagauguuccaaauuuaguaagcuuaaggcggccuacagaagaaaaagaaaaaaaaggccacaaaaguucccucucacuuucaguaaauaaaauaaaagcagcaacagaaauaaagaaauaaaugaaauucaaaaugaaauaaauauuguguugugcagcauuaaaaaaucaauaaaaauuaaaaaugagcaagaucuaaaaaaaaaaaaaaaaaaaaaaaaaaaaaaaaaaaaaaaaaaaaaaaaaaaaaaaaaaaaaaaaugcaucccccccccccccccccccccccccccccccaaaggcucuuuucagagccaccagaauu

SEQ ID NO: 2683 - RNA, 2202 nt, Artificial Sequence
  mRNA product Design h-2 comprising derived and/or modified sequence from HRSV(A2)__F_DSCav1_mut2 (opt4)
gggagacccgugacccggaaguuguacggcuacgcgacuuucccucccacaaacccucgcgcccuuccuuuccuacuugggcccggcagaaagcuuaccauggagcugcugauccugaaggccaacgccaucaccaccauccugaccgccgugaccuucugcuucgccagcggccagaacaucaccgaggaguucuaccagagcaccugcagcgccgugagcaagggcuaccugggcgcccugagaaccggcugguacaccagcgugaucaccaucgagcugagcaacaucaaggagaacaagugcaacggcaccgacgccaaggugaagcugaucaagcaggagcuggacaaguacaagaacgccgugaccgaccugcagcugcugaugcagagcacccccgccaccggcagcggcagcgccaucugcagcggcguggccgugugcaaggugcugcaccuggagggcgaggugaacaagaucaagagcgcccugcugagcaccaacaaggccguggugagccugagcaacggcgugagcgugcugaccuucaaggugcuggaccugaagaacuacaucgacaagcagcugcugcccauccugaacaagcagagcugcagcauccccaacaucgagaccgugaucgaguuccagcagaagaacaacagacugcuggagaucaccagagaguucagcgugaacgccggcgugaccacccccgugagcaccuacaugcugaccaacagcgagcugcugagccugaucaacgacaugcccaucaccaacgaccagaagaagcugaugagcaacaacgugcagaucgugagacagcagagcuacagcaucaugugcaucaucaaggaggaggugcuggccuacguggugcagcugccccuguacggcgugaucgacacccccugcuggaagcugcacaccagcccccugugcaccaccaacaccaaggagggcagcaacaucugccugaccagaaccgacagaggcugguacugcgacaacgccggcagcgugagcuucuucccccaggccgagaccugcaaggugcagagcaacagaguguucugcgacaccaugaacagccugacccugcccagcgaggugaaccugugcaacguggacaucuucaaccccaaguacgacugcaagaucaugaccagcaagaccgacgugagcagcagcgugaucaccagccugggcgccaucgugagcugcuacggcaagaccaagugcaccgccagcaacaagaacagaggcaucaucaagaccuucagcaacggcugcgacuacgugagcaacaagggcguggacaccgugagcgugggcaacacccuguacugcgugaacaagcaggagggccagagccuguacgugaagggcgagcccaucaucaacuucuacgacccccugguguuccccagcgacgaguucgacgccagcaucagccaggugaacgagaagaucaaccagagccuggccuucaucagaaagagcgacgagcugcugcacaacgugaacgccggcaagagcaccaccaacaucaugaucaccaccaucaucaucgugaucaucgugauccugcugagccugaucgccgugggccugcugcuguacugcaaggccagaagcacccccgugacccugagcaaggaccagcugagcggcaucaacaacaucgccuucagcaacugaggacuagugaagggaacacccaaauuuaauucagccuuaagcacaauuaauuaagagugaaacguaauuguacaagcaguuggucacccaccauagggcaugaucaacaccgcaaccuuuccuuuuucccccagugauucugaaaaaccccucuucccuucagcuugcuuagauguuccaaauuuaguaagcuuaaggcggccuacagaagaaaaagaaaaaaaaggccacaaaaguucccucucacuuucaguaaauaaaauaaaagcagcaacagaaauaaagaaauaaaugaaauucaaaaugaaauaaauauuguguugugcagcauuaaaaaaucaauaaaaauuaaaaaugagcaagaucuaaaaaaaaaaaaaaaaaaaaaaaaaaaaaaaaaaaaaaaaaaaaaaaaaaaaaaaaaaaaaaaaugcaucccccccccccccccccccccccccccccccaaaggcucuuuucagagccaccagaauu

SEQ ID NO: 2684 - RNA, 2202 nt, Artificial Sequence
  mRNA product Design h-2 comprising derived and/or modified sequence from HRSV(A2)__F_DSCav1_mut2 (opt5)
gggagacccgugacccggaaguuguacggcuacgcgacuuucccucccacaaacccucgcgcccuuccuuuccuacuugggcccggcagaaagcuuaccauggagcugcucauccugaaggccaacgcuauuaccacaauccuuacggccgugaccuucugcuuugcgagcggccagaauauuacagaagaguucuaccaauccaccuguucugcugucagcaaaggguaucugggagcccucagaacaggcugguacaccuccguuaucacaauugaacugucuaacaucaaggagaauaaaugcaacgggaccgacgccaaggugaaacuuaucaagcaggaacuggauaaguauaaaaaugcugugacggaccuccagcugcugaugcagagcacccccgccacaggauccggcucugcuauuuguagcggggucgccgugugcaagguucuccaccuggagggagaggugaacaaaaucaaguccgcgcuucugagcaccaauaaagccgucgugucucucuccaacggcguuagcgugcugacauuuaagguccuugaucugaagaauuacauugacaaacaacuccugccuauccugaacaagcagucuuguuccauuccgaauaucgaaaccgugauugaguuccagcagaaaaacaaucggcuccuggaaaucacgcgcgaguuuagcgugaacgcuggcgucacaacccccguuucuacauauaugcuuaccaauuccgagcugcucagccugaucaacgauaugccuauuaccaacgaccaaaagaaacuuauguccaauaacgugcagaucgugagacagcagucuuacagcauuaugugcaucauuaaggaagagguccuggccuaugugguucaacucccccuguacggggugaucgauacaccuuguuggaaacugcauacgagcccccucugcaccacaaauaccaaggaaggauccaacaucugucugacacggaccgaccgcggcugguacugcgauaaugcugggucugucuccuucuuuccucaggccgagacguguaaggugcagagcaacagaguuuucugcgacacaaugaacucucuuacccugccgagcgaagugaaucucugcaaugucgauauuuuuaaccccaaauaugacuguaagaucaugaccuccaaaacagaugugucuagcuccgucauuaccagccugggagcgaucgugucuugcuacggcaagacaaaauguacggccuccaauaagaaccgggggauuaucaagaccuucagcaauggaugcgacuauguuucuaacaaaggcguggacacagucuccgugggcaauacccuuuacuguguuaacaagcaagaggggcagagccuguaugugaaaggagagccuaucauuaacuuuuacgauccccucgucuucccuuccgacgaauuugaugcuucuaucagccaggugaaugagaagauuaaccagucccuggccuucauccgcaaaucugacgaacugcuccacaaugugaacgcuggcaagagcacaaccaauauuaugaucacgaccauuaucaucguuauuaucgucauucugcuuucccugaucgccguggggcuccugcuguauugcaaggccagaagcacacccgugacccuuucuaaagaucaacucuccggaauuaacaauaucgcuuucagcaacugaggacuagugaagggaacacccaaauuuaauucagccuuaagcacaauuaauuaagagugaaacguaauuguacaagcaguuggucacccaccauagggcaugaucaacaccgcaaccuuuccuuuuucccccagugauucugaaaaaccccucuucccuucagcuugcuuagauguuccaaauuuaguaagcuuaaggcggccuacagaagaaaaagaaaaaaaaggccacaaaaguucccucucacuuucaguaaauaaaauaaaagcagcaacagaaauaaagaaauaaaugaaauucaaaaugaaauaaauauuguguugugcagcauuaaaaaaucaauaaaaauuaaaaaugagcaagaucuaaaaaaaaaaaaaaaaaaaaaaaaaaaaaaaaaaaaaaaaaaaaaaaaaaaaaaaaaaaaaaaaugcaucccccccccccccccccccccccccccccccaaaggcucuuuucagagccaccagaauu

SEQ ID NO: 2685 - RNA, 2202 nt, Artificial Sequence
  mRNA product Design h-2 comprising derived and/or modified sequence from HRSV(A2)__F_DSCav1_mut2 (opt6)
gggagacccgugacccggaaguuguacggcuacgcgacuuucccucccacaaacccucgcgcccuuccuuuccuacuugggcccggcagaaagcuuaccauggaacuacuaauccuaaaagcaaacgcaauuacaacuauacuuaccgccguaacauuuugcuucgcaucugggcaaaacauuaccgaagaauuuuaucaaucaacaugcucagcagucuccaaaggauaccuuggagcauuaagaaccggcugguauaccuccguaauaacaauugaacuaucuaauauaaaagaaaauaaauguaauggaacugacgcaaaaguuaaacuaauaaaacaagaacucgacaaauacaaaaacgccgucacagaccuacaacuacuaaugcaaucaacccccgcaacaggaucaggauccgcaaucugcagcggcgucgcaguuugcaaaguccuacauuuagaaggagaaguaaacaaaauaaaaucugcucuccucucuacaaacaaagcaguagugucacuuucaaacggaguaucaguucuaacauucaaaguacuagaccuaaaaaauuacauagacaaacaacuacuuccaauucuaaacaaacaauccuguuccauacccaacauagaaacaguaauagaauuucaacaaaaaaauaacagacuccuagaaauuacaagagaauuuuccgucaaugcaggaguaacaaccccaguaucaaccuacauguuaacuaacucagaacucuuaucacuaauaaacgacaugccaaucacuaaugaccaaaaaaaacucaugucaaauaacguacaaauaguccgacaacaaucauacuccaucaugugcauuauaaaagaagaaguacuagcauacgucguccaauuaccacuauacggcgucauagacacaccauguuggaaacuccacacaucaccacuaugcacuacaaauacaaaagaaggcuccaacaucugccuaacaagaacagacagagguugguauugcgacaacgcaggaucaguaucauuuuucccccaagcagaaacauguaaaguacaaucaaauagagucuucugcgacaccaugaacucauuaacacuaccuucagaagucaaccuaugcaacguagacaucuucaacccuaaauaugacugcaaaaucaugaccagcaaaaccgacguuucaucuuccguaauaacaucacuaggcgcaauagucucauguuacggcaaaacaaaauguacagcaucaaauaaaaaccguggaauaauaaaaacauuuucuaaugguugugacuacguaagcaauaaaggaguagauacaguaucagucggcaacaccuuauacuguguaaacaaacaagaaggccaaaguuuauacgucaaaggagaacccaucaucaacuucuacgacccauuaguauucccaucagacgaauuugaugcaagcauuucacaagucaacgaaaaaaucaaucaaucauuagcauucauccgaaaaucagacgaauuauuacacaacguaaacgccggaaaaucaaccacuaauauaaugauaaccacaauaaucaucguaauaauaguaauacuucucucacuaaucgcagucggacuccuucuauacugcaaagcaagaucuacaccaguaacacuauccaaagaucaacuaaguggcauaaacaacauagcauuuucuaacuaaggacuagugaagggaacacccaaauuuaauucagccuuaagcacaauuaauuaagagugaaacguaauuguacaagcaguuggucacccaccauagggcaugaucaacaccgcaaccuuuccuuuuucccccagugauucugaaaaaccccucuucccuucagcuugcuuagauguuccaaauuuaguaagcuuaaggcggccuacagaagaaaaagaaaaaaaaggccacaaaaguucccucucacuuucaguaaauaaaauaaaagcagcaacagaaauaaagaaauaaaugaaauucaaaaugaaauaaauauuguguugugcagcauuaaaaaaucaauaaaaauuaaaaaugagcaagaucuaaaaaaaaaaaaaaaaaaaaaaaaaaaaaaaaaaaaaaaaaaaaaaaaaaaaaaaaaaaaaaaaugcaucccccccccccccccccccccccccccccccaaaggcucuuuucagagccaccagaauu

SEQ ID NO: 2686 - RNA, 2202 nt, Artificial Sequence
  mRNA product Design h-2 comprising derived and/or modified sequence from HRSV(A2)__F_DSCav1_mut2 (opt11)
gggagacccgugacccggaaguuguacggcuacgcgacuuucccucccacaaacccucgcgcccuuccuuuccuacuugggcccggcagaaagcuuaccauggaacuccucauccuaaaagccaacgcgaucaccacaauccugacagccgucaccuucugcuucgccuccggccaaaacaucaccgaagaguucuaccaauccacaugcuccgccgucuccaagggcuaccugggcgcacuucguacaggcugguacaccuccguaauaaccaucgaacucuccaacaucaaagaaaacaaaugcaacggcacagacgcaaaagucaaacucaucaagcaagaacuugacaaauacaaaaaugcagucaccgaccuucaacuccucaugcaaucuacccccgccacaggcuccggcuccgcuaucugcuccggcgucgccgucugcaaaguccuccaccucgaaggugaaguaaacaaaauaaaauccgcccuccucuccaccaacaaagccgucgucucccuaucaaacggcgucuccgugcucaccuucaagguucucgaccugaaaaacuacauagacaaacagcuccuaccaauccuuaacaaacagagcugcuccauuccgaauaucgaaacgguaaucgaauuucaacagaaaaacaaccgccuccucgaaauaacgcgagaguucuccguaaacgcuggcgucaccacacccgucagcaccuacaugcuaacgaacuccgaacucuugucgcucaucaacgacaugcccauaaccaacgaccaaaagaaacuaauguccaauaacguacaaaucguacgccaacaaucuuacuccaucaugugcaucauaaaagaagaaguacuagcuuacgucguccaacucccacuguacggagucaucgacacccccugcuggaaacuccacaccucuccccucugcaccaccaacaccaaagagggcuccaacauuugccugacacgcaccgaccgcggcugguacugcgacaacgcaggcuccgucucguucuucccccaagccgaaaccugcaaaguccaauccaaccgcgucuucugcgacaccaugaacucccucacccuccccuccgaagucaaucuaugcaacguagacaucuucaacccgaaauaugacugcaaaauuaugacaucuaaaaccgacguguccuccucagucaucacuucccuaggagccaucguuuccuguuacggcaagaccaaaugcaccgccagcaacaaaaaccgaggcaucaucaaaaccuucuccaacggaugugacuaugucuccaacaagggcgucgacaccgucagcgucggcaacacccucuacugcgucaacaaacaagaaggccaaucccucuacgucaaaggagagcccauaaucaacuucuacgacccccucgucuucccauccgacgaguucgacgccucaaucucccaagucaacgagaaaaucaaccaauccuuagccuucauccguaaguccgacgaacuccuucacaacgucaacgccgguaaaucuaccaccaacaucaugauaacaacaauaauuaucgucaucaucgucauccuccuuucccucaucgcggucgggcuauugcucuacugcaaagcccgguccaccccaguaacccucucuaaagaccaacucagcggaaucaauaacauagccuucagcaauuaaggacuagugaagggaacacccaaauuuaauucagccuuaagcacaauuaauuaagagugaaacguaauuguacaagcaguuggucacccaccauagggcaugaucaacaccgcaaccuuuccuuuuucccccagugauucugaaaaaccccucuucccuucagcuugcuuagauguuccaaauuuaguaagcuuaaggcggccuacagaagaaaaagaaaaaaaaggccacaaaaguucccucucacuuucaguaaauaaaauaaaagcagcaacagaaauaaagaaauaaaugaaauucaaaaugaaauaaauauuguguugugcagcauuaaaaaaucaauaaaaauuaaaaaugagcaagaucuaaaaaaaaaaaaaaaaaaaaaaaaaaaaaaaaaaaaaaaaaaaaaaaaaaaaaaaaaaaaaaaaugcaucccccccccccccccccccccccccccccccaaaggcucuuuucagagccaccagaauu

SEQ ID NO: 2687 - RNA, 1982 nt, Artificial Sequence
  mRNA product Design h-3 comprising derived and/or modified sequence from HRSV(A2)__F_DSCav1_mut2 (opt1)
gggagacccgugacccggaaguuguacggcuacgcgacuuucccucccacaaacccucgcgcccuuccuuuccuacuugggcccggcagaaagcuuaccauggagcugcucauccugaaggccaacgccaucaccaccauccugacggcggugaccuucugcuucgccagcggccagaacaucaccgaggaguucuaccaguccacgugcagcgccgucuccaagggguaccucggcgcccugcggaccggcugguacaccuccgugaucaccaucgagcugagcaacaucaaggagaacaagugcaacgggaccgacgccaaggugaagcucaucaagcaggagcuggacaaguacaagaacgcggucacggaccugcagcuccugaugcaguccaccccggcaaccggcuccggcuccgccaucugcagcggcgucgccgugugcaaggugcugcaccucgagggggaggucaacaagaucaagagcgcccugcuguccaccaacaaggccguggugagccucuccaacggcgucagcgugcugaccuucaaggugcuggaccucaagaacuacaucgacaagcagcugcugcccauccugaacaagcagagcugcuccauccccaacaucgagacggugaucgaguuccagcagaagaacaaccggcuccuggagaucacccgcgaguucagcgugaacgccggggucaccacccccguguccacguacaugcugaccaacagcgagcuccugucccugaucaacgacaugccgaucaccaacgaccagaagaagcucaugagcaacaacgugcagaucguccggcagcaguccuacagcaucaugugcaucaucaaggaggaggugcuggcguacgugguccagcugccccucuacggcgugaucgacacccccugcuggaagcugcacacgagcccccugugcaccaccaacaccaaggagggguccaacaucugccucacgcgcaccgaccggggcugguacugcgacaacgccggcagcgucuccuucuucccgcaggccgagaccugcaaggugcagagcaaccgcguguucugcgacaccaugaacucccugacgcugcccagcgagguaaaccucugcaacgucgacaucuucaaccccaaguacgacugcaagaucaugaccuccaagaccgacgugagcuccagcgugaucaccucccugggggccaucgucagcugcuacggcaagacgaagugcaccgccagcaacaagaaccgggggaucaucaagaccuucuccaacggcugcgacuacgugagcaacaagggcguggacaccguguccgucgggaacacccuguacugcgugaacaagcaggagggccagagccucuacgugaagggggagcccaucaucaacuucuacgacccgcuggucuuccccuccgacgaguucgacgcgagcaucucccaggugaacgagaagaucaaccagagccuggccuucauccgcaaguccgacgagcugcuccacaacgugaacgccggcaagagcacgaccaacaucaugaucaccaccaucaucaucgucaucaucgugauccugcugucccucaucgccguggggcugcugcucuacugcaaggcccggagcacgcccgucacccuguccaaggaccagcugagcggcaucaacaacaucgcguucuccaacugaggacuaguggaagcauuuuccuggcugauuaaaagaaauuacucagcuauggucaucuguuccuguuagaaggcuaugcagcauauuauauacuaugcgcauguuaugaaaugcauaauaaaaaauuuuaaaaaaucuaaaagaucuaaaaaaaaaaaaaaaaaaaaaaaaaaaaaaaaaaaaaaaaaaaaaaaaaaaaaaaaaaaaaaaaugcaucccccccccccccccccccccccccccccccaaaggcucuuuucagagccaccagaauu

SEQ ID NO: 2688 - RNA, 1982 nt, Artificial Sequence
  mRNA product Design h-3 comprising derived and/or modified sequence from HRSV(A2)__F_DSCav1_mut2 (opt1)
gggagacccgugacccggaaguuguacggcuacgcgacuuucccucccacaaacccucgcgcccuuccuuuccuacuugggcccggcagaaagcuuaccauggagcugcucauccugaaggccaacgccaucaccaccauccugacggcggugaccuucugcuucgccagcggccagaacaucaccgaggaguucuaccaguccacgugcagcgccgucuccaagggguaccucggcgcccugcgcaccgggugguacaccagcgugaucaccaucgagcuguccaacaucaaggagaacaagugcaacggcaccgacgccaaggugaagcucaucaagcaggagcuggacaaguacaagaacgcggucacggaccugcagcuccugaugcagagcacccccgccaccggguccggcagcgccaucugcuccggcguggccgugugcaagguccugcaccucgagggggaggugaacaagaucaagagcgcgcugcuguccaccaacaaggccguggucagccucuccaacggcgugagcgugcugacguucaagguccuggaccucaagaacuacaucgacaagcagcugcugccgauccucaacaagcaguccugcagcauccccaacaucgagaccgugaucgaguuccagcagaagaacaaccggcugcuggagaucacccgcgaguucuccgugaacgccggggucaccacgcccgugagcaccuacaugcucaccaacuccgagcugcugagccucaucaacgacaugcccaucaccaacgaccagaagaagcugaugagcaacaacgugcagaucguccggcagcaguccuacagcaucaugugcaucaucaaggaggaggugcuggccuacgugguccagcucccgcuguacggcgugaucgacacgcccugcuggaagcugcacaccagcccccucugcaccaccaacacgaaggagggguccaacaucugccugacccgcaccgaccggggcugguacugcgacaacgccggcuccgugagcuucuucccccaggcggagaccugcaagguccaguccaaccgcguguucugcgacacgaugaacagccugacccucccguccgaggucaaccugugcaacguggacaucuucaaccccaaguacgacugcaagaucaugaccagcaagaccgacguguccagcuccgucaucacgagccugggggccaucguguccugcuacggcaagaccaagugcaccgccagcaacaagaaccgggggaucaucaagaccuucuccaacggcugcgacuacgugagcaacaagggcgucgacacgguguccguggggaacacccucuacugcgucaacaagcaggagggccagagccuguacgugaagggggagcccaucaucaacuucuacgacccccugguguucccgagcgacgaguucgacgccuccaucagccaggucaacgagaagaucaaccagucccucgccuucauccgcaagagcgacgagcugcugcacaacgugaacgcgggcaaguccaccaccaacaucaugaucaccacgaucaucaucgugaucaucgucauccuccugagccugaucgccguggggcuccugcuguacugcaaggcccgguccacccccgugacccugagcaaggaccagcucuccggcaucaacaacaucgccuucagcaacugaggacuaguggaagcauuuuccuggcugauuaaaagaaauuacucagcuauggucaucuguuccuguuagaaggcuaugcagcauauuauauacuaugcgcauguuaugaaaugcauaauaaaaaauuuuaaaaaaucuaaaagaucuaaaaaaaaaaaaaaaaaaaaaaaaaaaaaaaaaaaaaaaaaaaaaaaaaaaaaaaaaaaaaaaaugcaucccccccccccccccccccccccccccccccaaaggcucuuuucagagccaccagaauu

SEQ ID NO: 2689 - RNA, 1982 nt, Artificial Sequence
  mRNA product Design h-3 comprising derived and/or modified sequence from HRSV(A2)__F_DSCav1_mut2 (opt2)
gggagacccgugacccggaaguuguacggcuacgcgacuuucccucccacaaacccucgcgcccuuccuuuccuacuugggcccggcagaaagcuuaccauggagcuccucauccucaaggccaacgccaucaccaccauccucaccgccgucaccuucugcuucgccuccggccagaacaucaccgaggaguucuaccaguccaccugcuccgccgucuccaagggcuaccucggcgcccuccgcaccggcugguacaccuccgucaucaccaucgagcucuccaacaucaaggagaacaagugcaacggcaccgacgccaaggucaagcucaucaagcaggagcucgacaaguacaagaacgccgucaccgaccuccagcuccucaugcaguccacccccgccaccggcuccggcuccgccaucugcuccggcgucgccgucugcaagguccuccaccucgagggcgaggucaacaagaucaaguccgcccuccucuccaccaacaaggccgucgucucccucuccaacggcgucuccguccucaccuucaagguccucgaccucaagaacuacaucgacaagcagcuccuccccauccucaacaagcaguccugcuccauccccaacaucgagaccgucaucgaguuccagcagaagaacaaccgccuccucgagaucacccgcgaguucuccgucaacgccggcgucaccacccccgucuccaccuacaugcucaccaacuccgagcuccucucccucaucaacgacaugcccaucaccaacgaccagaagaagcucauguccaacaacguccagaucguccgccagcaguccuacuccaucaugugcaucaucaaggaggagguccucgccuacgucguccagcucccccucuacggcgucaucgacacccccugcuggaagcuccacaccuccccccucugcaccaccaacaccaaggagggcuccaacaucugccucacccgcaccgaccgcggcugguacugcgacaacgccggcuccgucuccuucuucccccaggccgagaccugcaagguccaguccaaccgcgucuucugcgacaccaugaacucccucacccuccccuccgaggucaaccucugcaacgucgacaucuucaaccccaaguacgacugcaagaucaugaccuccaagaccgacgucuccuccuccgucaucaccucccucggcgccaucgucuccugcuacggcaagaccaagugcaccgccuccaacaagaaccgcggcaucaucaagaccuucuccaacggcugcgacuacgucuccaacaagggcgucgacaccgucuccgucggcaacacccucuacugcgucaacaagcaggagggccagucccucuacgucaagggcgagcccaucaucaacuucuacgacccccucgucuuccccuccgacgaguucgacgccuccaucucccaggucaacgagaagaucaaccagucccucgccuucauccgcaaguccgacgagcuccuccacaacgucaacgccggcaaguccaccaccaacaucaugaucaccaccaucaucaucgucaucaucgucauccuccucucccucaucgccgucggccuccuccucuacugcaaggcccgcuccacccccgucacccucuccaaggaccagcucuccggcaucaacaacaucgccuucuccaacugaggacuaguggaagcauuuuccuggcugauuaaaagaaauuacucagcuauggucaucuguuccuguuagaaggcuaugcagcauauuauauacuaugcgcauguuaugaaaugcauaauaaaaaauuuuaaaaaaucuaaaagaucuaaaaaaaaaaaaaaaaaaaaaaaaaaaaaaaaaaaaaaaaaaaaaaaaaaaaaaaaaaaaaaaaugcaucccccccccccccccccccccccccccccccaaaggcucuuuucagagccaccagaauu

SEQ ID NO: 2690 - RNA, 1982 nt, Artificial Sequence
  mRNA product Design h-3 comprising derived and/or modified sequence from HRSV(A2)__F_DSCav1_mut2 (opt3)
gggagacccgugacccggaaguuguacggcuacgcgacuuucccucccacaaacccucgcgcccuuccuuuccuacuugggcccggcagaaagcuuaccauggagcugcucauccuuaaggccaacgcuauuaccacaauacugacugcagugacguucugcuuugccagcggccagaauaucaccgaagaguucuaccaauccacauguucugcggucucaaaaggguauuugggagcuuuaagaacugguugguacaccaguguuauuacaaucgaacugagcaacauuaaggagaauaaaugcaacggcaccgacgccaaggugaaacuaaucaagcaggaacucgauaaguauaaaaaugcaguaacugaccugcagcuucugaugcaguccacacccgccaccgggucuggaucggcuauauguucaggcguggcagucugcaagguguugcaccucgagggugagguuaacaaaaucaagagcgcccugcugaguacgaauaaagcuguggucucccucucuaacggggugagcguauuaacuuuuaagguucuggaucuuaagaauuacauugacaaacaauugcugccuauccuaaacaagcaguccuguucaauuccaaauaucgaaaccgugauagaguuccagcagaaaaacaauaggcuccuggaaauuacacgggaguuuagugucaacgccggagugacuaccccggugagcacauauaugcuuaccaauucugagcuguugucccucaucaacgauaugcccauuacgaacgaccaaaagaaacugaugucaaauaacguccagaucguucgccagcagagcuacaguaucaugugcauuauaaaggaagagguguuagcguauguagugcaacugccucucuacggcgucaucgauacuccauguuggaaacuucauacaucuccccugugcaccacuaauacaaaggaaggcuccaacauuuguuugacccgaacggaccgugggugguacugcgauaaugcaggaagcgugucguucuuuccucaggccgagaccuguaagguucagucuaacagaguguucugcgacacaaugaacucccuaacucugccaucagaagucaaucucugcaauguggauaucuuuaaccccaaauaugacuguaagauaaugaccaguaaaacagauguaagcuccucuguuauuacuagccugggugcuaucgugucaugcuacggcaagaccaaauguacagccaguaauaagaacagggggaucauuaagaccuucuccaauggaugcgacuaugucagcaacaaaggcguggacacugucucuguggguaauacgcuuuacuguguuaacaagcaagaggggcagucacuguaugugaaaggagagccuaucauuaacuuuuacgauccauugguauucccgagugacgaauuugaugcaagcauaucccaggucaaugagaagaucaaccagucucucgcuuucauucggaaaucggacgaacuguuacacaaugugaacgccggcaagagcacaaccaauaucaugaucacuaccauuauaaucguuauuaucgugauucugcuaucccucaucgcggucggccugcuuuuguauugcaaggcccgcucaacacccgugacccugaguaaagaucaacucucugggauaaacaauaucgcauucagcaacugaggacuaguggaagcauuuuccuggcugauuaaaagaaauuacucagcuauggucaucuguuccuguuagaaggcuaugcagcauauuauauacuaugcgcauguuaugaaaugcauaauaaaaaauuuuaaaaaaucuaaaagaucuaaaaaaaaaaaaaaaaaaaaaaaaaaaaaaaaaaaaaaaaaaaaaaaaaaaaaaaaaaaaaaaaugcaucccccccccccccccccccccccccccccccaaaggcucuuuucagagccaccagaauu

SEQ ID NO: 2691 - RNA, 1982 nt, Artificial Sequence
  mRNA product Design h-3 comprising derived and/or modified sequence from HRSV(A2)__F_DSCav1_mut2 (opt4)
gggagacccgugacccggaaguuguacggcuacgcgacuuucccucccacaaacccucgcgcccuuccuuuccuacuugggcccggcagaaagcuuaccauggagcugcugauccugaaggccaacgccaucaccaccauccugaccgccgugaccuucugcuucgccagcggccagaacaucaccgaggaguucuaccagagcaccugcagcgccgugagcaagggcuaccugggcgcccugagaaccggcugguacaccagcgugaucaccaucgagcugagcaacaucaaggagaacaagugcaacggcaccgacgccaaggugaagcugaucaagcaggagcuggacaaguacaagaacgccgugaccgaccugcagcugcugaugcagagcacccccgccaccggcagcggcagcgccaucugcagcggcguggccgugugcaaggugcugcaccuggagggcgaggugaacaagaucaagagcgcccugcugagcaccaacaaggccguggugagccugagcaacggcgugagcgugcugaccuucaaggugcuggaccugaagaacuacaucgacaagcagcugcugcccauccugaacaagcagagcugcagcauccccaacaucgagaccgugaucgaguuccagcagaagaacaacagacugcuggagaucaccagagaguucagcgugaacgccggcgugaccacccccgugagcaccuacaugcugaccaacagcgagcugcugagccugaucaacgacaugcccaucaccaacgaccagaagaagcugaugagcaacaacgugcagaucgugagacagcagagcuacagcaucaugugcaucaucaaggaggaggugcuggccuacguggugcagcugccccuguacggcgugaucgacacccccugcuggaagcugcacaccagcccccugugcaccaccaacaccaaggagggcagcaacaucugccugaccagaaccgacagaggcugguacugcgacaacgccggcagcgugagcuucuucccccaggccgagaccugcaaggugcagagcaacagaguguucugcgacaccaugaacagccugacccugcccagcgaggugaaccugugcaacguggacaucuucaaccccaaguacgacugcaagaucaugaccagcaagaccgacgugagcagcagcgugaucaccagccugggcgccaucgugagcugcuacggcaagaccaagugcaccgccagcaacaagaacagaggcaucaucaagaccuucagcaacggcugcgacuacgugagcaacaagggcguggacaccgugagcgugggcaacacccuguacugcgugaacaagcaggagggccagagccuguacgugaagggcgagcccaucaucaacuucuacgacccccugguguuccccagcgacgaguucgacgccagcaucagccaggugaacgagaagaucaaccagagccuggccuucaucagaaagagcgacgagcugcugcacaacgugaacgccggcaagagcaccaccaacaucaugaucaccaccaucaucaucgugaucaucgugauccugcugagccugaucgccgugggccugcugcuguacugcaaggccagaagcacccccgugacccugagcaaggaccagcugagcggcaucaacaacaucgccuucagcaacugaggacuaguggaagcauuuuccuggcugauuaaaagaaauuacucagcuauggucaucuguuccuguuagaaggcuaugcagcauauuauauacuaugcgcauguuaugaaaugcauaauaaaaaauuuuaaaaaaucuaaaagaucuaaaaaaaaaaaaaaaaaaaaaaaaaaaaaaaaaaaaaaaaaaaaaaaaaaaaaaaaaaaaaaaaugcaucccccccccccccccccccccccccccccccaaaggcucuuuucagagccaccagaauu

SEQ ID NO: 2692 - RNA, 1982 nt, Artificial Sequence
  mRNA product Design h-3 comprising derived and/or modified sequence from HRSV(A2)__F_DSCav1_mut2 (opt5)
gggagacccgugacccggaaguuguacggcuacgcgacuuucccucccacaaacccucgcgcccuuccuuuccuacuugggcccggcagaaagcuuaccauggagcugcucauccugaaggccaacgcuauuaccacaauccuuacggccgugaccuucugcuuugcgagcggccagaauauuacagaagaguucuaccaauccaccuguucugcugucagcaaaggguaucugggagcccucagaacaggcugguacaccuccguuaucacaauugaacugucuaacaucaaggagaauaaaugcaacgggaccgacgccaaggugaaacuuaucaagcaggaacuggauaaguauaaaaaugcugugacggaccuccagcugcugaugcagagcacccccgccacaggauccggcucugcuauuuguagcggggucgccgugugcaagguucuccaccuggagggagaggugaacaaaaucaaguccgcgcuucugagcaccaauaaagccgucgugucucucuccaacggcguuagcgugcugacauuuaagguccuugaucugaagaauuacauugacaaacaacuccugccuauccugaacaagcagucuuguuccauuccgaauaucgaaaccgugauugaguuccagcagaaaaacaaucggcuccuggaaaucacgcgcgaguuuagcgugaacgcuggcgucacaacccccguuucuacauauaugcuuaccaauuccgagcugcucagccugaucaacgauaugccuauuaccaacgaccaaaagaaacuuauguccaauaacgugcagaucgugagacagcagucuuacagcauuaugugcaucauuaaggaagagguccuggccuaugugguucaacucccccuguacggggugaucgauacaccuuguuggaaacugcauacgagcccccucugcaccacaaauaccaaggaaggauccaacaucugucugacacggaccgaccgcggcugguacugcgauaaugcugggucugucuccuucuuuccucaggccgagacguguaaggugcagagcaacagaguuuucugcgacacaaugaacucucuuacccugccgagcgaagugaaucucugcaaugucgauauuuuuaaccccaaauaugacuguaagaucaugaccuccaaaacagaugugucuagcuccgucauuaccagccugggagcgaucgugucuugcuacggcaagacaaaauguacggccuccaauaagaaccgggggauuaucaagaccuucagcaauggaugcgacuauguuucuaacaaaggcguggacacagucuccgugggcaauacccuuuacuguguuaacaagcaagaggggcagagccuguaugugaaaggagagccuaucauuaacuuuuacgauccccucgucuucccuuccgacgaauuugaugcuucuaucagccaggugaaugagaagauuaaccagucccuggccuucauccgcaaaucugacgaacugcuccacaaugugaacgcuggcaagagcacaaccaauauuaugaucacgaccauuaucaucguuauuaucgucauucugcuuucccugaucgccguggggcuccugcuguauugcaaggccagaagcacacccgugacccuuucuaaagaucaacucuccggaauuaacaauaucgcuuucagcaacugaggacuaguggaagcauuuuccuggcugauuaaaagaaauuacucagcuauggucaucuguuccuguuagaaggcuaugcagcauauuauauacuaugcgcauguuaugaaaugcauaauaaaaaauuuuaaaaaaucuaaaagaucuaaaaaaaaaaaaaaaaaaaaaaaaaaaaaaaaaaaaaaaaaaaaaaaaaaaaaaaaaaaaaaaaugcaucccccccccccccccccccccccccccccccaaaggcucuuuucagagccaccagaauu

SEQ ID NO: 2693 - RNA, 1982 nt, Artificial Sequence
  mRNA product Design h-3 comprising derived and/or modified sequence from HRSV(A2)__F_DSCav1_mut2 (opt6)
gggagacccgugacccggaaguuguacggcuacgcgacuuucccucccacaaacccucgcgcccuuccuuuccuacuugggcccggcagaaagcuuaccauggaacuacuaauccuaaaagcaaacgcaauuacaacuauacuuaccgccguaacauuuugcuucgcaucugggcaaaacauuaccgaagaauuuuaucaaucaacaugcucagcagucuccaaaggauaccuuggagcauuaagaaccggcugguauaccuccguaauaacaauugaacuaucuaauauaaaagaaaauaaauguaauggaacugacgcaaaaguuaaacuaauaaaacaagaacucgacaaauacaaaaacgccgucacagaccuacaacuacuaaugcaaucaacccccgcaacaggaucaggauccgcaaucugcagcggcgucgcaguuugcaaaguccuacauuuagaaggagaaguaaacaaaauaaaaucugcucuccucucuacaaacaaagcaguagugucacuuucaaacggaguaucaguucuaacauucaaaguacuagaccuaaaaaauuacauagacaaacaacuacuuccaauucuaaacaaacaauccuguuccauacccaacauagaaacaguaauagaauuucaacaaaaaaauaacagacuccuagaaauuacaagagaauuuuccgucaaugcaggaguaacaaccccaguaucaaccuacauguuaacuaacucagaacucuuaucacuaauaaacgacaugccaaucacuaaugaccaaaaaaaacucaugucaaauaacguacaaauaguccgacaacaaucauacuccaucaugugcauuauaaaagaagaaguacuagcauacgucguccaauuaccacuauacggcgucauagacacaccauguuggaaacuccacacaucaccacuaugcacuacaaauacaaaagaaggcuccaacaucugccuaacaagaacagacagagguugguauugcgacaacgcaggaucaguaucauuuuucccccaagcagaaacauguaaaguacaaucaaauagagucuucugcgacaccaugaacucauuaacacuaccuucagaagucaaccuaugcaacguagacaucuucaacccuaaauaugacugcaaaaucaugaccagcaaaaccgacguuucaucuuccguaauaacaucacuaggcgcaauagucucauguuacggcaaaacaaaauguacagcaucaaauaaaaaccguggaauaauaaaaacauuuucuaaugguugugacuacguaagcaauaaaggaguagauacaguaucagucggcaacaccuuauacuguguaaacaaacaagaaggccaaaguuuauacgucaaaggagaacccaucaucaacuucuacgacccauuaguauucccaucagacgaauuugaugcaagcauuucacaagucaacgaaaaaaucaaucaaucauuagcauucauccgaaaaucagacgaauuauuacacaacguaaacgccggaaaaucaaccacuaauauaaugauaaccacaauaaucaucguaauaauaguaauacuucucucacuaaucgcagucggacuccuucuauacugcaaagcaagaucuacaccaguaacacuauccaaagaucaacuaaguggcauaaacaacauagcauuuucuaacuaaggacuaguggaagcauuuuccuggcugauuaaaagaaauuacucagcuauggucaucuguuccuguuagaaggcuaugcagcauauuauauacuaugcgcauguuaugaaaugcauaauaaaaaauuuuaaaaaaucuaaaagaucuaaaaaaaaaaaaaaaaaaaaaaaaaaaaaaaaaaaaaaaaaaaaaaaaaaaaaaaaaaaaaaaaugcaucccccccccccccccccccccccccccccccaaaggcucuuuucagagccaccagaauu

SEQ ID NO: 2694 - RNA, 1982 nt, Artificial Sequence
  mRNA product Design h-3 comprising derived and/or modified sequence from HRSV(A2)__F_DSCav1_mut2 (opt11)
gggagacccgugacccggaaguuguacggcuacgcgacuuucccucccacaaacccucgcgcccuuccuuuccuacuugggcccggcagaaagcuuaccauggaacuccucauccuaaaagccaacgcgaucaccacaauccugacagccgucaccuucugcuucgccuccggccaaaacaucaccgaagaguucuaccaauccacaugcuccgccgucuccaagggcuaccugggcgcacuucguacaggcugguacaccuccguaauaaccaucgaacucuccaacaucaaagaaaacaaaugcaacggcacagacgcaaaagucaaacucaucaagcaagaacuugacaaauacaaaaaugcagucaccgaccuucaacuccucaugcaaucuacccccgccacaggcuccggcuccgcuaucugcuccggcgucgccgucugcaaaguccuccaccucgaaggugaaguaaacaaaauaaaauccgcccuccucuccaccaacaaagccgucgucucccuaucaaacggcgucuccgugcucaccuucaagguucucgaccugaaaaacuacauagacaaacagcuccuaccaauccuuaacaaacagagcugcuccauuccgaauaucgaaacgguaaucgaauuucaacagaaaaacaaccgccuccucgaaauaacgcgagaguucuccguaaacgcuggcgucaccacacccgucagcaccuacaugcuaacgaacuccgaacucuugucgcucaucaacgacaugcccauaaccaacgaccaaaagaaacuaauguccaauaacguacaaaucguacgccaacaaucuuacuccaucaugugcaucauaaaagaagaaguacuagcuuacgucguccaacucccacuguacggagucaucgacacccccugcuggaaacuccacaccucuccccucugcaccaccaacaccaaagagggcuccaacauuugccugacacgcaccgaccgcggcugguacugcgacaacgcaggcuccgucucguucuucccccaagccgaaaccugcaaaguccaauccaaccgcgucuucugcgacaccaugaacucccucacccuccccuccgaagucaaucuaugcaacguagacaucuucaacccgaaauaugacugcaaaauuaugacaucuaaaaccgacguguccuccucagucaucacuucccuaggagccaucguuuccuguuacggcaagaccaaaugcaccgccagcaacaaaaaccgaggcaucaucaaaaccuucuccaacggaugugacuaugucuccaacaagggcgucgacaccgucagcgucggcaacacccucuacugcgucaacaaacaagaaggccaaucccucuacgucaaaggagagcccauaaucaacuucuacgacccccucgucuucccauccgacgaguucgacgccucaaucucccaagucaacgagaaaaucaaccaauccuuagccuucauccguaaguccgacgaacuccuucacaacgucaacgccgguaaaucuaccaccaacaucaugauaacaacaauaauuaucgucaucaucgucauccuccuuucccucaucgcggucgggcuauugcucuacugcaaagcccgguccaccccaguaacccucucuaaagaccaacucagcggaaucaauaacauagccuucagcaauuaaggacuaguggaagcauuuuccuggcugauuaaaagaaauuacucagcuauggucaucuguuccuguuagaaggcuaugcagcauauuauauacuaugcgcauguuaugaaaugcauaauaaaaaauuuuaaaaaaucuaaaagaucuaaaaaaaaaaaaaaaaaaaaaaaaaaaaaaaaaaaaaaaaaaaaaaaaaaaaaaaaaaaaaaaaugcaucccccccccccccccccccccccccccccccaaaggcucuuuucagagccaccagaauu

SEQ ID NO: 2695 - RNA, 2045 nt, Artificial Sequence
  mRNA product Design h-4 comprising derived and/or modified sequence from HRSV(A2)__F_DSCav1_mut2 (opt1)
gggagagggcgcuuggcuugcaaggacccugagcugcggcauugaagcacacccaacccaacucgacugaagucagccucacugaaccggaucugagaaucuucucucucugggcuugccagggcucuccgaaccuagcuagcauccucuucaauuccaacuagaaagcuuaccauggagcugcucauccugaaggccaacgccaucaccaccauccugacggcggugaccuucugcuucgccagcggccagaacaucaccgaggaguucuaccaguccacgugcagcgccgucuccaagggguaccucggcgcccugcggaccggcugguacaccuccgugaucaccaucgagcugagcaacaucaaggagaacaagugcaacgggaccgacgccaaggugaagcucaucaagcaggagcuggacaaguacaagaacgcggucacggaccugcagcuccugaugcaguccaccccggcaaccggcuccggcuccgccaucugcagcggcgucgccgugugcaaggugcugcaccucgagggggaggucaacaagaucaagagcgcccugcuguccaccaacaaggccguggugagccucuccaacggcgucagcgugcugaccuucaaggugcuggaccucaagaacuacaucgacaagcagcugcugcccauccugaacaagcagagcugcuccauccccaacaucgagacggugaucgaguuccagcagaagaacaaccggcuccuggagaucacccgcgaguucagcgugaacgccggggucaccacccccguguccacguacaugcugaccaacagcgagcuccugucccugaucaacgacaugccgaucaccaacgaccagaagaagcucaugagcaacaacgugcagaucguccggcagcaguccuacagcaucaugugcaucaucaaggaggaggugcuggcguacgugguccagcugccccucuacggcgugaucgacacccccugcuggaagcugcacacgagcccccugugcaccaccaacaccaaggagggguccaacaucugccucacgcgcaccgaccggggcugguacugcgacaacgccggcagcgucuccuucuucccgcaggccgagaccugcaaggugcagagcaaccgcguguucugcgacaccaugaacucccugacgcugcccagcgagguaaaccucugcaacgucgacaucuucaaccccaaguacgacugcaagaucaugaccuccaagaccgacgugagcuccagcgugaucaccucccugggggccaucgucagcugcuacggcaagacgaagugcaccgccagcaacaagaaccgggggaucaucaagaccuucuccaacggcugcgacuacgugagcaacaagggcguggacaccguguccgucgggaacacccuguacugcgugaacaagcaggagggccagagccucuacgugaagggggagcccaucaucaacuucuacgacccgcuggucuuccccuccgacgaguucgacgcgagcaucucccaggugaacgagaagaucaaccagagccuggccuucauccgcaaguccgacgagcugcuccacaacgugaacgccggcaagagcacgaccaacaucaugaucaccaccaucaucaucgucaucaucgugauccugcugucccucaucgccguggggcugcugcucuacugcaaggcccggagcacgcccgucacccuguccaaggaccagcugagcggcaucaacaacaucgcguucuccaacugaggacuaguaauaaggaaacuguaugaaugucugugggcaggaagugaagagauccuucuguaaagguuuuuggaauuaugucugcugaauaauaaacuuuuuugaaauaauaaaucugguagaaaaaugagaucuaaaaaaaaaaaaaaaaaaaaaaaaaaaaaaaaaaaaaaaaaaaaaaaaaaaaaaaaaaaaaaaaugcaucccccccccccccccccccccccccccccccaaaggcucuuuucagagccaccagaauu

SEQ ID NO: 2696 - RNA, 2045 nt, Artificial Sequence
  mRNA product Design h-4 comprising derived and/or modified sequence from HRSV(A2)__F_DSCav1_mut2 (opt1)
gggagagggcgcuuggcuugcaaggacccugagcugcggcauugaagcacacccaacccaacucgacugaagucagccucacugaaccggaucugagaaucuucucucucugggcuugccagggcucuccgaaccuagcuagcauccucuucaauuccaacuagaaagcuuaccauggagcugcucauccugaaggccaacgccaucaccaccauccugacggcggugaccuucugcuucgccagcggccagaacaucaccgaggaguucuaccaguccacgugcagcgccgucuccaagggguaccucggcgcccugcgcaccgggugguacaccagcgugaucaccaucgagcuguccaacaucaaggagaacaagugcaacggcaccgacgccaaggugaagcucaucaagcaggagcuggacaaguacaagaacgcggucacggaccugcagcuccugaugcagagcacccccgccaccggguccggcagcgccaucugcuccggcguggccgugugcaagguccugcaccucgagggggaggugaacaagaucaagagcgcgcugcuguccaccaacaaggccguggucagccucuccaacggcgugagcgugcugacguucaagguccuggaccucaagaacuacaucgacaagcagcugcugccgauccucaacaagcaguccugcagcauccccaacaucgagaccgugaucgaguuccagcagaagaacaaccggcugcuggagaucacccgcgaguucuccgugaacgccggggucaccacgcccgugagcaccuacaugcucaccaacuccgagcugcugagccucaucaacgacaugcccaucaccaacgaccagaagaagcugaugagcaacaacgugcagaucguccggcagcaguccuacagcaucaugugcaucaucaaggaggaggugcuggccuacgugguccagcucccgcuguacggcgugaucgacacgcccugcuggaagcugcacaccagcccccucugcaccaccaacacgaaggagggguccaacaucugccugacccgcaccgaccggggcugguacugcgacaacgccggcuccgugagcuucuucccccaggcggagaccugcaagguccaguccaaccgcguguucugcgacacgaugaacagccugacccucccguccgaggucaaccugugcaacguggacaucuucaaccccaaguacgacugcaagaucaugaccagcaagaccgacguguccagcuccgucaucacgagccugggggccaucguguccugcuacggcaagaccaagugcaccgccagcaacaagaaccgggggaucaucaagaccuucuccaacggcugcgacuacgugagcaacaagggcgucgacacgguguccguggggaacacccucuacugcgucaacaagcaggagggccagagccuguacgugaagggggagcccaucaucaacuucuacgacccccugguguucccgagcgacgaguucgacgccuccaucagccaggucaacgagaagaucaaccagucccucgccuucauccgcaagagcgacgagcugcugcacaacgugaacgcgggcaaguccaccaccaacaucaugaucaccacgaucaucaucgugaucaucgucauccuccugagccugaucgccguggggcuccugcuguacugcaaggcccgguccacccccgugacccugagcaaggaccagcucuccggcaucaacaacaucgccuucagcaacugaggacuaguaauaaggaaacuguaugaaugucugugggcaggaagugaagagauccuucuguaaagguuuuuggaauuaugucugcugaauaauaaacuuuuuugaaauaauaaaucugguagaaaaaugagaucuaaaaaaaaaaaaaaaaaaaaaaaaaaaaaaaaaaaaaaaaaaaaaaaaaaaaaaaaaaaaaaaaugcaucccccccccccccccccccccccccccccccaaaggcucuuuucagagccaccagaauu

SEQ ID NO: 2697 - RNA, 2045 nt, Artificial Sequence
  mRNA product Design h-4 comprising derived and/or modified sequence from HRSV(A2)__F_DSCav1_mut2 (opt2)
gggagagggcgcuuggcuugcaaggacccugagcugcggcauugaagcacacccaacccaacucgacugaagucagccucacugaaccggaucugagaaucuucucucucugggcuugccagggcucuccgaaccuagcuagcauccucuucaauuccaacuagaaagcuuaccauggagcuccucauccucaaggccaacgccaucaccaccauccucaccgccgucaccuucugcuucgccuccggccagaacaucaccgaggaguucuaccaguccaccugcuccgccgucuccaagggcuaccucggcgcccuccgcaccggcugguacaccuccgucaucaccaucgagcucuccaacaucaaggagaacaagugcaacggcaccgacgccaaggucaagcucaucaagcaggagcucgacaaguacaagaacgccgucaccgaccuccagcuccucaugcaguccacccccgccaccggcuccggcuccgccaucugcuccggcgucgccgucugcaagguccuccaccucgagggcgaggucaacaagaucaaguccgcccuccucuccaccaacaaggccgucgucucccucuccaacggcgucuccguccucaccuucaagguccucgaccucaagaacuacaucgacaagcagcuccuccccauccucaacaagcaguccugcuccauccccaacaucgagaccgucaucgaguuccagcagaagaacaaccgccuccucgagaucacccgcgaguucuccgucaacgccggcgucaccacccccgucuccaccuacaugcucaccaacuccgagcuccucucccucaucaacgacaugcccaucaccaacgaccagaagaagcucauguccaacaacguccagaucguccgccagcaguccuacuccaucaugugcaucaucaaggaggagguccucgccuacgucguccagcucccccucuacggcgucaucgacacccccugcuggaagcuccacaccuccccccucugcaccaccaacaccaaggagggcuccaacaucugccucacccgcaccgaccgcggcugguacugcgacaacgccggcuccgucuccuucuucccccaggccgagaccugcaagguccaguccaaccgcgucuucugcgacaccaugaacucccucacccuccccuccgaggucaaccucugcaacgucgacaucuucaaccccaaguacgacugcaagaucaugaccuccaagaccgacgucuccuccuccgucaucaccucccucggcgccaucgucuccugcuacggcaagaccaagugcaccgccuccaacaagaaccgcggcaucaucaagaccuucuccaacggcugcgacuacgucuccaacaagggcgucgacaccgucuccgucggcaacacccucuacugcgucaacaagcaggagggccagucccucuacgucaagggcgagcccaucaucaacuucuacgacccccucgucuuccccuccgacgaguucgacgccuccaucucccaggucaacgagaagaucaaccagucccucgccuucauccgcaaguccgacgagcuccuccacaacgucaacgccggcaaguccaccaccaacaucaugaucaccaccaucaucaucgucaucaucgucauccuccucucccucaucgccgucggccuccuccucuacugcaaggcccgcuccacccccgucacccucuccaaggaccagcucuccggcaucaacaacaucgccuucuccaacugaggacuaguaauaaggaaacuguaugaaugucugugggcaggaagugaagagauccuucuguaaagguuuuuggaauuaugucugcugaauaauaaacuuuuuugaaauaauaaaucugguagaaaaaugagaucuaaaaaaaaaaaaaaaaaaaaaaaaaaaaaaaaaaaaaaaaaaaaaaaaaaaaaaaaaaaaaaaaugcaucccccccccccccccccccccccccccccccaaaggcucuuuucagagccaccagaauu

SEQ ID NO: 2698 - RNA, 2045 nt, Artificial Sequence
  mRNA product Design h-4 comprising derived and/or modified sequence from HRSV(A2)__F_DSCav1_mut2 (opt3)
gggagagggcgcuuggcuugcaaggacccugagcugcggcauugaagcacacccaacccaacucgacugaagucagccucacugaaccggaucugagaaucuucucucucugggcuugccagggcucuccgaaccuagcuagcauccucuucaauuccaacuagaaagcuuaccauggagcugcucauccuuaaggccaacgcuauuaccacaauacugacugcagugacguucugcuuugccagcggccagaauaucaccgaagaguucuaccaauccacauguucugcggucucaaaaggguauuugggagcuuuaagaacugguugguacaccaguguuauuacaaucgaacugagcaacauuaaggagaauaaaugcaacggcaccgacgccaaggugaaacuaaucaagcaggaacucgauaaguauaaaaaugcaguaacugaccugcagcuucugaugcaguccacacccgccaccgggucuggaucggcuauauguucaggcguggcagucugcaagguguugcaccucgagggugagguuaacaaaaucaagagcgcccugcugaguacgaauaaagcuguggucucccucucuaacggggugagcguauuaacuuuuaagguucuggaucuuaagaauuacauugacaaacaauugcugccuauccuaaacaagcaguccuguucaauuccaaauaucgaaaccgugauagaguuccagcagaaaaacaauaggcuccuggaaauuacacgggaguuuagugucaacgccggagugacuaccccggugagcacauauaugcuuaccaauucugagcuguugucccucaucaacgauaugcccauuacgaacgaccaaaagaaacugaugucaaauaacguccagaucguucgccagcagagcuacaguaucaugugcauuauaaaggaagagguguuagcguauguagugcaacugccucucuacggcgucaucgauacuccauguuggaaacuucauacaucuccccugugcaccacuaauacaaaggaaggcuccaacauuuguuugacccgaacggaccgugggugguacugcgauaaugcaggaagcgugucguucuuuccucaggccgagaccuguaagguucagucuaacagaguguucugcgacacaaugaacucccuaacucugccaucagaagucaaucucugcaauguggauaucuuuaaccccaaauaugacuguaagauaaugaccaguaaaacagauguaagcuccucuguuauuacuagccugggugcuaucgugucaugcuacggcaagaccaaauguacagccaguaauaagaacagggggaucauuaagaccuucuccaauggaugcgacuaugucagcaacaaaggcguggacacugucucuguggguaauacgcuuuacuguguuaacaagcaagaggggcagucacuguaugugaaaggagagccuaucauuaacuuuuacgauccauugguauucccgagugacgaauuugaugcaagcauaucccaggucaaugagaagaucaaccagucucucgcuuucauucggaaaucggacgaacuguuacacaaugugaacgccggcaagagcacaaccaauaucaugaucacuaccauuauaaucguuauuaucgugauucugcuaucccucaucgcggucggccugcuuuuguauugcaaggcccgcucaacacccgugacccugaguaaagaucaacucucugggauaaacaauaucgcauucagcaacugaggacuaguaauaaggaaacuguaugaaugucugugggcaggaagugaagagauccuucuguaaagguuuuuggaauuaugucugcugaauaauaaacuuuuuugaaauaauaaaucugguagaaaaaugagaucuaaaaaaaaaaaaaaaaaaaaaaaaaaaaaaaaaaaaaaaaaaaaaaaaaaaaaaaaaaaaaaaaugcaucccccccccccccccccccccccccccccccaaaggcucuuuucagagccaccagaauu

SEQ ID NO: 2699 - RNA, 2045 nt, Artificial Sequence
  mRNA product Design h-4 comprising derived and/or modified sequence from HRSV(A2)__F_DSCav1_mut2 (opt4)
gggagagggcgcuuggcuugcaaggacccugagcugcggcauugaagcacacccaacccaacucgacugaagucagccucacugaaccggaucugagaaucuucucucucugggcuugccagggcucuccgaaccuagcuagcauccucuucaauuccaacuagaaagcuuaccauggagcugcugauccugaaggccaacgccaucaccaccauccugaccgccgugaccuucugcuucgccagcggccagaacaucaccgaggaguucuaccagagcaccugcagcgccgugagcaagggcuaccugggcgcccugagaaccggcugguacaccagcgugaucaccaucgagcugagcaacaucaaggagaacaagugcaacggcaccgacgccaaggugaagcugaucaagcaggagcuggacaaguacaagaacgccgugaccgaccugcagcugcugaugcagagcacccccgccaccggcagcggcagcgccaucugcagcggcguggccgugugcaaggugcugcaccuggagggcgaggugaacaagaucaagagcgcccugcugagcaccaacaaggccguggugagccugagcaacggcgugagcgugcugaccuucaaggugcuggaccugaagaacuacaucgacaagcagcugcugcccauccugaacaagcagagcugcagcauccccaacaucgagaccgugaucgaguuccagcagaagaacaacagacugcuggagaucaccagagaguucagcgugaacgccggcgugaccacccccgugagcaccuacaugcugaccaacagcgagcugcugagccugaucaacgacaugcccaucaccaacgaccagaagaagcugaugagcaacaacgugcagaucgugagacagcagagcuacagcaucaugugcaucaucaaggaggaggugcuggccuacguggugcagcugccccuguacggcgugaucgacacccccugcuggaagcugcacaccagcccccugugcaccaccaacaccaaggagggcagcaacaucugccugaccagaaccgacagaggcugguacugcgacaacgccggcagcgugagcuucuucccccaggccgagaccugcaaggugcagagcaacagaguguucugcgacaccaugaacagccugacccugcccagcgaggugaaccugugcaacguggacaucuucaaccccaaguacgacugcaagaucaugaccagcaagaccgacgugagcagcagcgugaucaccagccugggcgccaucgugagcugcuacggcaagaccaagugcaccgccagcaacaagaacagaggcaucaucaagaccuucagcaacggcugcgacuacgugagcaacaagggcguggacaccgugagcgugggcaacacccuguacugcgugaacaagcaggagggccagagccuguacgugaagggcgagcccaucaucaacuucuacgacccccugguguuccccagcgacgaguucgacgccagcaucagccaggugaacgagaagaucaaccagagccuggccuucaucagaaagagcgacgagcugcugcacaacgugaacgccggcaagagcaccaccaacaucaugaucaccaccaucaucaucgugaucaucgugauccugcugagccugaucgccgugggccugcugcuguacugcaaggccagaagcacccccgugacccugagcaaggaccagcugagcggcaucaacaacaucgccuucagcaacugaggacuaguaauaaggaaacuguaugaaugucugugggcaggaagugaagagauccuucuguaaagguuuuuggaauuaugucugcugaauaauaaacuuuuuugaaauaauaaaucugguagaaaaaugagaucuaaaaaaaaaaaaaaaaaaaaaaaaaaaaaaaaaaaaaaaaaaaaaaaaaaaaaaaaaaaaaaaaugcaucccccccccccccccccccccccccccccccaaaggcucuuuucagagccaccagaauu

SEQ ID NO: 2700 - RNA, 2045 nt, Artificial Sequence
  mRNA product Design h-4 comprising derived and/or modified sequence from HRSV(A2)__F_DSCav1_mut2 (opt5)
gggagagggcgcuuggcuugcaaggacccugagcugcggcauugaagcacacccaacccaacucgacugaagucagccucacugaaccggaucugagaaucuucucucucugggcuugccagggcucuccgaaccuagcuagcauccucuucaauuccaacuagaaagcuuaccauggagcugcucauccugaaggccaacgcuauuaccacaauccuuacggccgugaccuucugcuuugcgagcggccagaauauuacagaagaguucuaccaauccaccuguucugcugucagcaaaggguaucugggagcccucagaacaggcugguacaccuccguuaucacaauugaacugucuaacaucaaggagaauaaaugcaacgggaccgacgccaaggugaaacuuaucaagcaggaacuggauaaguauaaaaaugcugugacggaccuccagcugcugaugcagagcacccccgccacaggauccggcucugcuauuuguagcggggucgccgugugcaagguucuccaccuggagggagaggugaacaaaaucaaguccgcgcuucugagcaccaauaaagccgucgugucucucuccaacggcguuagcgugcugacauuuaagguccuugaucugaagaauuacauugacaaacaacuccugccuauccugaacaagcagucuuguuccauuccgaauaucgaaaccgugauugaguuccagcagaaaaacaaucggcuccuggaaaucacgcgcgaguuuagcgugaacgcuggcgucacaacccccguuucuacauauaugcuuaccaauuccgagcugcucagccugaucaacgauaugccuauuaccaacgaccaaaagaaacuuauguccaauaacgugcagaucgugagacagcagucuuacagcauuaugugcaucauuaaggaagagguccuggccuaugugguucaacucccccuguacggggugaucgauacaccuuguuggaaacugcauacgagcccccucugcaccacaaauaccaaggaaggauccaacaucugucugacacggaccgaccgcggcugguacugcgauaaugcugggucugucuccuucuuuccucaggccgagacguguaaggugcagagcaacagaguuuucugcgacacaaugaacucucuuacccugccgagcgaagugaaucucugcaaugucgauauuuuuaaccccaaauaugacuguaagaucaugaccuccaaaacagaugugucuagcuccgucauuaccagccugggagcgaucgugucuugcuacggcaagacaaaauguacggccuccaauaagaaccgggggauuaucaagaccuucagcaauggaugcgacuauguuucuaacaaaggcguggacacagucuccgugggcaauacccuuuacuguguuaacaagcaagaggggcagagccuguaugugaaaggagagccuaucauuaacuuuuacgauccccucgucuucccuuccgacgaauuugaugcuucuaucagccaggugaaugagaagauuaaccagucccuggccuucauccgcaaaucugacgaacugcuccacaaugugaacgcuggcaagagcacaaccaauauuaugaucacgaccauuaucaucguuauuaucgucauucugcuuucccugaucgccguggggcuccugcuguauugcaaggccagaagcacacccgugacccuuucuaaagaucaacucuccggaauuaacaauaucgcuuucagcaacugaggacuaguaauaaggaaacuguaugaaugucugugggcaggaagugaagagauccuucuguaaagguuuuuggaauuaugucugcugaauaauaaacuuuuuugaaauaauaaaucugguagaaaaaugagaucuaaaaaaaaaaaaaaaaaaaaaaaaaaaaaaaaaaaaaaaaaaaaaaaaaaaaaaaaaaaaaaaaugcaucccccccccccccccccccccccccccccccaaaggcucuuuucagagccaccagaauu

SEQ ID NO: 2701 - RNA, 2045 nt, Artificial Sequence
  mRNA product Design h-4 comprising derived and/or modified sequence from HRSV(A2)__F_DSCav1_mut2 (opt6)
gggagagggcgcuuggcuugcaaggacccugagcugcggcauugaagcacacccaacccaacucgacugaagucagccucacugaaccggaucugagaaucuucucucucugggcuugccagggcucuccgaaccuagcuagcauccucuucaauuccaacuagaaagcuuaccauggaacuacuaauccuaaaagcaaacgcaauuacaacuauacuuaccgccguaacauuuugcuucgcaucugggcaaaacauuaccgaagaauuuuaucaaucaacaugcucagcagucuccaaaggauaccuuggagcauuaagaaccggcugguauaccuccguaauaacaauugaacuaucuaauauaaaagaaaauaaauguaauggaacugacgcaaaaguuaaacuaauaaaacaagaacucgacaaauacaaaaacgccgucacagaccuacaacuacuaaugcaaucaacccccgcaacaggaucaggauccgcaaucugcagcggcgucgcaguuugcaaaguccuacauuuagaaggagaaguaaacaaaauaaaaucugcucuccucucuacaaacaaagcaguagugucacuuucaaacggaguaucaguucuaacauucaaaguacuagaccuaaaaaauuacauagacaaacaacuacuuccaauucuaaacaaacaauccuguuccauacccaacauagaaacaguaauagaauuucaacaaaaaaauaacagacuccuagaaauuacaagagaauuuuccgucaaugcaggaguaacaaccccaguaucaaccuacauguuaacuaacucagaacucuuaucacuaauaaacgacaugccaaucacuaaugaccaaaaaaaacucaugucaaauaacguacaaauaguccgacaacaaucauacuccaucaugugcauuauaaaagaagaaguacuagcauacgucguccaauuaccacuauacggcgucauagacacaccauguuggaaacuccacacaucaccacuaugcacuacaaauacaaaagaaggcuccaacaucugccuaacaagaacagacagagguugguauugcgacaacgcaggaucaguaucauuuuucccccaagcagaaacauguaaaguacaaucaaauagagucuucugcgacaccaugaacucauuaacacuaccuucagaagucaaccuaugcaacguagacaucuucaacccuaaauaugacugcaaaaucaugaccagcaaaaccgacguuucaucuuccguaauaacaucacuaggcgcaauagucucauguuacggcaaaacaaaauguacagcaucaaauaaaaaccguggaauaauaaaaacauuuucuaaugguugugacuacguaagcaauaaaggaguagauacaguaucagucggcaacaccuuauacuguguaaacaaacaagaaggccaaaguuuauacgucaaaggagaacccaucaucaacuucuacgacccauuaguauucccaucagacgaauuugaugcaagcauuucacaagucaacgaaaaaaucaaucaaucauuagcauucauccgaaaaucagacgaauuauuacacaacguaaacgccggaaaaucaaccacuaauauaaugauaaccacaauaaucaucguaauaauaguaauacuucucucacuaaucgcagucggacuccuucuauacugcaaagcaagaucuacaccaguaacacuauccaaagaucaacuaaguggcauaaacaacauagcauuuucuaacuaaggacuaguaauaaggaaacuguaugaaugucugugggcaggaagugaagagauccuucuguaaagguuuuuggaauuaugucugcugaauaauaaacuuuuuugaaauaauaaaucugguagaaaaaugagaucuaaaaaaaaaaaaaaaaaaaaaaaaaaaaaaaaaaaaaaaaaaaaaaaaaaaaaaaaaaaaaaaaugcaucccccccccccccccccccccccccccccccaaaggcucuuuucagagccaccagaauu

SEQ ID NO: 2702 - RNA, 2045 nt, Artificial Sequence
  mRNA product Design h-4 comprising derived and/or modified sequence from HRSV(A2)__F_DSCav1_mut2 (opt11)
gggagagggcgcuuggcuugcaaggacccugagcugcggcauugaagcacacccaacccaacucgacugaagucagccucacugaaccggaucugagaaucuucucucucugggcuugccagggcucuccgaaccuagcuagcauccucuucaauuccaacuagaaagcuuaccauggaacuccucauccuaaaagccaacgcgaucaccacaauccugacagccgucaccuucugcuucgccuccggccaaaacaucaccgaagaguucuaccaauccacaugcuccgccgucuccaagggcuaccugggcgcacuucguacaggcugguacaccuccguaauaaccaucgaacucuccaacaucaaagaaaacaaaugcaacggcacagacgcaaaagucaaacucaucaagcaagaacuugacaaauacaaaaaugcagucaccgaccuucaacuccucaugcaaucuacccccgccacaggcuccggcuccgcuaucugcuccggcgucgccgucugcaaaguccuccaccucgaaggugaaguaaacaaaauaaaauccgcccuccucuccaccaacaaagccgucgucucccuaucaaacggcgucuccgugcucaccuucaagguucucgaccugaaaaacuacauagacaaacagcuccuaccaauccuuaacaaacagagcugcuccauuccgaauaucgaaacgguaaucgaauuucaacagaaaaacaaccgccuccucgaaauaacgcgagaguucuccguaaacgcuggcgucaccacacccgucagcaccuacaugcuaacgaacuccgaacucuugucgcucaucaacgacaugcccauaaccaacgaccaaaagaaacuaauguccaauaacguacaaaucguacgccaacaaucuuacuccaucaugugcaucauaaaagaagaaguacuagcuuacgucguccaacucccacuguacggagucaucgacacccccugcuggaaacuccacaccucuccccucugcaccaccaacaccaaagagggcuccaacauuugccugacacgcaccgaccgcggcugguacugcgacaacgcaggcuccgucucguucuucccccaagccgaaaccugcaaaguccaauccaaccgcgucuucugcgacaccaugaacucccucacccuccccuccgaagucaaucuaugcaacguagacaucuucaacccgaaauaugacugcaaaauuaugacaucuaaaaccgacguguccuccucagucaucacuucccuaggagccaucguuuccuguuacggcaagaccaaaugcaccgccagcaacaaaaaccgaggcaucaucaaaaccuucuccaacggaugugacuaugucuccaacaagggcgucgacaccgucagcgucggcaacacccucuacugcgucaacaaacaagaaggccaaucccucuacgucaaaggagagcccauaaucaacuucuacgacccccucgucuucccauccgacgaguucgacgccucaaucucccaagucaacgagaaaaucaaccaauccuuagccuucauccguaaguccgacgaacuccuucacaacgucaacgccgguaaaucuaccaccaacaucaugauaacaacaauaauuaucgucaucaucgucauccuccuuucccucaucgcggucgggcuauugcucuacugcaaagcccgguccaccccaguaacccucucuaaagaccaacucagcggaaucaauaacauagccuucagcaauuaaggacuaguaauaaggaaacuguaugaaugucugugggcaggaagugaagagauccuucuguaaagguuuuuggaauuaugucugcugaauaauaaacuuuuuugaaauaauaaaucugguagaaaaaugagaucuaaaaaaaaaaaaaaaaaaaaaaaaaaaaaaaaaaaaaaaaaaaaaaaaaaaaaaaaaaaaaaaaugcaucccccccccccccccccccccccccccccccaaaggcucuuuucagagccaccagaauu

SEQ ID NO: 2703 - RNA, 2061 nt, Artificial Sequence
  mRNA product Design h-5 comprising derived and/or modified sequence from HRSV(A2)__F_DSCav1_mut2 (opt1)
gggagagggcgcuuggcuugcaaggacccugagcugcggcauugaagcacacccaacccaacucgacugaagucagccucacugaaccggaucugagaaucuucucucucugggcuugccagggcucuccgaaccuagcuagcauccucuucaauuccaacuagaaagcuuaccauggagcugcucauccugaaggccaacgccaucaccaccauccugacggcggugaccuucugcuucgccagcggccagaacaucaccgaggaguucuaccaguccacgugcagcgccgucuccaagggguaccucggcgcccugcggaccggcugguacaccuccgugaucaccaucgagcugagcaacaucaaggagaacaagugcaacgggaccgacgccaaggugaagcucaucaagcaggagcuggacaaguacaagaacgcggucacggaccugcagcuccugaugcaguccaccccggcaaccggcuccggcuccgccaucugcagcggcgucgccgugugcaaggugcugcaccucgagggggaggucaacaagaucaagagcgcccugcuguccaccaacaaggccguggugagccucuccaacggcgucagcgugcugaccuucaaggugcuggaccucaagaacuacaucgacaagcagcugcugcccauccugaacaagcagagcugcuccauccccaacaucgagacggugaucgaguuccagcagaagaacaaccggcuccuggagaucacccgcgaguucagcgugaacgccggggucaccacccccguguccacguacaugcugaccaacagcgagcuccugucccugaucaacgacaugccgaucaccaacgaccagaagaagcucaugagcaacaacgugcagaucguccggcagcaguccuacagcaucaugugcaucaucaaggaggaggugcuggcguacgugguccagcugccccucuacggcgugaucgacacccccugcuggaagcugcacacgagcccccugugcaccaccaacaccaaggagggguccaacaucugccucacgcgcaccgaccggggcugguacugcgacaacgccggcagcgucuccuucuucccgcaggccgagaccugcaaggugcagagcaaccgcguguucugcgacaccaugaacucccugacgcugcccagcgagguaaaccucugcaacgucgacaucuucaaccccaaguacgacugcaagaucaugaccuccaagaccgacgugagcuccagcgugaucaccucccugggggccaucgucagcugcuacggcaagacgaagugcaccgccagcaacaagaaccgggggaucaucaagaccuucuccaacggcugcgacuacgugagcaacaagggcguggacaccguguccgucgggaacacccuguacugcgugaacaagcaggagggccagagccucuacgugaagggggagcccaucaucaacuucuacgacccgcuggucuuccccuccgacgaguucgacgcgagcaucucccaggugaacgagaagaucaaccagagccuggccuucauccgcaaguccgacgagcugcuccacaacgugaacgccggcaagagcacgaccaacaucaugaucaccaccaucaucaucgucaucaucgugauccugcugucccucaucgccguggggcugcugcucuacugcaaggcccggagcacgcccgucacccuguccaaggaccagcugagcggcaucaacaacaucgcguucuccaacugaggacuaguacuggcugcaucucccuuuccucuguccuccauccuucucccaggauggugaagggggaccugguacccagugauccccaccccaggauccuaaaucaugacuuaccugcuaauaaaaacucauuggaaaagugagaagaucuaaaaaaaaaaaaaaaaaaaaaaaaaaaaaaaaaaaaaaaaaaaaaaaaaaaaaaaaaaaaaaaaugcaucccccccccccccccccccccccccccccccaaaggcucuuuucagagccaccagaauu

SEQ ID NO: 2704 - RNA, 2061 nt, Artificial Sequence
  mRNA product Design h-5 comprising derived and/or modified sequence from HRSV(A2)__F_DSCav1_mut2 (opt1)
gggagagggcgcuuggcuugcaaggacccugagcugcggcauugaagcacacccaacccaacucgacugaagucagccucacugaaccggaucugagaaucuucucucucugggcuugccagggcucuccgaaccuagcuagcauccucuucaauuccaacuagaaagcuuaccauggagcugcucauccugaaggccaacgccaucaccaccauccugacggcggugaccuucugcuucgccagcggccagaacaucaccgaggaguucuaccaguccacgugcagcgccgucuccaagggguaccucggcgcccugcgcaccgggugguacaccagcgugaucaccaucgagcuguccaacaucaaggagaacaagugcaacggcaccgacgccaaggugaagcucaucaagcaggagcuggacaaguacaagaacgcggucacggaccugcagcuccugaugcagagcacccccgccaccggguccggcagcgccaucugcuccggcguggccgugugcaagguccugcaccucgagggggaggugaacaagaucaagagcgcgcugcuguccaccaacaaggccguggucagccucuccaacggcgugagcgugcugacguucaagguccuggaccucaagaacuacaucgacaagcagcugcugccgauccucaacaagcaguccugcagcauccccaacaucgagaccgugaucgaguuccagcagaagaacaaccggcugcuggagaucacccgcgaguucuccgugaacgccggggucaccacgcccgugagcaccuacaugcucaccaacuccgagcugcugagccucaucaacgacaugcccaucaccaacgaccagaagaagcugaugagcaacaacgugcagaucguccggcagcaguccuacagcaucaugugcaucaucaaggaggaggugcuggccuacgugguccagcucccgcuguacggcgugaucgacacgcccugcuggaagcugcacaccagcccccucugcaccaccaacacgaaggagggguccaacaucugccugacccgcaccgaccggggcugguacugcgacaacgccggcuccgugagcuucuucccccaggcggagaccugcaagguccaguccaaccgcguguucugcgacacgaugaacagccugacccucccguccgaggucaaccugugcaacguggacaucuucaaccccaaguacgacugcaagaucaugaccagcaagaccgacguguccagcuccgucaucacgagccugggggccaucguguccugcuacggcaagaccaagugcaccgccagcaacaagaaccgggggaucaucaagaccuucuccaacggcugcgacuacgugagcaacaagggcgucgacacgguguccguggggaacacccucuacugcgucaacaagcaggagggccagagccuguacgugaagggggagcccaucaucaacuucuacgacccccugguguucccgagcgacgaguucgacgccuccaucagccaggucaacgagaagaucaaccagucccucgccuucauccgcaagagcgacgagcugcugcacaacgugaacgcgggcaaguccaccaccaacaucaugaucaccacgaucaucaucgugaucaucgucauccuccugagccugaucgccguggggcuccugcuguacugcaaggcccgguccacccccgugacccugagcaaggaccagcucuccggcaucaacaacaucgccuucagcaacugaggacuaguacuggcugcaucucccuuuccucuguccuccauccuucucccaggauggugaagggggaccugguacccagugauccccaccccaggauccuaaaucaugacuuaccugcuaauaaaaacucauuggaaaagugagaagaucuaaaaaaaaaaaaaaaaaaaaaaaaaaaaaaaaaaaaaaaaaaaaaaaaaaaaaaaaaaaaaaaaugcaucccccccccccccccccccccccccccccccaaaggcucuuuucagagccaccagaauu

SEQ ID NO: 2705 - RNA, 2061 nt, Artificial Sequence
  mRNA product Design h-5 comprising derived and/or modified sequence from HRSV(A2)__F_DSCav1_mut2 (opt2)
gggagagggcgcuuggcuugcaaggacccugagcugcggcauugaagcacacccaacccaacucgacugaagucagccucacugaaccggaucugagaaucuucucucucugggcuugccagggcucuccgaaccuagcuagcauccucuucaauuccaacuagaaagcuuaccauggagcuccucauccucaaggccaacgccaucaccaccauccucaccgccgucaccuucugcuucgccuccggccagaacaucaccgaggaguucuaccaguccaccugcuccgccgucuccaagggcuaccucggcgcccuccgcaccggcugguacaccuccgucaucaccaucgagcucuccaacaucaaggagaacaagugcaacggcaccgacgccaaggucaagcucaucaagcaggagcucgacaaguacaagaacgccgucaccgaccuccagcuccucaugcaguccacccccgccaccggcuccggcuccgccaucugcuccggcgucgccgucugcaagguccuccaccucgagggcgaggucaacaagaucaaguccgcccuccucuccaccaacaaggccgucgucucccucuccaacggcgucuccguccucaccuucaagguccucgaccucaagaacuacaucgacaagcagcuccuccccauccucaacaagcaguccugcuccauccccaacaucgagaccgucaucgaguuccagcagaagaacaaccgccuccucgagaucacccgcgaguucuccgucaacgccggcgucaccacccccgucuccaccuacaugcucaccaacuccgagcuccucucccucaucaacgacaugcccaucaccaacgaccagaagaagcucauguccaacaacguccagaucguccgccagcaguccuacuccaucaugugcaucaucaaggaggagguccucgccuacgucguccagcucccccucuacggcgucaucgacacccccugcuggaagcuccacaccuccccccucugcaccaccaacaccaaggagggcuccaacaucugccucacccgcaccgaccgcggcugguacugcgacaacgccggcuccgucuccuucuucccccaggccgagaccugcaagguccaguccaaccgcgucuucugcgacaccaugaacucccucacccuccccuccgaggucaaccucugcaacgucgacaucuucaaccccaaguacgacugcaagaucaugaccuccaagaccgacgucuccuccuccgucaucaccucccucggcgccaucgucuccugcuacggcaagaccaagugcaccgccuccaacaagaaccgcggcaucaucaagaccuucuccaacggcugcgacuacgucuccaacaagggcgucgacaccgucuccgucggcaacacccucuacugcgucaacaagcaggagggccagucccucuacgucaagggcgagcccaucaucaacuucuacgacccccucgucuuccccuccgacgaguucgacgccuccaucucccaggucaacgagaagaucaaccagucccucgccuucauccgcaaguccgacgagcuccuccacaacgucaacgccggcaaguccaccaccaacaucaugaucaccaccaucaucaucgucaucaucgucauccuccucucccucaucgccgucggccuccuccucuacugcaaggcccgcuccacccccgucacccucuccaaggaccagcucuccggcaucaacaacaucgccuucuccaacugaggacuaguacuggcugcaucucccuuuccucuguccuccauccuucucccaggauggugaagggggaccugguacccagugauccccaccccaggauccuaaaucaugacuuaccugcuaauaaaaacucauuggaaaagugagaagaucuaaaaaaaaaaaaaaaaaaaaaaaaaaaaaaaaaaaaaaaaaaaaaaaaaaaaaaaaaaaaaaaaugcaucccccccccccccccccccccccccccccccaaaggcucuuuucagagccaccagaauu

SEQ ID NO: 2706 - RNA, 2061 nt, Artificial Sequence
  mRNA product Design h-5 comprising derived and/or modified sequence from HRSV(A2)__F_DSCav1_mut2 (opt3)
gggagagggcgcuuggcuugcaaggacccugagcugcggcauugaagcacacccaacccaacucgacugaagucagccucacugaaccggaucugagaaucuucucucucugggcuugccagggcucuccgaaccuagcuagcauccucuucaauuccaacuagaaagcuuaccauggagcugcucauccuuaaggccaacgcuauuaccacaauacugacugcagugacguucugcuuugccagcggccagaauaucaccgaagaguucuaccaauccacauguucugcggucucaaaaggguauuugggagcuuuaagaacugguugguacaccaguguuauuacaaucgaacugagcaacauuaaggagaauaaaugcaacggcaccgacgccaaggugaaacuaaucaagcaggaacucgauaaguauaaaaaugcaguaacugaccugcagcuucugaugcaguccacacccgccaccgggucuggaucggcuauauguucaggcguggcagucugcaagguguugcaccucgagggugagguuaacaaaaucaagagcgcccugcugaguacgaauaaagcuguggucucccucucuaacggggugagcguauuaacuuuuaagguucuggaucuuaagaauuacauugacaaacaauugcugccuauccuaaacaagcaguccuguucaauuccaaauaucgaaaccgugauagaguuccagcagaaaaacaauaggcuccuggaaauuacacgggaguuuagugucaacgccggagugacuaccccggugagcacauauaugcuuaccaauucugagcuguugucccucaucaacgauaugcccauuacgaacgaccaaaagaaacugaugucaaauaacguccagaucguucgccagcagagcuacaguaucaugugcauuauaaaggaagagguguuagcguauguagugcaacugccucucuacggcgucaucgauacuccauguuggaaacuucauacaucuccccugugcaccacuaauacaaaggaaggcuccaacauuuguuugacccgaacggaccgugggugguacugcgauaaugcaggaagcgugucguucuuuccucaggccgagaccuguaagguucagucuaacagaguguucugcgacacaaugaacucccuaacucugccaucagaagucaaucucugcaauguggauaucuuuaaccccaaauaugacuguaagauaaugaccaguaaaacagauguaagcuccucuguuauuacuagccugggugcuaucgugucaugcuacggcaagaccaaauguacagccaguaauaagaacagggggaucauuaagaccuucuccaauggaugcgacuaugucagcaacaaaggcguggacacugucucuguggguaauacgcuuuacuguguuaacaagcaagaggggcagucacuguaugugaaaggagagccuaucauuaacuuuuacgauccauugguauucccgagugacgaauuugaugcaagcauaucccaggucaaugagaagaucaaccagucucucgcuuucauucggaaaucggacgaacuguuacacaaugugaacgccggcaagagcacaaccaauaucaugaucacuaccauuauaaucguuauuaucgugauucugcuaucccucaucgcggucggccugcuuuuguauugcaaggcccgcucaacacccgugacccugaguaaagaucaacucucugggauaaacaauaucgcauucagcaacugaggacuaguacuggcugcaucucccuuuccucuguccuccauccuucucccaggauggugaagggggaccugguacccagugauccccaccccaggauccuaaaucaugacuuaccugcuaauaaaaacucauuggaaaagugagaagaucuaaaaaaaaaaaaaaaaaaaaaaaaaaaaaaaaaaaaaaaaaaaaaaaaaaaaaaaaaaaaaaaaugcaucccccccccccccccccccccccccccccccaaaggcucuuuucagagccaccagaauu

SEQ ID NO: 2707 - RNA, 2061 nt, Artificial Sequence
  mRNA product Design h-5 comprising derived and/or modified sequence from HRSV(A2)__F_DSCav1_mut2 (opt4)
gggagagggcgcuuggcuugcaaggacccugagcugcggcauugaagcacacccaacccaacucgacugaagucagccucacugaaccggaucugagaaucuucucucucugggcuugccagggcucuccgaaccuagcuagcauccucuucaauuccaacuagaaagcuuaccauggagcugcugauccugaaggccaacgccaucaccaccauccugaccgccgugaccuucugcuucgccagcggccagaacaucaccgaggaguucuaccagagcaccugcagcgccgugagcaagggcuaccugggcgcccugagaaccggcugguacaccagcgugaucaccaucgagcugagcaacaucaaggagaacaagugcaacggcaccgacgccaaggugaagcugaucaagcaggagcuggacaaguacaagaacgccgugaccgaccugcagcugcugaugcagagcacccccgccaccggcagcggcagcgccaucugcagcggcguggccgugugcaaggugcugcaccuggagggcgaggugaacaagaucaagagcgcccugcugagcaccaacaaggccguggugagccugagcaacggcgugagcgugcugaccuucaaggugcuggaccugaagaacuacaucgacaagcagcugcugcccauccugaacaagcagagcugcagcauccccaacaucgagaccgugaucgaguuccagcagaagaacaacagacugcuggagaucaccagagaguucagcgugaacgccggcgugaccacccccgugagcaccuacaugcugaccaacagcgagcugcugagccugaucaacgacaugcccaucaccaacgaccagaagaagcugaugagcaacaacgugcagaucgugagacagcagagcuacagcaucaugugcaucaucaaggaggaggugcuggccuacguggugcagcugccccuguacggcgugaucgacacccccugcuggaagcugcacaccagcccccugugcaccaccaacaccaaggagggcagcaacaucugccugaccagaaccgacagaggcugguacugcgacaacgccggcagcgugagcuucuucccccaggccgagaccugcaaggugcagagcaacagaguguucugcgacaccaugaacagccugacccugcccagcgaggugaaccugugcaacguggacaucuucaaccccaaguacgacugcaagaucaugaccagcaagaccgacgugagcagcagcgugaucaccagccugggcgccaucgugagcugcuacggcaagaccaagugcaccgccagcaacaagaacagaggcaucaucaagaccuucagcaacggcugcgacuacgugagcaacaagggcguggacaccgugagcgugggcaacacccuguacugcgugaacaagcaggagggccagagccuguacgugaagggcgagcccaucaucaacuucuacgacccccugguguuccccagcgacgaguucgacgccagcaucagccaggugaacgagaagaucaaccagagccuggccuucaucagaaagagcgacgagcugcugcacaacgugaacgccggcaagagcaccaccaacaucaugaucaccaccaucaucaucgugaucaucgugauccugcugagccugaucgccgugggccugcugcuguacugcaaggccagaagcacccccgugacccugagcaaggaccagcugagcggcaucaacaacaucgccuucagcaacugaggacuaguacuggcugcaucucccuuuccucuguccuccauccuucucccaggauggugaagggggaccugguacccagugauccccaccccaggauccuaaaucaugacuuaccugcuaauaaaaacucauuggaaaagugagaagaucuaaaaaaaaaaaaaaaaaaaaaaaaaaaaaaaaaaaaaaaaaaaaaaaaaaaaaaaaaaaaaaaaugcaucccccccccccccccccccccccccccccccaaaggcucuuuucagagccaccagaauu

SEQ ID NO: 2708 - RNA, 2061 nt, Artificial Sequence
  mRNA product Design h-5 comprising derived and/or modified sequence from HRSV(A2)__F_DSCav1_mut2 (opt5)
gggagagggcgcuuggcuugcaaggacccugagcugcggcauugaagcacacccaacccaacucgacugaagucagccucacugaaccggaucugagaaucuucucucucugggcuugccagggcucuccgaaccuagcuagcauccucuucaauuccaacuagaaagcuuaccauggagcugcucauccugaaggccaacgcuauuaccacaauccuuacggccgugaccuucugcuuugcgagcggccagaauauuacagaagaguucuaccaauccaccuguucugcugucagcaaaggguaucugggagcccucagaacaggcugguacaccuccguuaucacaauugaacugucuaacaucaaggagaauaaaugcaacgggaccgacgccaaggugaaacuuaucaagcaggaacuggauaaguauaaaaaugcugugacggaccuccagcugcugaugcagagcacccccgccacaggauccggcucugcuauuuguagcggggucgccgugugcaagguucuccaccuggagggagaggugaacaaaaucaaguccgcgcuucugagcaccaauaaagccgucgugucucucuccaacggcguuagcgugcugacauuuaagguccuugaucugaagaauuacauugacaaacaacuccugccuauccugaacaagcagucuuguuccauuccgaauaucgaaaccgugauugaguuccagcagaaaaacaaucggcuccuggaaaucacgcgcgaguuuagcgugaacgcuggcgucacaacccccguuucuacauauaugcuuaccaauuccgagcugcucagccugaucaacgauaugccuauuaccaacgaccaaaagaaacuuauguccaauaacgugcagaucgugagacagcagucuuacagcauuaugugcaucauuaaggaagagguccuggccuaugugguucaacucccccuguacggggugaucgauacaccuuguuggaaacugcauacgagcccccucugcaccacaaauaccaaggaaggauccaacaucugucugacacggaccgaccgcggcugguacugcgauaaugcugggucugucuccuucuuuccucaggccgagacguguaaggugcagagcaacagaguuuucugcgacacaaugaacucucuuacccugccgagcgaagugaaucucugcaaugucgauauuuuuaaccccaaauaugacuguaagaucaugaccuccaaaacagaugugucuagcuccgucauuaccagccugggagcgaucgugucuugcuacggcaagacaaaauguacggccuccaauaagaaccgggggauuaucaagaccuucagcaauggaugcgacuauguuucuaacaaaggcguggacacagucuccgugggcaauacccuuuacuguguuaacaagcaagaggggcagagccuguaugugaaaggagagccuaucauuaacuuuuacgauccccucgucuucccuuccgacgaauuugaugcuucuaucagccaggugaaugagaagauuaaccagucccuggccuucauccgcaaaucugacgaacugcuccacaaugugaacgcuggcaagagcacaaccaauauuaugaucacgaccauuaucaucguuauuaucgucauucugcuuucccugaucgccguggggcuccugcuguauugcaaggccagaagcacacccgugacccuuucuaaagaucaacucuccggaauuaacaauaucgcuuucagcaacugaggacuaguacuggcugcaucucccuuuccucuguccuccauccuucucccaggauggugaagggggaccugguacccagugauccccaccccaggauccuaaaucaugacuuaccugcuaauaaaaacucauuggaaaagugagaagaucuaaaaaaaaaaaaaaaaaaaaaaaaaaaaaaaaaaaaaaaaaaaaaaaaaaaaaaaaaaaaaaaaugcaucccccccccccccccccccccccccccccccaaaggcucuuuucagagccaccagaauu

SEQ ID NO: 2709 - RNA, 2061 nt, Artificial Sequence
  mRNA product Design h-5 comprising derived and/or modified sequence from HRSV(A2)__F_DSCav1_mut2 (opt6)
gggagagggcgcuuggcuugcaaggacccugagcugcggcauugaagcacacccaacccaacucgacugaagucagccucacugaaccggaucugagaaucuucucucucugggcuugccagggcucuccgaaccuagcuagcauccucuucaauuccaacuagaaagcuuaccauggaacuacuaauccuaaaagcaaacgcaauuacaacuauacuuaccgccguaacauuuugcuucgcaucugggcaaaacauuaccgaagaauuuuaucaaucaacaugcucagcagucuccaaaggauaccuuggagcauuaagaaccggcugguauaccuccguaauaacaauugaacuaucuaauauaaaagaaaauaaauguaauggaacugacgcaaaaguuaaacuaauaaaacaagaacucgacaaauacaaaaacgccgucacagaccuacaacuacuaaugcaaucaacccccgcaacaggaucaggauccgcaaucugcagcggcgucgcaguuugcaaaguccuacauuuagaaggagaaguaaacaaaauaaaaucugcucuccucucuacaaacaaagcaguagugucacuuucaaacggaguaucaguucuaacauucaaaguacuagaccuaaaaaauuacauagacaaacaacuacuuccaauucuaaacaaacaauccuguuccauacccaacauagaaacaguaauagaauuucaacaaaaaaauaacagacuccuagaaauuacaagagaauuuuccgucaaugcaggaguaacaaccccaguaucaaccuacauguuaacuaacucagaacucuuaucacuaauaaacgacaugccaaucacuaaugaccaaaaaaaacucaugucaaauaacguacaaauaguccgacaacaaucauacuccaucaugugcauuauaaaagaagaaguacuagcauacgucguccaauuaccacuauacggcgucauagacacaccauguuggaaacuccacacaucaccacuaugcacuacaaauacaaaagaaggcuccaacaucugccuaacaagaacagacagagguugguauugcgacaacgcaggaucaguaucauuuuucccccaagcagaaacauguaaaguacaaucaaauagagucuucugcgacaccaugaacucauuaacacuaccuucagaagucaaccuaugcaacguagacaucuucaacccuaaauaugacugcaaaaucaugaccagcaaaaccgacguuucaucuuccguaauaacaucacuaggcgcaauagucucauguuacggcaaaacaaaauguacagcaucaaauaaaaaccguggaauaauaaaaacauuuucuaaugguugugacuacguaagcaauaaaggaguagauacaguaucagucggcaacaccuuauacuguguaaacaaacaagaaggccaaaguuuauacgucaaaggagaacccaucaucaacuucuacgacccauuaguauucccaucagacgaauuugaugcaagcauuucacaagucaacgaaaaaaucaaucaaucauuagcauucauccgaaaaucagacgaauuauuacacaacguaaacgccggaaaaucaaccacuaauauaaugauaaccacaauaaucaucguaauaauaguaauacuucucucacuaaucgcagucggacuccuucuauacugcaaagcaagaucuacaccaguaacacuauccaaagaucaacuaaguggcauaaacaacauagcauuuucuaacuaaggacuaguacuggcugcaucucccuuuccucuguccuccauccuucucccaggauggugaagggggaccugguacccagugauccccaccccaggauccuaaaucaugacuuaccugcuaauaaaaacucauuggaaaagugagaagaucuaaaaaaaaaaaaaaaaaaaaaaaaaaaaaaaaaaaaaaaaaaaaaaaaaaaaaaaaaaaaaaaaugcaucccccccccccccccccccccccccccccccaaaggcucuuuucagagccaccagaauu

SEQ ID NO: 2710 - RNA, 2061 nt, Artificial Sequence
  mRNA product Design h-5 comprising derived and/or modified sequence from HRSV(A2)__F_DSCav1_mut2 (opt11)
gggagagggcgcuuggcuugcaaggacccugagcugcggcauugaagcacacccaacccaacucgacugaagucagccucacugaaccggaucugagaaucuucucucucugggcuugccagggcucuccgaaccuagcuagcauccucuucaauuccaacuagaaagcuuaccauggaacuccucauccuaaaagccaacgcgaucaccacaauccugacagccgucaccuucugcuucgccuccggccaaaacaucaccgaagaguucuaccaauccacaugcuccgccgucuccaagggcuaccugggcgcacuucguacaggcugguacaccuccguaauaaccaucgaacucuccaacaucaaagaaaacaaaugcaacggcacagacgcaaaagucaaacucaucaagcaagaacuugacaaauacaaaaaugcagucaccgaccuucaacuccucaugcaaucuacccccgccacaggcuccggcuccgcuaucugcuccggcgucgccgucugcaaaguccuccaccucgaaggugaaguaaacaaaauaaaauccgcccuccucuccaccaacaaagccgucgucucccuaucaaacggcgucuccgugcucaccuucaagguucucgaccugaaaaacuacauagacaaacagcuccuaccaauccuuaacaaacagagcugcuccauuccgaauaucgaaacgguaaucgaauuucaacagaaaaacaaccgccuccucgaaauaacgcgagaguucuccguaaacgcuggcgucaccacacccgucagcaccuacaugcuaacgaacuccgaacucuugucgcucaucaacgacaugcccauaaccaacgaccaaaagaaacuaauguccaauaacguacaaaucguacgccaacaaucuuacuccaucaugugcaucauaaaagaagaaguacuagcuuacgucguccaacucccacuguacggagucaucgacacccccugcuggaaacuccacaccucuccccucugcaccaccaacaccaaagagggcuccaacauuugccugacacgcaccgaccgcggcugguacugcgacaacgcaggcuccgucucguucuucccccaagccgaaaccugcaaaguccaauccaaccgcgucuucugcgacaccaugaacucccucacccuccccuccgaagucaaucuaugcaacguagacaucuucaacccgaaauaugacugcaaaauuaugacaucuaaaaccgacguguccuccucagucaucacuucccuaggagccaucguuuccuguuacggcaagaccaaaugcaccgccagcaacaaaaaccgaggcaucaucaaaaccuucuccaacggaugugacuaugucuccaacaagggcgucgacaccgucagcgucggcaacacccucuacugcgucaacaaacaagaaggccaaucccucuacgucaaaggagagcccauaaucaacuucuacgacccccucgucuucccauccgacgaguucgacgccucaaucucccaagucaacgagaaaaucaaccaauccuuagccuucauccguaaguccgacgaacuccuucacaacgucaacgccgguaaaucuaccaccaacaucaugauaacaacaauaauuaucgucaucaucgucauccuccuuucccucaucgcggucgggcuauugcucuacugcaaagcccgguccaccccaguaacccucucuaaagaccaacucagcggaaucaauaacauagccuucagcaauuaaggacuaguacuggcugcaucucccuuuccucuguccuccauccuucucccaggauggugaagggggaccugguacccagugauccccaccccaggauccuaaaucaugacuuaccugcuaauaaaaacucauuggaaaagugagaagaucuaaaaaaaaaaaaaaaaaaaaaaaaaaaaaaaaaaaaaaaaaaaaaaaaaaaaaaaaaaaaaaaaugcaucccccccccccccccccccccccccccccccaaaggcucuuuucagagccaccagaauu

SEQ ID NO: 2711 - RNA, 1994 nt, Artificial Sequence
  mRNA product Design i-1 comprising derived and/or modified sequence from HRSV(A2)__F_DSCav1_mut2 (opt1)
gggagagggcgcuuggcuugcaaggacccugagcugcggcauugaagcacacccaacccaacucgacugaagucagccucacugaaccggaucugagaaucuucucucucugggcuugccagggcucuccgaaccuagcuagcauccucuucaauuccaacuagaaagcuuaccauggagcugcucauccugaaggccaacgccaucaccaccauccugacggcggugaccuucugcuucgccagcggccagaacaucaccgaggaguucuaccaguccacgugcagcgccgucuccaagggguaccucggcgcccugcggaccggcugguacaccuccgugaucaccaucgagcugagcaacaucaaggagaacaagugcaacgggaccgacgccaaggugaagcucaucaagcaggagcuggacaaguacaagaacgcggucacggaccugcagcuccugaugcaguccaccccggcaaccggcuccggcuccgccaucugcagcggcgucgccgugugcaaggugcugcaccucgagggggaggucaacaagaucaagagcgcccugcuguccaccaacaaggccguggugagccucuccaacggcgucagcgugcugaccuucaaggugcuggaccucaagaacuacaucgacaagcagcugcugcccauccugaacaagcagagcugcuccauccccaacaucgagacggugaucgaguuccagcagaagaacaaccggcuccuggagaucacccgcgaguucagcgugaacgccggggucaccacccccguguccacguacaugcugaccaacagcgagcuccugucccugaucaacgacaugccgaucaccaacgaccagaagaagcucaugagcaacaacgugcagaucguccggcagcaguccuacagcaucaugugcaucaucaaggaggaggugcuggcguacgugguccagcugccccucuacggcgugaucgacacccccugcuggaagcugcacacgagcccccugugcaccaccaacaccaaggagggguccaacaucugccucacgcgcaccgaccggggcugguacugcgacaacgccggcagcgucuccuucuucccgcaggccgagaccugcaaggugcagagcaaccgcguguucugcgacaccaugaacucccugacgcugcccagcgagguaaaccucugcaacgucgacaucuucaaccccaaguacgacugcaagaucaugaccuccaagaccgacgugagcuccagcgugaucaccucccugggggccaucgucagcugcuacggcaagacgaagugcaccgccagcaacaagaaccgggggaucaucaagaccuucuccaacggcugcgacuacgugagcaacaagggcguggacaccguguccgucgggaacacccuguacugcgugaacaagcaggagggccagagccucuacgugaagggggagcccaucaucaacuucuacgacccgcuggucuuccccuccgacgaguucgacgcgagcaucucccaggugaacgagaagaucaaccagagccuggccuucauccgcaaguccgacgagcugcuccacaacgugaacgccggcaagagcacgaccaacaucaugaucaccaccaucaucaucgucaucaucgugauccugcugucccucaucgccguggggcugcugcucuacugcaaggcccggagcacgcccgucacccuguccaaggaccagcugagcggcaucaacaacaucgcguucuccaacugaggacuaguguccaccugucccuccugggcugcuggauugucucguuuuccugccaaauaaacaggaucagcgcuuuacagaucuaaaaaaaaaaaaaaaaaaaaaaaaaaaaaaaaaaaaaaaaaaaaaaaaaaaaaaaaaaaaaaaaugcaucccccccccccccccccccccccccccccccaaaggcucuuuucagagccaccagaauu

SEQ ID NO: 2712 - RNA, 1994 nt, Artificial Sequence
  mRNA product Design i-1 comprising derived and/or modified sequence from HRSV(A2)__F_DSCav1_mut2 (opt1)
gggagagggcgcuuggcuugcaaggacccugagcugcggcauugaagcacacccaacccaacucgacugaagucagccucacugaaccggaucugagaaucuucucucucugggcuugccagggcucuccgaaccuagcuagcauccucuucaauuccaacuagaaagcuuaccauggagcugcucauccugaaggccaacgccaucaccaccauccugacggcggugaccuucugcuucgccagcggccagaacaucaccgaggaguucuaccaguccacgugcagcgccgucuccaagggguaccucggcgcccugcgcaccgggugguacaccagcgugaucaccaucgagcuguccaacaucaaggagaacaagugcaacggcaccgacgccaaggugaagcucaucaagcaggagcuggacaaguacaagaacgcggucacggaccugcagcuccugaugcagagcacccccgccaccggguccggcagcgccaucugcuccggcguggccgugugcaagguccugcaccucgagggggaggugaacaagaucaagagcgcgcugcuguccaccaacaaggccguggucagccucuccaacggcgugagcgugcugacguucaagguccuggaccucaagaacuacaucgacaagcagcugcugccgauccucaacaagcaguccugcagcauccccaacaucgagaccgugaucgaguuccagcagaagaacaaccggcugcuggagaucacccgcgaguucuccgugaacgccggggucaccacgcccgugagcaccuacaugcucaccaacuccgagcugcugagccucaucaacgacaugcccaucaccaacgaccagaagaagcugaugagcaacaacgugcagaucguccggcagcaguccuacagcaucaugugcaucaucaaggaggaggugcuggccuacgugguccagcucccgcuguacggcgugaucgacacgcccugcuggaagcugcacaccagcccccucugcaccaccaacacgaaggagggguccaacaucugccugacccgcaccgaccggggcugguacugcgacaacgccggcuccgugagcuucuucccccaggcggagaccugcaagguccaguccaaccgcguguucugcgacacgaugaacagccugacccucccguccgaggucaaccugugcaacguggacaucuucaaccccaaguacgacugcaagaucaugaccagcaagaccgacguguccagcuccgucaucacgagccugggggccaucguguccugcuacggcaagaccaagugcaccgccagcaacaagaaccgggggaucaucaagaccuucuccaacggcugcgacuacgugagcaacaagggcgucgacacgguguccguggggaacacccucuacugcgucaacaagcaggagggccagagccuguacgugaagggggagcccaucaucaacuucuacgacccccugguguucccgagcgacgaguucgacgccuccaucagccaggucaacgagaagaucaaccagucccucgccuucauccgcaagagcgacgagcugcugcacaacgugaacgcgggcaaguccaccaccaacaucaugaucaccacgaucaucaucgugaucaucgucauccuccugagccugaucgccguggggcuccugcuguacugcaaggcccgguccacccccgugacccugagcaaggaccagcucuccggcaucaacaacaucgccuucagcaacugaggacuaguguccaccugucccuccugggcugcuggauugucucguuuuccugccaaauaaacaggaucagcgcuuuacagaucuaaaaaaaaaaaaaaaaaaaaaaaaaaaaaaaaaaaaaaaaaaaaaaaaaaaaaaaaaaaaaaaaugcaucccccccccccccccccccccccccccccccaaaggcucuuuucagagccaccagaauu

SEQ ID NO: 2713 - RNA, 1994 nt, Artificial Sequence
  mRNA product Design i-1 comprising derived and/or modified sequence from HRSV(A2)__F_DSCav1_mut2 (opt2)
gggagagggcgcuuggcuugcaaggacccugagcugcggcauugaagcacacccaacccaacucgacugaagucagccucacugaaccggaucugagaaucuucucucucugggcuugccagggcucuccgaaccuagcuagcauccucuucaauuccaacuagaaagcuuaccauggagcuccucauccucaaggccaacgccaucaccaccauccucaccgccgucaccuucugcuucgccuccggccagaacaucaccgaggaguucuaccaguccaccugcuccgccgucuccaagggcuaccucggcgcccuccgcaccggcugguacaccuccgucaucaccaucgagcucuccaacaucaaggagaacaagugcaacggcaccgacgccaaggucaagcucaucaagcaggagcucgacaaguacaagaacgccgucaccgaccuccagcuccucaugcaguccacccccgccaccggcuccggcuccgccaucugcuccggcgucgccgucugcaagguccuccaccucgagggcgaggucaacaagaucaaguccgcccuccucuccaccaacaaggccgucgucucccucuccaacggcgucuccguccucaccuucaagguccucgaccucaagaacuacaucgacaagcagcuccuccccauccucaacaagcaguccugcuccauccccaacaucgagaccgucaucgaguuccagcagaagaacaaccgccuccucgagaucacccgcgaguucuccgucaacgccggcgucaccacccccgucuccaccuacaugcucaccaacuccgagcuccucucccucaucaacgacaugcccaucaccaacgaccagaagaagcucauguccaacaacguccagaucguccgccagcaguccuacuccaucaugugcaucaucaaggaggagguccucgccuacgucguccagcucccccucuacggcgucaucgacacccccugcuggaagcuccacaccuccccccucugcaccaccaacaccaaggagggcuccaacaucugccucacccgcaccgaccgcggcugguacugcgacaacgccggcuccgucuccuucuucccccaggccgagaccugcaagguccaguccaaccgcgucuucugcgacaccaugaacucccucacccuccccuccgaggucaaccucugcaacgucgacaucuucaaccccaaguacgacugcaagaucaugaccuccaagaccgacgucuccuccuccgucaucaccucccucggcgccaucgucuccugcuacggcaagaccaagugcaccgccuccaacaagaaccgcggcaucaucaagaccuucuccaacggcugcgacuacgucuccaacaagggcgucgacaccgucuccgucggcaacacccucuacugcgucaacaagcaggagggccagucccucuacgucaagggcgagcccaucaucaacuucuacgacccccucgucuuccccuccgacgaguucgacgccuccaucucccaggucaacgagaagaucaaccagucccucgccuucauccgcaaguccgacgagcuccuccacaacgucaacgccggcaaguccaccaccaacaucaugaucaccaccaucaucaucgucaucaucgucauccuccucucccucaucgccgucggccuccuccucuacugcaaggcccgcuccacccccgucacccucuccaaggaccagcucuccggcaucaacaacaucgccuucuccaacugaggacuaguguccaccugucccuccugggcugcuggauugucucguuuuccugccaaauaaacaggaucagcgcuuuacagaucuaaaaaaaaaaaaaaaaaaaaaaaaaaaaaaaaaaaaaaaaaaaaaaaaaaaaaaaaaaaaaaaaugcaucccccccccccccccccccccccccccccccaaaggcucuuuucagagccaccagaauu

SEQ ID NO: 2714 - RNA, 1994 nt, Artificial Sequence
  mRNA product Design i-1 comprising derived and/or modified sequence from HRSV(A2)__F_DSCav1_mut2 (opt3)
gggagagggcgcuuggcuugcaaggacccugagcugcggcauugaagcacacccaacccaacucgacugaagucagccucacugaaccggaucugagaaucuucucucucugggcuugccagggcucuccgaaccuagcuagcauccucuucaauuccaacuagaaagcuuaccauggagcugcucauccuuaaggccaacgcuauuaccacaauacugacugcagugacguucugcuuugccagcggccagaauaucaccgaagaguucuaccaauccacauguucugcggucucaaaaggguauuugggagcuuuaagaacugguugguacaccaguguuauuacaaucgaacugagcaacauuaaggagaauaaaugcaacggcaccgacgccaaggugaaacuaaucaagcaggaacucgauaaguauaaaaaugcaguaacugaccugcagcuucugaugcaguccacacccgccaccgggucuggaucggcuauauguucaggcguggcagucugcaagguguugcaccucgagggugagguuaacaaaaucaagagcgcccugcugaguacgaauaaagcuguggucucccucucuaacggggugagcguauuaacuuuuaagguucuggaucuuaagaauuacauugacaaacaauugcugccuauccuaaacaagcaguccuguucaauuccaaauaucgaaaccgugauagaguuccagcagaaaaacaauaggcuccuggaaauuacacgggaguuuagugucaacgccggagugacuaccccggugagcacauauaugcuuaccaauucugagcuguugucccucaucaacgauaugcccauuacgaacgaccaaaagaaacugaugucaaauaacguccagaucguucgccagcagagcuacaguaucaugugcauuauaaaggaagagguguuagcguauguagugcaacugccucucuacggcgucaucgauacuccauguuggaaacuucauacaucuccccugugcaccacuaauacaaaggaaggcuccaacauuuguuugacccgaacggaccgugggugguacugcgauaaugcaggaagcgugucguucuuuccucaggccgagaccuguaagguucagucuaacagaguguucugcgacacaaugaacucccuaacucugccaucagaagucaaucucugcaauguggauaucuuuaaccccaaauaugacuguaagauaaugaccaguaaaacagauguaagcuccucuguuauuacuagccugggugcuaucgugucaugcuacggcaagaccaaauguacagccaguaauaagaacagggggaucauuaagaccuucuccaauggaugcgacuaugucagcaacaaaggcguggacacugucucuguggguaauacgcuuuacuguguuaacaagcaagaggggcagucacuguaugugaaaggagagccuaucauuaacuuuuacgauccauugguauucccgagugacgaauuugaugcaagcauaucccaggucaaugagaagaucaaccagucucucgcuuucauucggaaaucggacgaacuguuacacaaugugaacgccggcaagagcacaaccaauaucaugaucacuaccauuauaaucguuauuaucgugauucugcuaucccucaucgcggucggccugcuuuuguauugcaaggcccgcucaacacccgugacccugaguaaagaucaacucucugggauaaacaauaucgcauucagcaacugaggacuaguguccaccugucccuccugggcugcuggauugucucguuuuccugccaaauaaacaggaucagcgcuuuacagaucuaaaaaaaaaaaaaaaaaaaaaaaaaaaaaaaaaaaaaaaaaaaaaaaaaaaaaaaaaaaaaaaaugcaucccccccccccccccccccccccccccccccaaaggcucuuuucagagccaccagaauu

SEQ ID NO: 2715 - RNA, 1994 nt, Artificial Sequence
  mRNA product Design i-1 comprising derived and/or modified sequence from HRSV(A2)__F_DSCav1_mut2 (opt4)
gggagagggcgcuuggcuugcaaggacccugagcugcggcauugaagcacacccaacccaacucgacugaagucagccucacugaaccggaucugagaaucuucucucucugggcuugccagggcucuccgaaccuagcuagcauccucuucaauuccaacuagaaagcuuaccauggagcugcugauccugaaggccaacgccaucaccaccauccugaccgccgugaccuucugcuucgccagcggccagaacaucaccgaggaguucuaccagagcaccugcagcgccgugagcaagggcuaccugggcgcccugagaaccggcugguacaccagcgugaucaccaucgagcugagcaacaucaaggagaacaagugcaacggcaccgacgccaaggugaagcugaucaagcaggagcuggacaaguacaagaacgccgugaccgaccugcagcugcugaugcagagcacccccgccaccggcagcggcagcgccaucugcagcggcguggccgugugcaaggugcugcaccuggagggcgaggugaacaagaucaagagcgcccugcugagcaccaacaaggccguggugagccugagcaacggcgugagcgugcugaccuucaaggugcuggaccugaagaacuacaucgacaagcagcugcugcccauccugaacaagcagagcugcagcauccccaacaucgagaccgugaucgaguuccagcagaagaacaacagacugcuggagaucaccagagaguucagcgugaacgccggcgugaccacccccgugagcaccuacaugcugaccaacagcgagcugcugagccugaucaacgacaugcccaucaccaacgaccagaagaagcugaugagcaacaacgugcagaucgugagacagcagagcuacagcaucaugugcaucaucaaggaggaggugcuggccuacguggugcagcugccccuguacggcgugaucgacacccccugcuggaagcugcacaccagcccccugugcaccaccaacaccaaggagggcagcaacaucugccugaccagaaccgacagaggcugguacugcgacaacgccggcagcgugagcuucuucccccaggccgagaccugcaaggugcagagcaacagaguguucugcgacaccaugaacagccugacccugcccagcgaggugaaccugugcaacguggacaucuucaaccccaaguacgacugcaagaucaugaccagcaagaccgacgugagcagcagcgugaucaccagccugggcgccaucgugagcugcuacggcaagaccaagugcaccgccagcaacaagaacagaggcaucaucaagaccuucagcaacggcugcgacuacgugagcaacaagggcguggacaccgugagcgugggcaacacccuguacugcgugaacaagcaggagggccagagccuguacgugaagggcgagcccaucaucaacuucuacgacccccugguguuccccagcgacgaguucgacgccagcaucagccaggugaacgagaagaucaaccagagccuggccuucaucagaaagagcgacgagcugcugcacaacgugaacgccggcaagagcaccaccaacaucaugaucaccaccaucaucaucgugaucaucgugauccugcugagccugaucgccgugggccugcugcuguacugcaaggccagaagcacccccgugacccugagcaaggaccagcugagcggcaucaacaacaucgccuucagcaacugaggacuaguguccaccugucccuccugggcugcuggauugucucguuuuccugccaaauaaacaggaucagcgcuuuacagaucuaaaaaaaaaaaaaaaaaaaaaaaaaaaaaaaaaaaaaaaaaaaaaaaaaaaaaaaaaaaaaaaaugcaucccccccccccccccccccccccccccccccaaaggcucuuuucagagccaccagaauu

SEQ ID NO: 2716 - RNA, 1994 nt, Artificial Sequence
  mRNA product Design i-1 comprising derived and/or modified sequence from HRSV(A2)__F_DSCav1_mut2 (opt5)
gggagagggcgcuuggcuugcaaggacccugagcugcggcauugaagcacacccaacccaacucgacugaagucagccucacugaaccggaucugagaaucuucucucucugggcuugccagggcucuccgaaccuagcuagcauccucuucaauuccaacuagaaagcuuaccauggagcugcucauccugaaggccaacgcuauuaccacaauccuuacggccgugaccuucugcuuugcgagcggccagaauauuacagaagaguucuaccaauccaccuguucugcugucagcaaaggguaucugggagcccucagaacaggcugguacaccuccguuaucacaauugaacugucuaacaucaaggagaauaaaugcaacgggaccgacgccaaggugaaacuuaucaagcaggaacuggauaaguauaaaaaugcugugacggaccuccagcugcugaugcagagcacccccgccacaggauccggcucugcuauuuguagcggggucgccgugugcaagguucuccaccuggagggagaggugaacaaaaucaaguccgcgcuucugagcaccaauaaagccgucgugucucucuccaacggcguuagcgugcugacauuuaagguccuugaucugaagaauuacauugacaaacaacuccugccuauccugaacaagcagucuuguuccauuccgaauaucgaaaccgugauugaguuccagcagaaaaacaaucggcuccuggaaaucacgcgcgaguuuagcgugaacgcuggcgucacaacccccguuucuacauauaugcuuaccaauuccgagcugcucagccugaucaacgauaugccuauuaccaacgaccaaaagaaacuuauguccaauaacgugcagaucgugagacagcagucuuacagcauuaugugcaucauuaaggaagagguccuggccuaugugguucaacucccccuguacggggugaucgauacaccuuguuggaaacugcauacgagcccccucugcaccacaaauaccaaggaaggauccaacaucugucugacacggaccgaccgcggcugguacugcgauaaugcugggucugucuccuucuuuccucaggccgagacguguaaggugcagagcaacagaguuuucugcgacacaaugaacucucuuacccugccgagcgaagugaaucucugcaaugucgauauuuuuaaccccaaauaugacuguaagaucaugaccuccaaaacagaugugucuagcuccgucauuaccagccugggagcgaucgugucuugcuacggcaagacaaaauguacggccuccaauaagaaccgggggauuaucaagaccuucagcaauggaugcgacuauguuucuaacaaaggcguggacacagucuccgugggcaauacccuuuacuguguuaacaagcaagaggggcagagccuguaugugaaaggagagccuaucauuaacuuuuacgauccccucgucuucccuuccgacgaauuugaugcuucuaucagccaggugaaugagaagauuaaccagucccuggccuucauccgcaaaucugacgaacugcuccacaaugugaacgcuggcaagagcacaaccaauauuaugaucacgaccauuaucaucguuauuaucgucauucugcuuucccugaucgccguggggcuccugcuguauugcaaggccagaagcacacccgugacccuuucuaaagaucaacucuccggaauuaacaauaucgcuuucagcaacugaggacuaguguccaccugucccuccugggcugcuggauugucucguuuuccugccaaauaaacaggaucagcgcuuuacagaucuaaaaaaaaaaaaaaaaaaaaaaaaaaaaaaaaaaaaaaaaaaaaaaaaaaaaaaaaaaaaaaaaugcaucccccccccccccccccccccccccccccccaaaggcucuuuucagagccaccagaauu

SEQ ID NO: 2717 - RNA, 1994 nt, Artificial Sequence
  mRNA product Design i-1 comprising derived and/or modified sequence from HRSV(A2)__F_DSCav1_mut2 (opt6)
gggagagggcgcuuggcuugcaaggacccugagcugcggcauugaagcacacccaacccaacucgacugaagucagccucacugaaccggaucugagaaucuucucucucugggcuugccagggcucuccgaaccuagcuagcauccucuucaauuccaacuagaaagcuuaccauggaacuacuaauccuaaaagcaaacgcaauuacaacuauacuuaccgccguaacauuuugcuucgcaucugggcaaaacauuaccgaagaauuuuaucaaucaacaugcucagcagucuccaaaggauaccuuggagcauuaagaaccggcugguauaccuccguaauaacaauugaacuaucuaauauaaaagaaaauaaauguaauggaacugacgcaaaaguuaaacuaauaaaacaagaacucgacaaauacaaaaacgccgucacagaccuacaacuacuaaugcaaucaacccccgcaacaggaucaggauccgcaaucugcagcggcgucgcaguuugcaaaguccuacauuuagaaggagaaguaaacaaaauaaaaucugcucuccucucuacaaacaaagcaguagugucacuuucaaacggaguaucaguucuaacauucaaaguacuagaccuaaaaaauuacauagacaaacaacuacuuccaauucuaaacaaacaauccuguuccauacccaacauagaaacaguaauagaauuucaacaaaaaaauaacagacuccuagaaauuacaagagaauuuuccgucaaugcaggaguaacaaccccaguaucaaccuacauguuaacuaacucagaacucuuaucacuaauaaacgacaugccaaucacuaaugaccaaaaaaaacucaugucaaauaacguacaaauaguccgacaacaaucauacuccaucaugugcauuauaaaagaagaaguacuagcauacgucguccaauuaccacuauacggcgucauagacacaccauguuggaaacuccacacaucaccacuaugcacuacaaauacaaaagaaggcuccaacaucugccuaacaagaacagacagagguugguauugcgacaacgcaggaucaguaucauuuuucccccaagcagaaacauguaaaguacaaucaaauagagucuucugcgacaccaugaacucauuaacacuaccuucagaagucaaccuaugcaacguagacaucuucaacccuaaauaugacugcaaaaucaugaccagcaaaaccgacguuucaucuuccguaauaacaucacuaggcgcaauagucucauguuacggcaaaacaaaauguacagcaucaaauaaaaaccguggaauaauaaaaacauuuucuaaugguugugacuacguaagcaauaaaggaguagauacaguaucagucggcaacaccuuauacuguguaaacaaacaagaaggccaaaguuuauacgucaaaggagaacccaucaucaacuucuacgacccauuaguauucccaucagacgaauuugaugcaagcauuucacaagucaacgaaaaaaucaaucaaucauuagcauucauccgaaaaucagacgaauuauuacacaacguaaacgccggaaaaucaaccacuaauauaaugauaaccacaauaaucaucguaauaauaguaauacuucucucacuaaucgcagucggacuccuucuauacugcaaagcaagaucuacaccaguaacacuauccaaagaucaacuaaguggcauaaacaacauagcauuuucuaacuaaggacuaguguccaccugucccuccugggcugcuggauugucucguuuuccugccaaauaaacaggaucagcgcuuuacagaucuaaaaaaaaaaaaaaaaaaaaaaaaaaaaaaaaaaaaaaaaaaaaaaaaaaaaaaaaaaaaaaaaugcaucccccccccccccccccccccccccccccccaaaggcucuuuucagagccaccagaauu

SEQ ID NO: 2718 - RNA, 1994 nt, Artificial Sequence
  mRNA product Design i-1 comprising derived and/or modified sequence from HRSV(A2)__F_DSCav1_mut2 (opt11)
gggagagggcgcuuggcuugcaaggacccugagcugcggcauugaagcacacccaacccaacucgacugaagucagccucacugaaccggaucugagaaucuucucucucugggcuugccagggcucuccgaaccuagcuagcauccucuucaauuccaacuagaaagcuuaccauggaacuccucauccuaaaagccaacgcgaucaccacaauccugacagccgucaccuucugcuucgccuccggccaaaacaucaccgaagaguucuaccaauccacaugcuccgccgucuccaagggcuaccugggcgcacuucguacaggcugguacaccuccguaauaaccaucgaacucuccaacaucaaagaaaacaaaugcaacggcacagacgcaaaagucaaacucaucaagcaagaacuugacaaauacaaaaaugcagucaccgaccuucaacuccucaugcaaucuacccccgccacaggcuccggcuccgcuaucugcuccggcgucgccgucugcaaaguccuccaccucgaaggugaaguaaacaaaauaaaauccgcccuccucuccaccaacaaagccgucgucucccuaucaaacggcgucuccgugcucaccuucaagguucucgaccugaaaaacuacauagacaaacagcuccuaccaauccuuaacaaacagagcugcuccauuccgaauaucgaaacgguaaucgaauuucaacagaaaaacaaccgccuccucgaaauaacgcgagaguucuccguaaacgcuggcgucaccacacccgucagcaccuacaugcuaacgaacuccgaacucuugucgcucaucaacgacaugcccauaaccaacgaccaaaagaaacuaauguccaauaacguacaaaucguacgccaacaaucuuacuccaucaugugcaucauaaaagaagaaguacuagcuuacgucguccaacucccacuguacggagucaucgacacccccugcuggaaacuccacaccucuccccucugcaccaccaacaccaaagagggcuccaacauuugccugacacgcaccgaccgcggcugguacugcgacaacgcaggcuccgucucguucuucccccaagccgaaaccugcaaaguccaauccaaccgcgucuucugcgacaccaugaacucccucacccuccccuccgaagucaaucuaugcaacguagacaucuucaacccgaaauaugacugcaaaauuaugacaucuaaaaccgacguguccuccucagucaucacuucccuaggagccaucguuuccuguuacggcaagaccaaaugcaccgccagcaacaaaaaccgaggcaucaucaaaaccuucuccaacggaugugacuaugucuccaacaagggcgucgacaccgucagcgucggcaacacccucuacugcgucaacaaacaagaaggccaaucccucuacgucaaaggagagcccauaaucaacuucuacgacccccucgucuucccauccgacgaguucgacgccucaaucucccaagucaacgagaaaaucaaccaauccuuagccuucauccguaaguccgacgaacuccuucacaacgucaacgccgguaaaucuaccaccaacaucaugauaacaacaauaauuaucgucaucaucgucauccuccuuucccucaucgcggucgggcuauugcucuacugcaaagcccgguccaccccaguaacccucucuaaagaccaacucagcggaaucaauaacauagccuucagcaauuaaggacuaguguccaccugucccuccugggcugcuggauugucucguuuuccugccaaauaaacaggaucagcgcuuuacagaucuaaaaaaaaaaaaaaaaaaaaaaaaaaaaaaaaaaaaaaaaaaaaaaaaaaaaaaaaaaaaaaaaugcaucccccccccccccccccccccccccccccccaaaggcucuuuucagagccaccagaauu

SEQ ID NO: 2719 - RNA, 1994 nt, Artificial Sequence
  mRNA product Design i-2 comprising derived and/or modified sequence from HRSV(A2)__F_DSCav1_mut2 (opt1)
gggagaggcgcugccuacggagguggcagccaucuccuucucggcaucaagcuuaccauggagcugcucauccugaaggccaacgccaucaccaccauccugacggcggugaccuucugcuucgccagcggccagaacaucaccgaggaguucuaccaguccacgugcagcgccgucuccaagggguaccucggcgcccugcggaccggcugguacaccuccgugaucaccaucgagcugagcaacaucaaggagaacaagugcaacgggaccgacgccaaggugaagcucaucaagcaggagcuggacaaguacaagaacgcggucacggaccugcagcuccugaugcaguccaccccggcaaccggcuccggcuccgccaucugcagcggcgucgccgugugcaaggugcugcaccucgagggggaggucaacaagaucaagagcgcccugcuguccaccaacaaggccguggugagccucuccaacggcgucagcgugcugaccuucaaggugcuggaccucaagaacuacaucgacaagcagcugcugcccauccugaacaagcagagcugcuccauccccaacaucgagacggugaucgaguuccagcagaagaacaaccggcuccuggagaucacccgcgaguucagcgugaacgccggggucaccacccccguguccacguacaugcugaccaacagcgagcuccugucccugaucaacgacaugccgaucaccaacgaccagaagaagcucaugagcaacaacgugcagaucguccggcagcaguccuacagcaucaugugcaucaucaaggaggaggugcuggcguacgugguccagcugccccucuacggcgugaucgacacccccugcuggaagcugcacacgagcccccugugcaccaccaacaccaaggagggguccaacaucugccucacgcgcaccgaccggggcugguacugcgacaacgccggcagcgucuccuucuucccgcaggccgagaccugcaaggugcagagcaaccgcguguucugcgacaccaugaacucccugacgcugcccagcgagguaaaccucugcaacgucgacaucuucaaccccaaguacgacugcaagaucaugaccuccaagaccgacgugagcuccagcgugaucaccucccugggggccaucgucagcugcuacggcaagacgaagugcaccgccagcaacaagaaccgggggaucaucaagaccuucuccaacggcugcgacuacgugagcaacaagggcguggacaccguguccgucgggaacacccuguacugcgugaacaagcaggagggccagagccucuacgugaagggggagcccaucaucaacuucuacgacccgcuggucuuccccuccgacgaguucgacgcgagcaucucccaggugaacgagaagaucaaccagagccuggccuucauccgcaaguccgacgagcugcuccacaacgugaacgccggcaagagcacgaccaacaucaugaucaccaccaucaucaucgucaucaucgugauccugcugucccucaucgccguggggcugcugcucuacugcaaggcccggagcacgcccgucacccuguccaaggaccagcugagcggcaucaacaacaucgcguucuccaacugaggacuagugcaucacauuuaaaagcaucucagccuaccaugagaauaagagaaagaaaaugaagaucaauagcuuauucaucucuuuuucuuuuucguugguguaaagccaacacccugucuaaaaaacauaaauuucuuuaaucauuuugccucuuuucucugugcuucaauuaauaaaaaauggaaagaaccuagaucuaaaaaaaaaaaaaaaaaaaaaaaaaaaaaaaaaaaaaaaaaaaaaaaaaaaaaaaaaaaaaaaaugcaucccccccccccccccccccccccccccccccaaaggcucuuuucagagccaccagaauu

SEQ ID NO: 2720 - RNA, 1994 nt, Artificial Sequence
  mRNA product Design i-2 comprising derived and/or modified sequence from HRSV(A2)__F_DSCav1_mut2 (opt1)
gggagaggcgcugccuacggagguggcagccaucuccuucucggcaucaagcuuaccauggagcugcucauccugaaggccaacgccaucaccaccauccugacggcggugaccuucugcuucgccagcggccagaacaucaccgaggaguucuaccaguccacgugcagcgccgucuccaagggguaccucggcgcccugcgcaccgggugguacaccagcgugaucaccaucgagcuguccaacaucaaggagaacaagugcaacggcaccgacgccaaggugaagcucaucaagcaggagcuggacaaguacaagaacgcggucacggaccugcagcuccugaugcagagcacccccgccaccggguccggcagcgccaucugcuccggcguggccgugugcaagguccugcaccucgagggggaggugaacaagaucaagagcgcgcugcuguccaccaacaaggccguggucagccucuccaacggcgugagcgugcugacguucaagguccuggaccucaagaacuacaucgacaagcagcugcugccgauccucaacaagcaguccugcagcauccccaacaucgagaccgugaucgaguuccagcagaagaacaaccggcugcuggagaucacccgcgaguucuccgugaacgccggggucaccacgcccgugagcaccuacaugcucaccaacuccgagcugcugagccucaucaacgacaugcccaucaccaacgaccagaagaagcugaugagcaacaacgugcagaucguccggcagcaguccuacagcaucaugugcaucaucaaggaggaggugcuggccuacgugguccagcucccgcuguacggcgugaucgacacgcccugcuggaagcugcacaccagcccccucugcaccaccaacacgaaggagggguccaacaucugccugacccgcaccgaccggggcugguacugcgacaacgccggcuccgugagcuucuucccccaggcggagaccugcaagguccaguccaaccgcguguucugcgacacgaugaacagccugacccucccguccgaggucaaccugugcaacguggacaucuucaaccccaaguacgacugcaagaucaugaccagcaagaccgacguguccagcuccgucaucacgagccugggggccaucguguccugcuacggcaagaccaagugcaccgccagcaacaagaaccgggggaucaucaagaccuucuccaacggcugcgacuacgugagcaacaagggcgucgacacgguguccguggggaacacccucuacugcgucaacaagcaggagggccagagccuguacgugaagggggagcccaucaucaacuucuacgacccccugguguucccgagcgacgaguucgacgccuccaucagccaggucaacgagaagaucaaccagucccucgccuucauccgcaagagcgacgagcugcugcacaacgugaacgcgggcaaguccaccaccaacaucaugaucaccacgaucaucaucgugaucaucgucauccuccugagccugaucgccguggggcuccugcuguacugcaaggcccgguccacccccgugacccugagcaaggaccagcucuccggcaucaacaacaucgccuucagcaacugaggacuagugcaucacauuuaaaagcaucucagccuaccaugagaauaagagaaagaaaaugaagaucaauagcuuauucaucucuuuuucuuuuucguugguguaaagccaacacccugucuaaaaaacauaaauuucuuuaaucauuuugccucuuuucucugugcuucaauuaauaaaaaauggaaagaaccuagaucuaaaaaaaaaaaaaaaaaaaaaaaaaaaaaaaaaaaaaaaaaaaaaaaaaaaaaaaaaaaaaaaaugcaucccccccccccccccccccccccccccccccaaaggcucuuuucagagccaccagaauu

SEQ ID NO: 2721 - RNA, 1994 nt, Artificial Sequence
  mRNA product Design i-2 comprising derived and/or modified sequence from HRSV(A2)__F_DSCav1_mut2 (opt2)
gggagaggcgcugccuacggagguggcagccaucuccuucucggcaucaagcuuaccauggagcuccucauccucaaggccaacgccaucaccaccauccucaccgccgucaccuucugcuucgccuccggccagaacaucaccgaggaguucuaccaguccaccugcuccgccgucuccaagggcuaccucggcgcccuccgcaccggcugguacaccuccgucaucaccaucgagcucuccaacaucaaggagaacaagugcaacggcaccgacgccaaggucaagcucaucaagcaggagcucgacaaguacaagaacgccgucaccgaccuccagcuccucaugcaguccacccccgccaccggcuccggcuccgccaucugcuccggcgucgccgucugcaagguccuccaccucgagggcgaggucaacaagaucaaguccgcccuccucuccaccaacaaggccgucgucucccucuccaacggcgucuccguccucaccuucaagguccucgaccucaagaacuacaucgacaagcagcuccuccccauccucaacaagcaguccugcuccauccccaacaucgagaccgucaucgaguuccagcagaagaacaaccgccuccucgagaucacccgcgaguucuccgucaacgccggcgucaccacccccgucuccaccuacaugcucaccaacuccgagcuccucucccucaucaacgacaugcccaucaccaacgaccagaagaagcucauguccaacaacguccagaucguccgccagcaguccuacuccaucaugugcaucaucaaggaggagguccucgccuacgucguccagcucccccucuacggcgucaucgacacccccugcuggaagcuccacaccuccccccucugcaccaccaacaccaaggagggcuccaacaucugccucacccgcaccgaccgcggcugguacugcgacaacgccggcuccgucuccuucuucccccaggccgagaccugcaagguccaguccaaccgcgucuucugcgacaccaugaacucccucacccuccccuccgaggucaaccucugcaacgucgacaucuucaaccccaaguacgacugcaagaucaugaccuccaagaccgacgucuccuccuccgucaucaccucccucggcgccaucgucuccugcuacggcaagaccaagugcaccgccuccaacaagaaccgcggcaucaucaagaccuucuccaacggcugcgacuacgucuccaacaagggcgucgacaccgucuccgucggcaacacccucuacugcgucaacaagcaggagggccagucccucuacgucaagggcgagcccaucaucaacuucuacgacccccucgucuuccccuccgacgaguucgacgccuccaucucccaggucaacgagaagaucaaccagucccucgccuucauccgcaaguccgacgagcuccuccacaacgucaacgccggcaaguccaccaccaacaucaugaucaccaccaucaucaucgucaucaucgucauccuccucucccucaucgccgucggccuccuccucuacugcaaggcccgcuccacccccgucacccucuccaaggaccagcucuccggcaucaacaacaucgccuucuccaacugaggacuagugcaucacauuuaaaagcaucucagccuaccaugagaauaagagaaagaaaaugaagaucaauagcuuauucaucucuuuuucuuuuucguugguguaaagccaacacccugucuaaaaaacauaaauuucuuuaaucauuuugccucuuuucucugugcuucaauuaauaaaaaauggaaagaaccuagaucuaaaaaaaaaaaaaaaaaaaaaaaaaaaaaaaaaaaaaaaaaaaaaaaaaaaaaaaaaaaaaaaaugcaucccccccccccccccccccccccccccccccaaaggcucuuuucagagccaccagaauu

SEQ ID NO: 2722 - RNA, 1994 nt, Artificial Sequence
  mRNA product Design i-2 comprising derived and/or modified sequence from HRSV(A2)__F_DSCav1_mut2 (opt3)
gggagaggcgcugccuacggagguggcagccaucuccuucucggcaucaagcuuaccauggagcugcucauccuuaaggccaacgcuauuaccacaauacugacugcagugacguucugcuuugccagcggccagaauaucaccgaagaguucuaccaauccacauguucugcggucucaaaaggguauuugggagcuuuaagaacugguugguacaccaguguuauuacaaucgaacugagcaacauuaaggagaauaaaugcaacggcaccgacgccaaggugaaacuaaucaagcaggaacucgauaaguauaaaaaugcaguaacugaccugcagcuucugaugcaguccacacccgccaccgggucuggaucggcuauauguucaggcguggcagucugcaagguguugcaccucgagggugagguuaacaaaaucaagagcgcccugcugaguacgaauaaagcuguggucucccucucuaacggggugagcguauuaacuuuuaagguucuggaucuuaagaauuacauugacaaacaauugcugccuauccuaaacaagcaguccuguucaauuccaaauaucgaaaccgugauagaguuccagcagaaaaacaauaggcuccuggaaauuacacgggaguuuagugucaacgccggagugacuaccccggugagcacauauaugcuuaccaauucugagcuguugucccucaucaacgauaugcccauuacgaacgaccaaaagaaacugaugucaaauaacguccagaucguucgccagcagagcuacaguaucaugugcauuauaaaggaagagguguuagcguauguagugcaacugccucucuacggcgucaucgauacuccauguuggaaacuucauacaucuccccugugcaccacuaauacaaaggaaggcuccaacauuuguuugacccgaacggaccgugggugguacugcgauaaugcaggaagcgugucguucuuuccucaggccgagaccuguaagguucagucuaacagaguguucugcgacacaaugaacucccuaacucugccaucagaagucaaucucugcaauguggauaucuuuaaccccaaauaugacuguaagauaaugaccaguaaaacagauguaagcuccucuguuauuacuagccugggugcuaucgugucaugcuacggcaagaccaaauguacagccaguaauaagaacagggggaucauuaagaccuucuccaauggaugcgacuaugucagcaacaaaggcguggacacugucucuguggguaauacgcuuuacuguguuaacaagcaagaggggcagucacuguaugugaaaggagagccuaucauuaacuuuuacgauccauugguauucccgagugacgaauuugaugcaagcauaucccaggucaaugagaagaucaaccagucucucgcuuucauucggaaaucggacgaacuguuacacaaugugaacgccggcaagagcacaaccaauaucaugaucacuaccauuauaaucguuauuaucgugauucugcuaucccucaucgcggucggccugcuuuuguauugcaaggcccgcucaacacccgugacccugaguaaagaucaacucucugggauaaacaauaucgcauucagcaacugaggacuagugcaucacauuuaaaagcaucucagccuaccaugagaauaagagaaagaaaaugaagaucaauagcuuauucaucucuuuuucuuuuucguugguguaaagccaacacccugucuaaaaaacauaaauuucuuuaaucauuuugccucuuuucucugugcuucaauuaauaaaaaauggaaagaaccuagaucuaaaaaaaaaaaaaaaaaaaaaaaaaaaaaaaaaaaaaaaaaaaaaaaaaaaaaaaaaaaaaaaaugcaucccccccccccccccccccccccccccccccaaaggcucuuuucagagccaccagaauu

SEQ ID NO: 2723 - RNA, 1994 nt, Artificial Sequence
  mRNA product Design i-2 comprising derived and/or modified sequence from HRSV(A2)__F_DSCav1_mut2 (opt4)
gggagaggcgcugccuacggagguggcagccaucuccuucucggcaucaagcuuaccauggagcugcugauccugaaggccaacgccaucaccaccauccugaccgccgugaccuucugcuucgccagcggccagaacaucaccgaggaguucuaccagagcaccugcagcgccgugagcaagggcuaccugggcgcccugagaaccggcugguacaccagcgugaucaccaucgagcugagcaacaucaaggagaacaagugcaacggcaccgacgccaaggugaagcugaucaagcaggagcuggacaaguacaagaacgccgugaccgaccugcagcugcugaugcagagcacccccgccaccggcagcggcagcgccaucugcagcggcguggccgugugcaaggugcugcaccuggagggcgaggugaacaagaucaagagcgcccugcugagcaccaacaaggccguggugagccugagcaacggcgugagcgugcugaccuucaaggugcuggaccugaagaacuacaucgacaagcagcugcugcccauccugaacaagcagagcugcagcauccccaacaucgagaccgugaucgaguuccagcagaagaacaacagacugcuggagaucaccagagaguucagcgugaacgccggcgugaccacccccgugagcaccuacaugcugaccaacagcgagcugcugagccugaucaacgacaugcccaucaccaacgaccagaagaagcugaugagcaacaacgugcagaucgugagacagcagagcuacagcaucaugugcaucaucaaggaggaggugcuggccuacguggugcagcugccccuguacggcgugaucgacacccccugcuggaagcugcacaccagcccccugugcaccaccaacaccaaggagggcagcaacaucugccugaccagaaccgacagaggcugguacugcgacaacgccggcagcgugagcuucuucccccaggccgagaccugcaaggugcagagcaacagaguguucugcgacaccaugaacagccugacccugcccagcgaggugaaccugugcaacguggacaucuucaaccccaaguacgacugcaagaucaugaccagcaagaccgacgugagcagcagcgugaucaccagccugggcgccaucgugagcugcuacggcaagaccaagugcaccgccagcaacaagaacagaggcaucaucaagaccuucagcaacggcugcgacuacgugagcaacaagggcguggacaccgugagcgugggcaacacccuguacugcgugaacaagcaggagggccagagccuguacgugaagggcgagcccaucaucaacuucuacgacccccugguguuccccagcgacgaguucgacgccagcaucagccaggugaacgagaagaucaaccagagccuggccuucaucagaaagagcgacgagcugcugcacaacgugaacgccggcaagagcaccaccaacaucaugaucaccaccaucaucaucgugaucaucgugauccugcugagccugaucgccgugggccugcugcuguacugcaaggccagaagcacccccgugacccugagcaaggaccagcugagcggcaucaacaacaucgccuucagcaacugaggacuagugcaucacauuuaaaagcaucucagccuaccaugagaauaagagaaagaaaaugaagaucaauagcuuauucaucucuuuuucuuuuucguugguguaaagccaacacccugucuaaaaaacauaaauuucuuuaaucauuuugccucuuuucucugugcuucaauuaauaaaaaauggaaagaaccuagaucuaaaaaaaaaaaaaaaaaaaaaaaaaaaaaaaaaaaaaaaaaaaaaaaaaaaaaaaaaaaaaaaaugcaucccccccccccccccccccccccccccccccaaaggcucuuuucagagccaccagaauu

SEQ ID NO: 2724 - RNA, 1994 nt, Artificial Sequence
  mRNA product Design i-2 comprising derived and/or modified sequence from HRSV(A2)__F_DSCav1_mut2 (opt5)
gggagaggcgcugccuacggagguggcagccaucuccuucucggcaucaagcuuaccauggagcugcucauccugaaggccaacgcuauuaccacaauccuuacggccgugaccuucugcuuugcgagcggccagaauauuacagaagaguucuaccaauccaccuguucugcugucagcaaaggguaucugggagcccucagaacaggcugguacaccuccguuaucacaauugaacugucuaacaucaaggagaauaaaugcaacgggaccgacgccaaggugaaacuuaucaagcaggaacuggauaaguauaaaaaugcugugacggaccuccagcugcugaugcagagcacccccgccacaggauccggcucugcuauuuguagcggggucgccgugugcaagguucuccaccuggagggagaggugaacaaaaucaaguccgcgcuucugagcaccaauaaagccgucgugucucucuccaacggcguuagcgugcugacauuuaagguccuugaucugaagaauuacauugacaaacaacuccugccuauccugaacaagcagucuuguuccauuccgaauaucgaaaccgugauugaguuccagcagaaaaacaaucggcuccuggaaaucacgcgcgaguuuagcgugaacgcuggcgucacaacccccguuucuacauauaugcuuaccaauuccgagcugcucagccugaucaacgauaugccuauuaccaacgaccaaaagaaacuuauguccaauaacgugcagaucgugagacagcagucuuacagcauuaugugcaucauuaaggaagagguccuggccuaugugguucaacucccccuguacggggugaucgauacaccuuguuggaaacugcauacgagcccccucugcaccacaaauaccaaggaaggauccaacaucugucugacacggaccgaccgcggcugguacugcgauaaugcugggucugucuccuucuuuccucaggccgagacguguaaggugcagagcaacagaguuuucugcgacacaaugaacucucuuacccugccgagcgaagugaaucucugcaaugucgauauuuuuaaccccaaauaugacuguaagaucaugaccuccaaaacagaugugucuagcuccgucauuaccagccugggagcgaucgugucuugcuacggcaagacaaaauguacggccuccaauaagaaccgggggauuaucaagaccuucagcaauggaugcgacuauguuucuaacaaaggcguggacacagucuccgugggcaauacccuuuacuguguuaacaagcaagaggggcagagccuguaugugaaaggagagccuaucauuaacuuuuacgauccccucgucuucccuuccgacgaauuugaugcuucuaucagccaggugaaugagaagauuaaccagucccuggccuucauccgcaaaucugacgaacugcuccacaaugugaacgcuggcaagagcacaaccaauauuaugaucacgaccauuaucaucguuauuaucgucauucugcuuucccugaucgccguggggcuccugcuguauugcaaggccagaagcacacccgugacccuuucuaaagaucaacucuccggaauuaacaauaucgcuuucagcaacugaggacuagugcaucacauuuaaaagcaucucagccuaccaugagaauaagagaaagaaaaugaagaucaauagcuuauucaucucuuuuucuuuuucguugguguaaagccaacacccugucuaaaaaacauaaauuucuuuaaucauuuugccucuuuucucugugcuucaauuaauaaaaaauggaaagaaccuagaucuaaaaaaaaaaaaaaaaaaaaaaaaaaaaaaaaaaaaaaaaaaaaaaaaaaaaaaaaaaaaaaaaugcaucccccccccccccccccccccccccccccccaaaggcucuuuucagagccaccagaauu

SEQ ID NO: 2725 - RNA, 1994 nt, Artificial Sequence
  mRNA product Design i-2 comprising derived and/or modified sequence from HRSV(A2)__F_DSCav1_mut2 (opt6)
gggagaggcgcugccuacggagguggcagccaucuccuucucggcaucaagcuuaccauggaacuacuaauccuaaaagcaaacgcaauuacaacuauacuuaccgccguaacauuuugcuucgcaucugggcaaaacauuaccgaagaauuuuaucaaucaacaugcucagcagucuccaaaggauaccuuggagcauuaagaaccggcugguauaccuccguaauaacaauugaacuaucuaauauaaaagaaaauaaauguaauggaacugacgcaaaaguuaaacuaauaaaacaagaacucgacaaauacaaaaacgccgucacagaccuacaacuacuaaugcaaucaacccccgcaacaggaucaggauccgcaaucugcagcggcgucgcaguuugcaaaguccuacauuuagaaggagaaguaaacaaaauaaaaucugcucuccucucuacaaacaaagcaguagugucacuuucaaacggaguaucaguucuaacauucaaaguacuagaccuaaaaaauuacauagacaaacaacuacuuccaauucuaaacaaacaauccuguuccauacccaacauagaaacaguaauagaauuucaacaaaaaaauaacagacuccuagaaauuacaagagaauuuuccgucaaugcaggaguaacaaccccaguaucaaccuacauguuaacuaacucagaacucuuaucacuaauaaacgacaugccaaucacuaaugaccaaaaaaaacucaugucaaauaacguacaaauaguccgacaacaaucauacuccaucaugugcauuauaaaagaagaaguacuagcauacgucguccaauuaccacuauacggcgucauagacacaccauguuggaaacuccacacaucaccacuaugcacuacaaauacaaaagaaggcuccaacaucugccuaacaagaacagacagagguugguauugcgacaacgcaggaucaguaucauuuuucccccaagcagaaacauguaaaguacaaucaaauagagucuucugcgacaccaugaacucauuaacacuaccuucagaagucaaccuaugcaacguagacaucuucaacccuaaauaugacugcaaaaucaugaccagcaaaaccgacguuucaucuuccguaauaacaucacuaggcgcaauagucucauguuacggcaaaacaaaauguacagcaucaaauaaaaaccguggaauaauaaaaacauuuucuaaugguugugacuacguaagcaauaaaggaguagauacaguaucagucggcaacaccuuauacuguguaaacaaacaagaaggccaaaguuuauacgucaaaggagaacccaucaucaacuucuacgacccauuaguauucccaucagacgaauuugaugcaagcauuucacaagucaacgaaaaaaucaaucaaucauuagcauucauccgaaaaucagacgaauuauuacacaacguaaacgccggaaaaucaaccacuaauauaaugauaaccacaauaaucaucguaauaauaguaauacuucucucacuaaucgcagucggacuccuucuauacugcaaagcaagaucuacaccaguaacacuauccaaagaucaacuaaguggcauaaacaacauagcauuuucuaacuaaggacuagugcaucacauuuaaaagcaucucagccuaccaugagaauaagagaaagaaaaugaagaucaauagcuuauucaucucuuuuucuuuuucguugguguaaagccaacacccugucuaaaaaacauaaauuucuuuaaucauuuugccucuuuucucugugcuucaauuaauaaaaaauggaaagaaccuagaucuaaaaaaaaaaaaaaaaaaaaaaaaaaaaaaaaaaaaaaaaaaaaaaaaaaaaaaaaaaaaaaaaugcaucccccccccccccccccccccccccccccccaaaggcucuuuucagagccaccagaauu

SEQ ID NO: 2726 - RNA, 1994 nt, Artificial Sequence
  mRNA product Design i-2 comprising derived and/or modified sequence from HRSV(A2)__F_DSCav1_mut2 (opt11)
gggagaggcgcugccuacggagguggcagccaucuccuucucggcaucaagcuuaccauggaacuccucauccuaaaagccaacgcgaucaccacaauccugacagccgucaccuucugcuucgccuccggccaaaacaucaccgaagaguucuaccaauccacaugcuccgccgucuccaagggcuaccugggcgcacuucguacaggcugguacaccuccguaauaaccaucgaacucuccaacaucaaagaaaacaaaugcaacggcacagacgcaaaagucaaacucaucaagcaagaacuugacaaauacaaaaaugcagucaccgaccuucaacuccucaugcaaucuacccccgccacaggcuccggcuccgcuaucugcuccggcgucgccgucugcaaaguccuccaccucgaaggugaaguaaacaaaauaaaauccgcccuccucuccaccaacaaagccgucgucucccuaucaaacggcgucuccgugcucaccuucaagguucucgaccugaaaaacuacauagacaaacagcuccuaccaauccuuaacaaacagagcugcuccauuccgaauaucgaaacgguaaucgaauuucaacagaaaaacaaccgccuccucgaaauaacgcgagaguucuccguaaacgcuggcgucaccacacccgucagcaccuacaugcuaacgaacuccgaacucuugucgcucaucaacgacaugcccauaaccaacgaccaaaagaaacuaauguccaauaacguacaaaucguacgccaacaaucuuacuccaucaugugcaucauaaaagaagaaguacuagcuuacgucguccaacucccacuguacggagucaucgacacccccugcuggaaacuccacaccucuccccucugcaccaccaacaccaaagagggcuccaacauuugccugacacgcaccgaccgcggcugguacugcgacaacgcaggcuccgucucguucuucccccaagccgaaaccugcaaaguccaauccaaccgcgucuucugcgacaccaugaacucccucacccuccccuccgaagucaaucuaugcaacguagacaucuucaacccgaaauaugacugcaaaauuaugacaucuaaaaccgacguguccuccucagucaucacuucccuaggagccaucguuuccuguuacggcaagaccaaaugcaccgccagcaacaaaaaccgaggcaucaucaaaaccuucuccaacggaugugacuaugucuccaacaagggcgucgacaccgucagcgucggcaacacccucuacugcgucaacaaacaagaaggccaaucccucuacgucaaaggagagcccauaaucaacuucuacgacccccucgucuucccauccgacgaguucgacgccucaaucucccaagucaacgagaaaaucaaccaauccuuagccuucauccguaaguccgacgaacuccuucacaacgucaacgccgguaaaucuaccaccaacaucaugauaacaacaauaauuaucgucaucaucgucauccuccuuucccucaucgcggucgggcuauugcucuacugcaaagcccgguccaccccaguaacccucucuaaagaccaacucagcggaaucaauaacauagccuucagcaauuaaggacuagugcaucacauuuaaaagcaucucagccuaccaugagaauaagagaaagaaaaugaagaucaauagcuuauucaucucuuuuucuuuuucguugguguaaagccaacacccugucuaaaaaacauaaauuucuuuaaucauuuugccucuuuucucugugcuucaauuaauaaaaaauggaaagaaccuagaucuaaaaaaaaaaaaaaaaaaaaaaaaaaaaaaaaaaaaaaaaaaaaaaaaaaaaaaaaaaaaaaaaugcaucccccccccccccccccccccccccccccccaaaggcucuuuucagagccaccagaauu

SEQ ID NO: 2727 - RNA, 1990 nt, Artificial Sequence
  mRNA product Design i-2 comprising derived and/or modified sequence from HRSV(A2)__F_DSCav1_mut2 (opt1)
ggggcgcugccuacggagguggcagccaucuccuucucggcaucaagcuuaccauggagcugcucauccugaaggccaacgccaucaccaccauccugacggcggugaccuucugcuucgccagcggccagaacaucaccgaggaguucuaccaguccacgugcagcgccgucuccaagggguaccucggcgcccugcggaccggcugguacaccuccgugaucaccaucgagcugagcaacaucaaggagaacaagugcaacgggaccgacgccaaggugaagcucaucaagcaggagcuggacaaguacaagaacgcggucacggaccugcagcuccugaugcaguccaccccggcaaccggcuccggcuccgccaucugcagcggcgucgccgugugcaaggugcugcaccucgagggggaggucaacaagaucaagagcgcccugcuguccaccaacaaggccguggugagccucuccaacggcgucagcgugcugaccuucaaggugcuggaccucaagaacuacaucgacaagcagcugcugcccauccugaacaagcagagcugcuccauccccaacaucgagacggugaucgaguuccagcagaagaacaaccggcuccuggagaucacccgcgaguucagcgugaacgccggggucaccacccccguguccacguacaugcugaccaacagcgagcuccugucccugaucaacgacaugccgaucaccaacgaccagaagaagcucaugagcaacaacgugcagaucguccggcagcaguccuacagcaucaugugcaucaucaaggaggaggugcuggcguacgugguccagcugccccucuacggcgugaucgacacccccugcuggaagcugcacacgagcccccugugcaccaccaacaccaaggagggguccaacaucugccucacgcgcaccgaccggggcugguacugcgacaacgccggcagcgucuccuucuucccgcaggccgagaccugcaaggugcagagcaaccgcguguucugcgacaccaugaacucccugacgcugcccagcgagguaaaccucugcaacgucgacaucuucaaccccaaguacgacugcaagaucaugaccuccaagaccgacgugagcuccagcgugaucaccucccugggggccaucgucagcugcuacggcaagacgaagugcaccgccagcaacaagaaccgggggaucaucaagaccuucuccaacggcugcgacuacgugagcaacaagggcguggacaccguguccgucgggaacacccuguacugcgugaacaagcaggagggccagagccucuacgugaagggggagcccaucaucaacuucuacgacccgcuggucuuccccuccgacgaguucgacgcgagcaucucccaggugaacgagaagaucaaccagagccuggccuucauccgcaaguccgacgagcugcuccacaacgugaacgccggcaagagcacgaccaacaucaugaucaccaccaucaucaucgucaucaucgugauccugcugucccucaucgccguggggcugcugcucuacugcaaggcccggagcacgcccgucacccuguccaaggaccagcugagcggcaucaacaacaucgcguucuccaacugaggacuagugcaucacauuuaaaagcaucucagccuaccaugagaauaagagaaagaaaaugaagaucaauagcuuauucaucucuuuuucuuuuucguugguguaaagccaacacccugucuaaaaaacauaaauuucuuuaaucauuuugccucuuuucucugugcuucaauuaauaaaaaauggaaagaaccuagaucuaaaaaaaaaaaaaaaaaaaaaaaaaaaaaaaaaaaaaaaaaaaaaaaaaaaaaaaaaaaaaaaaugcaucccccccccccccccccccccccccccccccaaaggcucuuuucagagccaccagaauu

SEQ ID NO: 2728 - RNA, 1990 nt, Artificial Sequence
  mRNA product Design i-2 comprising derived and/or modified sequence from HRSV(A2)__F_DSCav1_mut2 (opt1)
ggggcgcugccuacggagguggcagccaucuccuucucggcaucaagcuuaccauggagcugcucauccugaaggccaacgccaucaccaccauccugacggcggugaccuucugcuucgccagcggccagaacaucaccgaggaguucuaccaguccacgugcagcgccgucuccaagggguaccucggcgcccugcgcaccgggugguacaccagcgugaucaccaucgagcuguccaacaucaaggagaacaagugcaacggcaccgacgccaaggugaagcucaucaagcaggagcuggacaaguacaagaacgcggucacggaccugcagcuccugaugcagagcacccccgccaccggguccggcagcgccaucugcuccggcguggccgugugcaagguccugcaccucgagggggaggugaacaagaucaagagcgcgcugcuguccaccaacaaggccguggucagccucuccaacggcgugagcgugcugacguucaagguccuggaccucaagaacuacaucgacaagcagcugcugccgauccucaacaagcaguccugcagcauccccaacaucgagaccgugaucgaguuccagcagaagaacaaccggcugcuggagaucacccgcgaguucuccgugaacgccggggucaccacgcccgugagcaccuacaugcucaccaacuccgagcugcugagccucaucaacgacaugcccaucaccaacgaccagaagaagcugaugagcaacaacgugcagaucguccggcagcaguccuacagcaucaugugcaucaucaaggaggaggugcuggccuacgugguccagcucccgcuguacggcgugaucgacacgcccugcuggaagcugcacaccagcccccucugcaccaccaacacgaaggagggguccaacaucugccugacccgcaccgaccggggcugguacugcgacaacgccggcuccgugagcuucuucccccaggcggagaccugcaagguccaguccaaccgcguguucugcgacacgaugaacagccugacccucccguccgaggucaaccugugcaacguggacaucuucaaccccaaguacgacugcaagaucaugaccagcaagaccgacguguccagcuccgucaucacgagccugggggccaucguguccugcuacggcaagaccaagugcaccgccagcaacaagaaccgggggaucaucaagaccuucuccaacggcugcgacuacgugagcaacaagggcgucgacacgguguccguggggaacacccucuacugcgucaacaagcaggagggccagagccuguacgugaagggggagcccaucaucaacuucuacgacccccugguguucccgagcgacgaguucgacgccuccaucagccaggucaacgagaagaucaaccagucccucgccuucauccgcaagagcgacgagcugcugcacaacgugaacgcgggcaaguccaccaccaacaucaugaucaccacgaucaucaucgugaucaucgucauccuccugagccugaucgccguggggcuccugcuguacugcaaggcccgguccacccccgugacccugagcaaggaccagcucuccggcaucaacaacaucgccuucagcaacugaggacuagugcaucacauuuaaaagcaucucagccuaccaugagaauaagagaaagaaaaugaagaucaauagcuuauucaucucuuuuucuuuuucguugguguaaagccaacacccugucuaaaaaacauaaauuucuuuaaucauuuugccucuuuucucugugcuucaauuaauaaaaaauggaaagaaccuagaucuaaaaaaaaaaaaaaaaaaaaaaaaaaaaaaaaaaaaaaaaaaaaaaaaaaaaaaaaaaaaaaaaugcaucccccccccccccccccccccccccccccccaaaggcucuuuucagagccaccagaauu

SEQ ID NO: 2729 - RNA, 1990 nt, Artificial Sequence
  mRNA product Design i-2 comprising derived and/or modified sequence from HRSV(A2)__F_DSCav1_mut2 (opt2)
ggggcgcugccuacggagguggcagccaucuccuucucggcaucaagcuuaccauggagcuccucauccucaaggccaacgccaucaccaccauccucaccgccgucaccuucugcuucgccuccggccagaacaucaccgaggaguucuaccaguccaccugcuccgccgucuccaagggcuaccucggcgcccuccgcaccggcugguacaccuccgucaucaccaucgagcucuccaacaucaaggagaacaagugcaacggcaccgacgccaaggucaagcucaucaagcaggagcucgacaaguacaagaacgccgucaccgaccuccagcuccucaugcaguccacccccgccaccggcuccggcuccgccaucugcuccggcgucgccgucugcaagguccuccaccucgagggcgaggucaacaagaucaaguccgcccuccucuccaccaacaaggccgucgucucccucuccaacggcgucuccguccucaccuucaagguccucgaccucaagaacuacaucgacaagcagcuccuccccauccucaacaagcaguccugcuccauccccaacaucgagaccgucaucgaguuccagcagaagaacaaccgccuccucgagaucacccgcgaguucuccgucaacgccggcgucaccacccccgucuccaccuacaugcucaccaacuccgagcuccucucccucaucaacgacaugcccaucaccaacgaccagaagaagcucauguccaacaacguccagaucguccgccagcaguccuacuccaucaugugcaucaucaaggaggagguccucgccuacgucguccagcucccccucuacggcgucaucgacacccccugcuggaagcuccacaccuccccccucugcaccaccaacaccaaggagggcuccaacaucugccucacccgcaccgaccgcggcugguacugcgacaacgccggcuccgucuccuucuucccccaggccgagaccugcaagguccaguccaaccgcgucuucugcgacaccaugaacucccucacccuccccuccgaggucaaccucugcaacgucgacaucuucaaccccaaguacgacugcaagaucaugaccuccaagaccgacgucuccuccuccgucaucaccucccucggcgccaucgucuccugcuacggcaagaccaagugcaccgccuccaacaagaaccgcggcaucaucaagaccuucuccaacggcugcgacuacgucuccaacaagggcgucgacaccgucuccgucggcaacacccucuacugcgucaacaagcaggagggccagucccucuacgucaagggcgagcccaucaucaacuucuacgacccccucgucuuccccuccgacgaguucgacgccuccaucucccaggucaacgagaagaucaaccagucccucgccuucauccgcaaguccgacgagcuccuccacaacgucaacgccggcaaguccaccaccaacaucaugaucaccaccaucaucaucgucaucaucgucauccuccucucccucaucgccgucggccuccuccucuacugcaaggcccgcuccacccccgucacccucuccaaggaccagcucuccggcaucaacaacaucgccuucuccaacugaggacuagugcaucacauuuaaaagcaucucagccuaccaugagaauaagagaaagaaaaugaagaucaauagcuuauucaucucuuuuucuuuuucguugguguaaagccaacacccugucuaaaaaacauaaauuucuuuaaucauuuugccucuuuucucugugcuucaauuaauaaaaaauggaaagaaccuagaucuaaaaaaaaaaaaaaaaaaaaaaaaaaaaaaaaaaaaaaaaaaaaaaaaaaaaaaaaaaaaaaaaugcaucccccccccccccccccccccccccccccccaaaggcucuuuucagagccaccagaauu

SEQ ID NO: 2730 - RNA, 1990 nt, Artificial Sequence
  mRNA product Design i-2 comprising derived and/or modified sequence from HRSV(A2)__F_DSCav1_mut2 (opt3)
ggggcgcugccuacggagguggcagccaucuccuucucggcaucaagcuuaccauggagcugcucauccuuaaggccaacgcuauuaccacaauacugacugcagugacguucugcuuugccagcggccagaauaucaccgaagaguucuaccaauccacauguucugcggucucaaaaggguauuugggagcuuuaagaacugguugguacaccaguguuauuacaaucgaacugagcaacauuaaggagaauaaaugcaacggcaccgacgccaaggugaaacuaaucaagcaggaacucgauaaguauaaaaaugcaguaacugaccugcagcuucugaugcaguccacacccgccaccgggucuggaucggcuauauguucaggcguggcagucugcaagguguugcaccucgagggugagguuaacaaaaucaagagcgcccugcugaguacgaauaaagcuguggucucccucucuaacggggugagcguauuaacuuuuaagguucuggaucuuaagaauuacauugacaaacaauugcugccuauccuaaacaagcaguccuguucaauuccaaauaucgaaaccgugauagaguuccagcagaaaaacaauaggcuccuggaaauuacacgggaguuuagugucaacgccggagugacuaccccggugagcacauauaugcuuaccaauucugagcuguugucccucaucaacgauaugcccauuacgaacgaccaaaagaaacugaugucaaauaacguccagaucguucgccagcagagcuacaguaucaugugcauuauaaaggaagagguguuagcguauguagugcaacugccucucuacggcgucaucgauacuccauguuggaaacuucauacaucuccccugugcaccacuaauacaaaggaaggcuccaacauuuguuugacccgaacggaccgugggugguacugcgauaaugcaggaagcgugucguucuuuccucaggccgagaccuguaagguucagucuaacagaguguucugcgacacaaugaacucccuaacucugccaucagaagucaaucucugcaauguggauaucuuuaaccccaaauaugacuguaagauaaugaccaguaaaacagauguaagcuccucuguuauuacuagccugggugcuaucgugucaugcuacggcaagaccaaauguacagccaguaauaagaacagggggaucauuaagaccuucuccaauggaugcgacuaugucagcaacaaaggcguggacacugucucuguggguaauacgcuuuacuguguuaacaagcaagaggggcagucacuguaugugaaaggagagccuaucauuaacuuuuacgauccauugguauucccgagugacgaauuugaugcaagcauaucccaggucaaugagaagaucaaccagucucucgcuuucauucggaaaucggacgaacuguuacacaaugugaacgccggcaagagcacaaccaauaucaugaucacuaccauuauaaucguuauuaucgugauucugcuaucccucaucgcggucggccugcuuuuguauugcaaggcccgcucaacacccgugacccugaguaaagaucaacucucugggauaaacaauaucgcauucagcaacugaggacuagugcaucacauuuaaaagcaucucagccuaccaugagaauaagagaaagaaaaugaagaucaauagcuuauucaucucuuuuucuuuuucguugguguaaagccaacacccugucuaaaaaacauaaauuucuuuaaucauuuugccucuuuucucugugcuucaauuaauaaaaaauggaaagaaccuagaucuaaaaaaaaaaaaaaaaaaaaaaaaaaaaaaaaaaaaaaaaaaaaaaaaaaaaaaaaaaaaaaaaugcaucccccccccccccccccccccccccccccccaaaggcucuuuucagagccaccagaauu

SEQ ID NO: 2731 - RNA, 1990 nt, Artificial Sequence
  mRNA product Design i-2 comprising derived and/or modified sequence from HRSV(A2)__F_DSCav1_mut2 (opt4)
ggggcgcugccuacggagguggcagccaucuccuucucggcaucaagcuuaccauggagcugcugauccugaaggccaacgccaucaccaccauccugaccgccgugaccuucugcuucgccagcggccagaacaucaccgaggaguucuaccagagcaccugcagcgccgugagcaagggcuaccugggcgcccugagaaccggcugguacaccagcgugaucaccaucgagcugagcaacaucaaggagaacaagugcaacggcaccgacgccaaggugaagcugaucaagcaggagcuggacaaguacaagaacgccgugaccgaccugcagcugcugaugcagagcacccccgccaccggcagcggcagcgccaucugcagcggcguggccgugugcaaggugcugcaccuggagggcgaggugaacaagaucaagagcgcccugcugagcaccaacaaggccguggugagccugagcaacggcgugagcgugcugaccuucaaggugcuggaccugaagaacuacaucgacaagcagcugcugcccauccugaacaagcagagcugcagcauccccaacaucgagaccgugaucgaguuccagcagaagaacaacagacugcuggagaucaccagagaguucagcgugaacgccggcgugaccacccccgugagcaccuacaugcugaccaacagcgagcugcugagccugaucaacgacaugcccaucaccaacgaccagaagaagcugaugagcaacaacgugcagaucgugagacagcagagcuacagcaucaugugcaucaucaaggaggaggugcuggccuacguggugcagcugccccuguacggcgugaucgacacccccugcuggaagcugcacaccagcccccugugcaccaccaacaccaaggagggcagcaacaucugccugaccagaaccgacagaggcugguacugcgacaacgccggcagcgugagcuucuucccccaggccgagaccugcaaggugcagagcaacagaguguucugcgacaccaugaacagccugacccugcccagcgaggugaaccugugcaacguggacaucuucaaccccaaguacgacugcaagaucaugaccagcaagaccgacgugagcagcagcgugaucaccagccugggcgccaucgugagcugcuacggcaagaccaagugcaccgccagcaacaagaacagaggcaucaucaagaccuucagcaacggcugcgacuacgugagcaacaagggcguggacaccgugagcgugggcaacacccuguacugcgugaacaagcaggagggccagagccuguacgugaagggcgagcccaucaucaacuucuacgacccccugguguuccccagcgacgaguucgacgccagcaucagccaggugaacgagaagaucaaccagagccuggccuucaucagaaagagcgacgagcugcugcacaacgugaacgccggcaagagcaccaccaacaucaugaucaccaccaucaucaucgugaucaucgugauccugcugagccugaucgccgugggccugcugcuguacugcaaggccagaagcacccccgugacccugagcaaggaccagcugagcggcaucaacaacaucgccuucagcaacugaggacuagugcaucacauuuaaaagcaucucagccuaccaugagaauaagagaaagaaaaugaagaucaauagcuuauucaucucuuuuucuuuuucguugguguaaagccaacacccugucuaaaaaacauaaauuucuuuaaucauuuugccucuuuucucugugcuucaauuaauaaaaaauggaaagaaccuagaucuaaaaaaaaaaaaaaaaaaaaaaaaaaaaaaaaaaaaaaaaaaaaaaaaaaaaaaaaaaaaaaaaugcaucccccccccccccccccccccccccccccccaaaggcucuuuucagagccaccagaauu

SEQ ID NO: 2732 - RNA, 1990 nt, Artificial Sequence
  mRNA product Design i-2 comprising derived and/or modified sequence from HRSV(A2)__F_DSCav1_mut2 (opt5)
ggggcgcugccuacggagguggcagccaucuccuucucggcaucaagcuuaccauggagcugcucauccugaaggccaacgcuauuaccacaauccuuacggccgugaccuucugcuuugcgagcggccagaauauuacagaagaguucuaccaauccaccuguucugcugucagcaaaggguaucugggagcccucagaacaggcugguacaccuccguuaucacaauugaacugucuaacaucaaggagaauaaaugcaacgggaccgacgccaaggugaaacuuaucaagcaggaacuggauaaguauaaaaaugcugugacggaccuccagcugcugaugcagagcacccccgccacaggauccggcucugcuauuuguagcggggucgccgugugcaagguucuccaccuggagggagaggugaacaaaaucaaguccgcgcuucugagcaccaauaaagccgucgugucucucuccaacggcguuagcgugcugacauuuaagguccuugaucugaagaauuacauugacaaacaacuccugccuauccugaacaagcagucuuguuccauuccgaauaucgaaaccgugauugaguuccagcagaaaaacaaucggcuccuggaaaucacgcgcgaguuuagcgugaacgcuggcgucacaacccccguuucuacauauaugcuuaccaauuccgagcugcucagccugaucaacgauaugccuauuaccaacgaccaaaagaaacuuauguccaauaacgugcagaucgugagacagcagucuuacagcauuaugugcaucauuaaggaagagguccuggccuaugugguucaacucccccuguacggggugaucgauacaccuuguuggaaacugcauacgagcccccucugcaccacaaauaccaaggaaggauccaacaucugucugacacggaccgaccgcggcugguacugcgauaaugcugggucugucuccuucuuuccucaggccgagacguguaaggugcagagcaacagaguuuucugcgacacaaugaacucucuuacccugccgagcgaagugaaucucugcaaugucgauauuuuuaaccccaaauaugacuguaagaucaugaccuccaaaacagaugugucuagcuccgucauuaccagccugggagcgaucgugucuugcuacggcaagacaaaauguacggccuccaauaagaaccgggggauuaucaagaccuucagcaauggaugcgacuauguuucuaacaaaggcguggacacagucuccgugggcaauacccuuuacuguguuaacaagcaagaggggcagagccuguaugugaaaggagagccuaucauuaacuuuuacgauccccucgucuucccuuccgacgaauuugaugcuucuaucagccaggugaaugagaagauuaaccagucccuggccuucauccgcaaaucugacgaacugcuccacaaugugaacgcuggcaagagcacaaccaauauuaugaucacgaccauuaucaucguuauuaucgucauucugcuuucccugaucgccguggggcuccugcuguauugcaaggccagaagcacacccgugacccuuucuaaagaucaacucuccggaauuaacaauaucgcuuucagcaacugaggacuagugcaucacauuuaaaagcaucucagccuaccaugagaauaagagaaagaaaaugaagaucaauagcuuauucaucucuuuuucuuuuucguugguguaaagccaacacccugucuaaaaaacauaaauuucuuuaaucauuuugccucuuuucucugugcuucaauuaauaaaaaauggaaagaaccuagaucuaaaaaaaaaaaaaaaaaaaaaaaaaaaaaaaaaaaaaaaaaaaaaaaaaaaaaaaaaaaaaaaaugcaucccccccccccccccccccccccccccccccaaaggcucuuuucagagccaccagaauu

SEQ ID NO: 2733 - RNA, 1990 nt, Artificial Sequence
  mRNA product Design i-2 comprising derived and/or modified sequence from HRSV(A2)__F_DSCav1_mut2 (opt6)
ggggcgcugccuacggagguggcagccaucuccuucucggcaucaagcuuaccauggaacuacuaauccuaaaagcaaacgcaauuacaacuauacuuaccgccguaacauuuugcuucgcaucugggcaaaacauuaccgaagaauuuuaucaaucaacaugcucagcagucuccaaaggauaccuuggagcauuaagaaccggcugguauaccuccguaauaacaauugaacuaucuaauauaaaagaaaauaaauguaauggaacugacgcaaaaguuaaacuaauaaaacaagaacucgacaaauacaaaaacgccgucacagaccuacaacuacuaaugcaaucaacccccgcaacaggaucaggauccgcaaucugcagcggcgucgcaguuugcaaaguccuacauuuagaaggagaaguaaacaaaauaaaaucugcucuccucucuacaaacaaagcaguagugucacuuucaaacggaguaucaguucuaacauucaaaguacuagaccuaaaaaauuacauagacaaacaacuacuuccaauucuaaacaaacaauccuguuccauacccaacauagaaacaguaauagaauuucaacaaaaaaauaacagacuccuagaaauuacaagagaauuuuccgucaaugcaggaguaacaaccccaguaucaaccuacauguuaacuaacucagaacucuuaucacuaauaaacgacaugccaaucacuaaugaccaaaaaaaacucaugucaaauaacguacaaauaguccgacaacaaucauacuccaucaugugcauuauaaaagaagaaguacuagcauacgucguccaauuaccacuauacggcgucauagacacaccauguuggaaacuccacacaucaccacuaugcacuacaaauacaaaagaaggcuccaacaucugccuaacaagaacagacagagguugguauugcgacaacgcaggaucaguaucauuuuucccccaagcagaaacauguaaaguacaaucaaauagagucuucugcgacaccaugaacucauuaacacuaccuucagaagucaaccuaugcaacguagacaucuucaacccuaaauaugacugcaaaaucaugaccagcaaaaccgacguuucaucuuccguaauaacaucacuaggcgcaauagucucauguuacggcaaaacaaaauguacagcaucaaauaaaaaccguggaauaauaaaaacauuuucuaaugguugugacuacguaagcaauaaaggaguagauacaguaucagucggcaacaccuuauacuguguaaacaaacaagaaggccaaaguuuauacgucaaaggagaacccaucaucaacuucuacgacccauuaguauucccaucagacgaauuugaugcaagcauuucacaagucaacgaaaaaaucaaucaaucauuagcauucauccgaaaaucagacgaauuauuacacaacguaaacgccggaaaaucaaccacuaauauaaugauaaccacaauaaucaucguaauaauaguaauacuucucucacuaaucgcagucggacuccuucuauacugcaaagcaagaucuacaccaguaacacuauccaaagaucaacuaaguggcauaaacaacauagcauuuucuaacuaaggacuagugcaucacauuuaaaagcaucucagccuaccaugagaauaagagaaagaaaaugaagaucaauagcuuauucaucucuuuuucuuuuucguugguguaaagccaacacccugucuaaaaaacauaaauuucuuuaaucauuuugccucuuuucucugugcuucaauuaauaaaaaauggaaagaaccuagaucuaaaaaaaaaaaaaaaaaaaaaaaaaaaaaaaaaaaaaaaaaaaaaaaaaaaaaaaaaaaaaaaaugcaucccccccccccccccccccccccccccccccaaaggcucuuuucagagccaccagaauu

SEQ ID NO: 2734 - RNA, 1990 nt, Artificial Sequence
  mRNA product Design i-2 comprising derived and/or modified sequence from HRSV(A2)__F_DSCav1_mut2 (opt11)
ggggcgcugccuacggagguggcagccaucuccuucucggcaucaagcuuaccauggaacuccucauccuaaaagccaacgcgaucaccacaauccugacagccgucaccuucugcuucgccuccggccaaaacaucaccgaagaguucuaccaauccacaugcuccgccgucuccaagggcuaccugggcgcacuucguacaggcugguacaccuccguaauaaccaucgaacucuccaacaucaaagaaaacaaaugcaacggcacagacgcaaaagucaaacucaucaagcaagaacuugacaaauacaaaaaugcagucaccgaccuucaacuccucaugcaaucuacccccgccacaggcuccggcuccgcuaucugcuccggcgucgccgucugcaaaguccuccaccucgaaggugaaguaaacaaaauaaaauccgcccuccucuccaccaacaaagccgucgucucccuaucaaacggcgucuccgugcucaccuucaagguucucgaccugaaaaacuacauagacaaacagcuccuaccaauccuuaacaaacagagcugcuccauuccgaauaucgaaacgguaaucgaauuucaacagaaaaacaaccgccuccucgaaauaacgcgagaguucuccguaaacgcuggcgucaccacacccgucagcaccuacaugcuaacgaacuccgaacucuugucgcucaucaacgacaugcccauaaccaacgaccaaaagaaacuaauguccaauaacguacaaaucguacgccaacaaucuuacuccaucaugugcaucauaaaagaagaaguacuagcuuacgucguccaacucccacuguacggagucaucgacacccccugcuggaaacuccacaccucuccccucugcaccaccaacaccaaagagggcuccaacauuugccugacacgcaccgaccgcggcugguacugcgacaacgcaggcuccgucucguucuucccccaagccgaaaccugcaaaguccaauccaaccgcgucuucugcgacaccaugaacucccucacccuccccuccgaagucaaucuaugcaacguagacaucuucaacccgaaauaugacugcaaaauuaugacaucuaaaaccgacguguccuccucagucaucacuucccuaggagccaucguuuccuguuacggcaagaccaaaugcaccgccagcaacaaaaaccgaggcaucaucaaaaccuucuccaacggaugugacuaugucuccaacaagggcgucgacaccgucagcgucggcaacacccucuacugcgucaacaaacaagaaggccaaucccucuacgucaaaggagagcccauaaucaacuucuacgacccccucgucuucccauccgacgaguucgacgccucaaucucccaagucaacgagaaaaucaaccaauccuuagccuucauccguaaguccgacgaacuccuucacaacgucaacgccgguaaaucuaccaccaacaucaugauaacaacaauaauuaucgucaucaucgucauccuccuuucccucaucgcggucgggcuauugcucuacugcaaagcccgguccaccccaguaacccucucuaaagaccaacucagcggaaucaauaacauagccuucagcaauuaaggacuagugcaucacauuuaaaagcaucucagccuaccaugagaauaagagaaagaaaaugaagaucaauagcuuauucaucucuuuuucuuuuucguugguguaaagccaacacccugucuaaaaaacauaaauuucuuuaaucauuuugccucuuuucucugugcuucaauuaauaaaaaauggaaagaaccuagaucuaaaaaaaaaaaaaaaaaaaaaaaaaaaaaaaaaaaaaaaaaaaaaaaaaaaaaaaaaaaaaaaaugcaucccccccccccccccccccccccccccccccaaaggcucuuuucagagccaccagaauu

SEQ ID NO: 2735 - RNA, 1825 nt, Artificial Sequence
  mRNA product Design i-3 comprising derived and/or modified sequence from HRSV(A2)__F_DSCav1_mut2 (opt1) R6772
gggagaaagcuuaccauggagcugcucauccugaaggccaacgccaucaccaccauccugacggcggugaccuucugcuucgccagcggccagaacaucaccgaggaguucuaccaguccacgugcagcgccgucuccaagggguaccucggcgcccugcggaccggcugguacaccuccgugaucaccaucgagcugagcaacaucaaggagaacaagugcaacgggaccgacgccaaggugaagcucaucaagcaggagcuggacaaguacaagaacgcggucacggaccugcagcuccugaugcaguccaccccggcaaccggcuccggcuccgccaucugcagcggcgucgccgugugcaaggugcugcaccucgagggggaggucaacaagaucaagagcgcccugcuguccaccaacaaggccguggugagccucuccaacggcgucagcgugcugaccuucaaggugcuggaccucaagaacuacaucgacaagcagcugcugcccauccugaacaagcagagcugcuccauccccaacaucgagacggugaucgaguuccagcagaagaacaaccggcuccuggagaucacccgcgaguucagcgugaacgccggggucaccacccccguguccacguacaugcugaccaacagcgagcuccugucccugaucaacgacaugccgaucaccaacgaccagaagaagcucaugagcaacaacgugcagaucguccggcagcaguccuacagcaucaugugcaucaucaaggaggaggugcuggcguacgugguccagcugccccucuacggcgugaucgacacccccugcuggaagcugcacacgagcccccugugcaccaccaacaccaaggagggguccaacaucugccucacgcgcaccgaccggggcugguacugcgacaacgccggcagcgucuccuucuucccgcaggccgagaccugcaaggugcagagcaaccgcguguucugcgacaccaugaacucccugacgcugcccagcgagguaaaccucugcaacgucgacaucuucaaccccaaguacgacugcaagaucaugaccuccaagaccgacgugagcuccagcgugaucaccucccugggggccaucgucagcugcuacggcaagacgaagugcaccgccagcaacaagaaccgggggaucaucaagaccuucuccaacggcugcgacuacgugagcaacaagggcguggacaccguguccgucgggaacacccuguacugcgugaacaagcaggagggccagagccucuacgugaagggggagcccaucaucaacuucuacgacccgcuggucuuccccuccgacgaguucgacgcgagcaucucccaggugaacgagaagaucaaccagagccuggccuucauccgcaaguccgacgagcugcuccacaacgugaacgccggcaagagcacgaccaacaucaugaucaccaccaucaucaucgucaucaucgugauccugcugucccucaucgccguggggcugcugcucuacugcaaggcccggagcacgcccgucacccuguccaaggaccagcugagcggcaucaacaacaucgcguucuccaacugaggacuaguuauaagacugacuagcccgaugggccucccaacgggcccuccuccccuccuugcaccgagauuaauaaaaaaaaaaaaaaaaaaaaaaaaaaaaaaaaaaaaaaaaaaaaaaaaaaaaaaaaaaaaaaaaugcaucccccccccccccccccccccccccccccccaaaggcucuuuucagagccaccagaauu

SEQ ID NO: 2736 - RNA, 1825 nt, Artificial Sequence
  mRNA product Design i-3 comprising derived and/or modified sequence from HRSV(A2)__F_DSCav1_mut2 (opt1)
gggagaaagcuuaccauggagcugcucauccugaaggccaacgccaucaccaccauccugacggcggugaccuucugcuucgccagcggccagaacaucaccgaggaguucuaccaguccacgugcagcgccgucuccaagggguaccucggcgcccugcgcaccgggugguacaccagcgugaucaccaucgagcuguccaacaucaaggagaacaagugcaacggcaccgacgccaaggugaagcucaucaagcaggagcuggacaaguacaagaacgcggucacggaccugcagcuccugaugcagagcacccccgccaccggguccggcagcgccaucugcuccggcguggccgugugcaagguccugcaccucgagggggaggugaacaagaucaagagcgcgcugcuguccaccaacaaggccguggucagccucuccaacggcgugagcgugcugacguucaagguccuggaccucaagaacuacaucgacaagcagcugcugccgauccucaacaagcaguccugcagcauccccaacaucgagaccgugaucgaguuccagcagaagaacaaccggcugcuggagaucacccgcgaguucuccgugaacgccggggucaccacgcccgugagcaccuacaugcucaccaacuccgagcugcugagccucaucaacgacaugcccaucaccaacgaccagaagaagcugaugagcaacaacgugcagaucguccggcagcaguccuacagcaucaugugcaucaucaaggaggaggugcuggccuacgugguccagcucccgcuguacggcgugaucgacacgcccugcuggaagcugcacaccagcccccucugcaccaccaacacgaaggagggguccaacaucugccugacccgcaccgaccggggcugguacugcgacaacgccggcuccgugagcuucuucccccaggcggagaccugcaagguccaguccaaccgcguguucugcgacacgaugaacagccugacccucccguccgaggucaaccugugcaacguggacaucuucaaccccaaguacgacugcaagaucaugaccagcaagaccgacguguccagcuccgucaucacgagccugggggccaucguguccugcuacggcaagaccaagugcaccgccagcaacaagaaccgggggaucaucaagaccuucuccaacggcugcgacuacgugagcaacaagggcgucgacacgguguccguggggaacacccucuacugcgucaacaagcaggagggccagagccuguacgugaagggggagcccaucaucaacuucuacgacccccugguguucccgagcgacgaguucgacgccuccaucagccaggucaacgagaagaucaaccagucccucgccuucauccgcaagagcgacgagcugcugcacaacgugaacgcgggcaaguccaccaccaacaucaugaucaccacgaucaucaucgugaucaucgucauccuccugagccugaucgccguggggcuccugcuguacugcaaggcccgguccacccccgugacccugagcaaggaccagcucuccggcaucaacaacaucgccuucagcaacugaggacuaguuauaagacugacuagcccgaugggccucccaacgggcccuccuccccuccuugcaccgagauuaauaaaaaaaaaaaaaaaaaaaaaaaaaaaaaaaaaaaaaaaaaaaaaaaaaaaaaaaaaaaaaaaaugcaucccccccccccccccccccccccccccccccaaaggcucuuuucagagccaccagaauu

SEQ ID NO: 2737 - RNA, 1825 nt, Artificial Sequence
  mRNA product Design i-3 comprising derived and/or modified sequence from HRSV(A2)__F_DSCav1_mut2 (opt2)
gggagaaagcuuaccauggagcuccucauccucaaggccaacgccaucaccaccauccucaccgccgucaccuucugcuucgccuccggccagaacaucaccgaggaguucuaccaguccaccugcuccgccgucuccaagggcuaccucggcgcccuccgcaccggcugguacaccuccgucaucaccaucgagcucuccaacaucaaggagaacaagugcaacggcaccgacgccaaggucaagcucaucaagcaggagcucgacaaguacaagaacgccgucaccgaccuccagcuccucaugcaguccacccccgccaccggcuccggcuccgccaucugcuccggcgucgccgucugcaagguccuccaccucgagggcgaggucaacaagaucaaguccgcccuccucuccaccaacaaggccgucgucucccucuccaacggcgucuccguccucaccuucaagguccucgaccucaagaacuacaucgacaagcagcuccuccccauccucaacaagcaguccugcuccauccccaacaucgagaccgucaucgaguuccagcagaagaacaaccgccuccucgagaucacccgcgaguucuccgucaacgccggcgucaccacccccgucuccaccuacaugcucaccaacuccgagcuccucucccucaucaacgacaugcccaucaccaacgaccagaagaagcucauguccaacaacguccagaucguccgccagcaguccuacuccaucaugugcaucaucaaggaggagguccucgccuacgucguccagcucccccucuacggcgucaucgacacccccugcuggaagcuccacaccuccccccucugcaccaccaacaccaaggagggcuccaacaucugccucacccgcaccgaccgcggcugguacugcgacaacgccggcuccgucuccuucuucccccaggccgagaccugcaagguccaguccaaccgcgucuucugcgacaccaugaacucccucacccuccccuccgaggucaaccucugcaacgucgacaucuucaaccccaaguacgacugcaagaucaugaccuccaagaccgacgucuccuccuccgucaucaccucccucggcgccaucgucuccugcuacggcaagaccaagugcaccgccuccaacaagaaccgcggcaucaucaagaccuucuccaacggcugcgacuacgucuccaacaagggcgucgacaccgucuccgucggcaacacccucuacugcgucaacaagcaggagggccagucccucuacgucaagggcgagcccaucaucaacuucuacgacccccucgucuuccccuccgacgaguucgacgccuccaucucccaggucaacgagaagaucaaccagucccucgccuucauccgcaaguccgacgagcuccuccacaacgucaacgccggcaaguccaccaccaacaucaugaucaccaccaucaucaucgucaucaucgucauccuccucucccucaucgccgucggccuccuccucuacugcaaggcccgcuccacccccgucacccucuccaaggaccagcucuccggcaucaacaacaucgccuucuccaacugaggacuaguuauaagacugacuagcccgaugggccucccaacgggcccuccuccccuccuugcaccgagauuaauaaaaaaaaaaaaaaaaaaaaaaaaaaaaaaaaaaaaaaaaaaaaaaaaaaaaaaaaaaaaaaaaugcaucccccccccccccccccccccccccccccccaaaggcucuuuucagagccaccagaauu

SEQ ID NO: 2738 - RNA, 1825 nt, Artificial Sequence
  mRNA product Design i-3 comprising derived and/or modified sequence from HRSV(A2)__F_DSCav1_mut2 (opt3)
gggagaaagcuuaccauggagcugcucauccuuaaggccaacgcuauuaccacaauacugacugcagugacguucugcuuugccagcggccagaauaucaccgaagaguucuaccaauccacauguucugcggucucaaaaggguauuugggagcuuuaagaacugguugguacaccaguguuauuacaaucgaacugagcaacauuaaggagaauaaaugcaacggcaccgacgccaaggugaaacuaaucaagcaggaacucgauaaguauaaaaaugcaguaacugaccugcagcuucugaugcaguccacacccgccaccgggucuggaucggcuauauguucaggcguggcagucugcaagguguugcaccucgagggugagguuaacaaaaucaagagcgcccugcugaguacgaauaaagcuguggucucccucucuaacggggugagcguauuaacuuuuaagguucuggaucuuaagaauuacauugacaaacaauugcugccuauccuaaacaagcaguccuguucaauuccaaauaucgaaaccgugauagaguuccagcagaaaaacaauaggcuccuggaaauuacacgggaguuuagugucaacgccggagugacuaccccggugagcacauauaugcuuaccaauucugagcuguugucccucaucaacgauaugcccauuacgaacgaccaaaagaaacugaugucaaauaacguccagaucguucgccagcagagcuacaguaucaugugcauuauaaaggaagagguguuagcguauguagugcaacugccucucuacggcgucaucgauacuccauguuggaaacuucauacaucuccccugugcaccacuaauacaaaggaaggcuccaacauuuguuugacccgaacggaccgugggugguacugcgauaaugcaggaagcgugucguucuuuccucaggccgagaccuguaagguucagucuaacagaguguucugcgacacaaugaacucccuaacucugccaucagaagucaaucucugcaauguggauaucuuuaaccccaaauaugacuguaagauaaugaccaguaaaacagauguaagcuccucuguuauuacuagccugggugcuaucgugucaugcuacggcaagaccaaauguacagccaguaauaagaacagggggaucauuaagaccuucuccaauggaugcgacuaugucagcaacaaaggcguggacacugucucuguggguaauacgcuuuacuguguuaacaagcaagaggggcagucacuguaugugaaaggagagccuaucauuaacuuuuacgauccauugguauucccgagugacgaauuugaugcaagcauaucccaggucaaugagaagaucaaccagucucucgcuuucauucggaaaucggacgaacuguuacacaaugugaacgccggcaagagcacaaccaauaucaugaucacuaccauuauaaucguuauuaucgugauucugcuaucccucaucgcggucggccugcuuuuguauugcaaggcccgcucaacacccgugacccugaguaaagaucaacucucugggauaaacaauaucgcauucagcaacugaggacuaguuauaagacugacuagcccgaugggccucccaacgggcccuccuccccuccuugcaccgagauuaauaaaaaaaaaaaaaaaaaaaaaaaaaaaaaaaaaaaaaaaaaaaaaaaaaaaaaaaaaaaaaaaaugcaucccccccccccccccccccccccccccccccaaaggcucuuuucagagccaccagaauu

SEQ ID NO: 2739 - RNA, 1825 nt, Artificial Sequence
  mRNA product Design i-3 comprising derived and/or modified sequence from HRSV(A2)__F_DSCav1_mut2 (opt4)
gggagaaagcuuaccauggagcugcugauccugaaggccaacgccaucaccaccauccugaccgccgugaccuucugcuucgccagcggccagaacaucaccgaggaguucuaccagagcaccugcagcgccgugagcaagggcuaccugggcgcccugagaaccggcugguacaccagcgugaucaccaucgagcugagcaacaucaaggagaacaagugcaacggcaccgacgccaaggugaagcugaucaagcaggagcuggacaaguacaagaacgccgugaccgaccugcagcugcugaugcagagcacccccgccaccggcagcggcagcgccaucugcagcggcguggccgugugcaaggugcugcaccuggagggcgaggugaacaagaucaagagcgcccugcugagcaccaacaaggccguggugagccugagcaacggcgugagcgugcugaccuucaaggugcuggaccugaagaacuacaucgacaagcagcugcugcccauccugaacaagcagagcugcagcauccccaacaucgagaccgugaucgaguuccagcagaagaacaacagacugcuggagaucaccagagaguucagcgugaacgccggcgugaccacccccgugagcaccuacaugcugaccaacagcgagcugcugagccugaucaacgacaugcccaucaccaacgaccagaagaagcugaugagcaacaacgugcagaucgugagacagcagagcuacagcaucaugugcaucaucaaggaggaggugcuggccuacguggugcagcugccccuguacggcgugaucgacacccccugcuggaagcugcacaccagcccccugugcaccaccaacaccaaggagggcagcaacaucugccugaccagaaccgacagaggcugguacugcgacaacgccggcagcgugagcuucuucccccaggccgagaccugcaaggugcagagcaacagaguguucugcgacaccaugaacagccugacccugcccagcgaggugaaccugugcaacguggacaucuucaaccccaaguacgacugcaagaucaugaccagcaagaccgacgugagcagcagcgugaucaccagccugggcgccaucgugagcugcuacggcaagaccaagugcaccgccagcaacaagaacagaggcaucaucaagaccuucagcaacggcugcgacuacgugagcaacaagggcguggacaccgugagcgugggcaacacccuguacugcgugaacaagcaggagggccagagccuguacgugaagggcgagcccaucaucaacuucuacgacccccugguguuccccagcgacgaguucgacgccagcaucagccaggugaacgagaagaucaaccagagccuggccuucaucagaaagagcgacgagcugcugcacaacgugaacgccggcaagagcaccaccaacaucaugaucaccaccaucaucaucgugaucaucgugauccugcugagccugaucgccgugggccugcugcuguacugcaaggccagaagcacccccgugacccugagcaaggaccagcugagcggcaucaacaacaucgccuucagcaacugaggacuaguuauaagacugacuagcccgaugggccucccaacgggcccuccuccccuccuugcaccgagauuaauaaaaaaaaaaaaaaaaaaaaaaaaaaaaaaaaaaaaaaaaaaaaaaaaaaaaaaaaaaaaaaaaugcaucccccccccccccccccccccccccccccccaaaggcucuuuucagagccaccagaauu

SEQ ID NO: 2740 - RNA, 1825 nt, Artificial Sequence
  mRNA product Design i-3 comprising derived and/or modified sequence from HRSV(A2)__F_DSCav1_mut2 (opt5)
gggagaaagcuuaccauggagcugcucauccugaaggccaacgcuauuaccacaauccuuacggccgugaccuucugcuuugcgagcggccagaauauuacagaagaguucuaccaauccaccuguucugcugucagcaaaggguaucugggagcccucagaacaggcugguacaccuccguuaucacaauugaacugucuaacaucaaggagaauaaaugcaacgggaccgacgccaaggugaaacuuaucaagcaggaacuggauaaguauaaaaaugcugugacggaccuccagcugcugaugcagagcacccccgccacaggauccggcucugcuauuuguagcggggucgccgugugcaagguucuccaccuggagggagaggugaacaaaaucaaguccgcgcuucugagcaccaauaaagccgucgugucucucuccaacggcguuagcgugcugacauuuaagguccuugaucugaagaauuacauugacaaacaacuccugccuauccugaacaagcagucuuguuccauuccgaauaucgaaaccgugauugaguuccagcagaaaaacaaucggcuccuggaaaucacgcgcgaguuuagcgugaacgcuggcgucacaacccccguuucuacauauaugcuuaccaauuccgagcugcucagccugaucaacgauaugccuauuaccaacgaccaaaagaaacuuauguccaauaacgugcagaucgugagacagcagucuuacagcauuaugugcaucauuaaggaagagguccuggccuaugugguucaacucccccuguacggggugaucgauacaccuuguuggaaacugcauacgagcccccucugcaccacaaauaccaaggaaggauccaacaucugucugacacggaccgaccgcggcugguacugcgauaaugcugggucugucuccuucuuuccucaggccgagacguguaaggugcagagcaacagaguuuucugcgacacaaugaacucucuuacccugccgagcgaagugaaucucugcaaugucgauauuuuuaaccccaaauaugacuguaagaucaugaccuccaaaacagaugugucuagcuccgucauuaccagccugggagcgaucgugucuugcuacggcaagacaaaauguacggccuccaauaagaaccgggggauuaucaagaccuucagcaauggaugcgacuauguuucuaacaaaggcguggacacagucuccgugggcaauacccuuuacuguguuaacaagcaagaggggcagagccuguaugugaaaggagagccuaucauuaacuuuuacgauccccucgucuucccuuccgacgaauuugaugcuucuaucagccaggugaaugagaagauuaaccagucccuggccuucauccgcaaaucugacgaacugcuccacaaugugaacgcuggcaagagcacaaccaauauuaugaucacgaccauuaucaucguuauuaucgucauucugcuuucccugaucgccguggggcuccugcuguauugcaaggccagaagcacacccgugacccuuucuaaagaucaacucuccggaauuaacaauaucgcuuucagcaacugaggacuaguuauaagacugacuagcccgaugggccucccaacgggcccuccuccccuccuugcaccgagauuaauaaaaaaaaaaaaaaaaaaaaaaaaaaaaaaaaaaaaaaaaaaaaaaaaaaaaaaaaaaaaaaaaugcaucccccccccccccccccccccccccccccccaaaggcucuuuucagagccaccagaauu

SEQ ID NO: 2741 - RNA, 1825 nt, Artificial Sequence
  mRNA product Design i-3 comprising derived and/or modified sequence from HRSV(A2)__F_DSCav1_mut2 (opt6)
gggagaaagcuuaccauggaacuacuaauccuaaaagcaaacgcaauuacaacuauacuuaccgccguaacauuuugcuucgcaucugggcaaaacauuaccgaagaauuuuaucaaucaacaugcucagcagucuccaaaggauaccuuggagcauuaagaaccggcugguauaccuccguaauaacaauugaacuaucuaauauaaaagaaaauaaauguaauggaacugacgcaaaaguuaaacuaauaaaacaagaacucgacaaauacaaaaacgccgucacagaccuacaacuacuaaugcaaucaacccccgcaacaggaucaggauccgcaaucugcagcggcgucgcaguuugcaaaguccuacauuuagaaggagaaguaaacaaaauaaaaucugcucuccucucuacaaacaaagcaguagugucacuuucaaacggaguaucaguucuaacauucaaaguacuagaccuaaaaaauuacauagacaaacaacuacuuccaauucuaaacaaacaauccuguuccauacccaacauagaaacaguaauagaauuucaacaaaaaaauaacagacuccuagaaauuacaagagaauuuuccgucaaugcaggaguaacaaccccaguaucaaccuacauguuaacuaacucagaacucuuaucacuaauaaacgacaugccaaucacuaaugaccaaaaaaaacucaugucaaauaacguacaaauaguccgacaacaaucauacuccaucaugugcauuauaaaagaagaaguacuagcauacgucguccaauuaccacuauacggcgucauagacacaccauguuggaaacuccacacaucaccacuaugcacuacaaauacaaaagaaggcuccaacaucugccuaacaagaacagacagagguugguauugcgacaacgcaggaucaguaucauuuuucccccaagcagaaacauguaaaguacaaucaaauagagucuucugcgacaccaugaacucauuaacacuaccuucagaagucaaccuaugcaacguagacaucuucaacccuaaauaugacugcaaaaucaugaccagcaaaaccgacguuucaucuuccguaauaacaucacuaggcgcaauagucucauguuacggcaaaacaaaauguacagcaucaaauaaaaaccguggaauaauaaaaacauuuucuaaugguugugacuacguaagcaauaaaggaguagauacaguaucagucggcaacaccuuauacuguguaaacaaacaagaaggccaaaguuuauacgucaaaggagaacccaucaucaacuucuacgacccauuaguauucccaucagacgaauuugaugcaagcauuucacaagucaacgaaaaaaucaaucaaucauuagcauucauccgaaaaucagacgaauuauuacacaacguaaacgccggaaaaucaaccacuaauauaaugauaaccacaauaaucaucguaauaauaguaauacuucucucacuaaucgcagucggacuccuucuauacugcaaagcaagaucuacaccaguaacacuauccaaagaucaacuaaguggcauaaacaacauagcauuuucuaacuaaggacuaguuauaagacugacuagcccgaugggccucccaacgggcccuccuccccuccuugcaccgagauuaauaaaaaaaaaaaaaaaaaaaaaaaaaaaaaaaaaaaaaaaaaaaaaaaaaaaaaaaaaaaaaaaaugcaucccccccccccccccccccccccccccccccaaaggcucuuuucagagccaccagaauu

SEQ ID NO: 2742 - RNA, 1825 nt, Artificial Sequence
  mRNA product Design i-3 comprising derived and/or modified sequence from HRSV(A2)__F_DSCav1_mut2 (opt11)
gggagaaagcuuaccauggaacuccucauccuaaaagccaacgcgaucaccacaauccugacagccgucaccuucugcuucgccuccggccaaaacaucaccgaagaguucuaccaauccacaugcuccgccgucuccaagggcuaccugggcgcacuucguacaggcugguacaccuccguaauaaccaucgaacucuccaacaucaaagaaaacaaaugcaacggcacagacgcaaaagucaaacucaucaagcaagaacuugacaaauacaaaaaugcagucaccgaccuucaacuccucaugcaaucuacccccgccacaggcuccggcuccgcuaucugcuccggcgucgccgucugcaaaguccuccaccucgaaggugaaguaaacaaaauaaaauccgcccuccucuccaccaacaaagccgucgucucccuaucaaacggcgucuccgugcucaccuucaagguucucgaccugaaaaacuacauagacaaacagcuccuaccaauccuuaacaaacagagcugcuccauuccgaauaucgaaacgguaaucgaauuucaacagaaaaacaaccgccuccucgaaauaacgcgagaguucuccguaaacgcuggcgucaccacacccgucagcaccuacaugcuaacgaacuccgaacucuugucgcucaucaacgacaugcccauaaccaacgaccaaaagaaacuaauguccaauaacguacaaaucguacgccaacaaucuuacuccaucaugugcaucauaaaagaagaaguacuagcuuacgucguccaacucccacuguacggagucaucgacacccccugcuggaaacuccacaccucuccccucugcaccaccaacaccaaagagggcuccaacauuugccugacacgcaccgaccgcggcugguacugcgacaacgcaggcuccgucucguucuucccccaagccgaaaccugcaaaguccaauccaaccgcgucuucugcgacaccaugaacucccucacccuccccuccgaagucaaucuaugcaacguagacaucuucaacccgaaauaugacugcaaaauuaugacaucuaaaaccgacguguccuccucagucaucacuucccuaggagccaucguuuccuguuacggcaagaccaaaugcaccgccagcaacaaaaaccgaggcaucaucaaaaccuucuccaacggaugugacuaugucuccaacaagggcgucgacaccgucagcgucggcaacacccucuacugcgucaacaaacaagaaggccaaucccucuacgucaaaggagagcccauaaucaacuucuacgacccccucgucuucccauccgacgaguucgacgccucaaucucccaagucaacgagaaaaucaaccaauccuuagccuucauccguaaguccgacgaacuccuucacaacgucaacgccgguaaaucuaccaccaacaucaugauaacaacaauaauuaucgucaucaucgucauccuccuuucccucaucgcggucgggcuauugcucuacugcaaagcccgguccaccccaguaacccucucuaaagaccaacucagcggaaucaauaacauagccuucagcaauuaaggacuaguuauaagacugacuagcccgaugggccucccaacgggcccuccuccccuccuugcaccgagauuaauaaaaaaaaaaaaaaaaaaaaaaaaaaaaaaaaaaaaaaaaaaaaaaaaaaaaaaaaaaaaaaaaugcaucccccccccccccccccccccccccccccccaaaggcucuuuucagagccaccagaauu

SEQ ID NO: 2743 - protein, 514 aa, Artificial Sequence
  derived and/or modified protein sequence (artificial) from HRSV(A2)__F-del_DSCav1_mut2
MELLILKANAITTILTAVTFCFASGQNITEEFYQSTCSAVSKGYLGALRTGWYTSVITIELSNIKENKCNGTDAKVKLIKQELDKYKNAVTDLQLLMQSTPATGSGSAICSGVAVCKVLHLEGEVNKIKSALLSTNKAVVSLSNGVSVLTFKVLDLKNYIDKQLLPILNKQSCSIPNIETVIEFQQKNNRLLEITREFSVNAGVTTPVSTYMLTNSELLSLINDMPITNDQKKLMSNNVQIVRQQSYSIMCIIKEEVLAYVVQLPLYGVIDTPCWKLHTSPLCTTNTKEGSNICLTRTDRGWYCDNAGSVSFFPQAETCKVQSNRVFCDTMNSLTLPSEVNLCNVDIFNPKYDCKIMTSKTDVSSSVITSLGAIVSCYGKTKCTASNKNRGIIKTFSNGCDYVSNKGVDTVSVGNTLYCVNKQEGQSLYVKGEPIINFYDPLVFPSDEFDASISQVNEKINQSLAFIRKSDELLHNVNAGKSTTNIMITTIIIVIIVILLSLIAVGLLLYCKAR

SEQ ID NO: 2744 - RNA, 1545 nt, Artificial Sequence
  derived and/or modified CDS sequence (opt1) from HRSV(A2)__F-del_DSCav1_mut2
auggagcugcucauccugaaggccaacgccaucaccaccauccugacggcggugaccuucugcuucgccagcggccagaacaucaccgaggaguucuaccaguccacgugcagcgccgucuccaagggguaccucggcgcccugcggaccggcugguacaccuccgugaucaccaucgagcugagcaacaucaaggagaacaagugcaacgggaccgacgccaaggugaagcucaucaagcaggagcuggacaaguacaagaacgcggucacggaccugcagcuccugaugcaguccaccccggcaaccggcuccggcuccgccaucugcagcggcgucgccgugugcaaggugcugcaccucgagggggaggucaacaagaucaagagcgcccugcuguccaccaacaaggccguggugagccucuccaacggcgucagcgugcugaccuucaaggugcuggaccucaagaacuacaucgacaagcagcugcugcccauccugaacaagcagagcugcuccauccccaacaucgagacggugaucgaguuccagcagaagaacaaccggcuccuggagaucacccgcgaguucagcgugaacgccggggucaccacccccguguccacguacaugcugaccaacagcgagcuccugucccugaucaacgacaugccgaucaccaacgaccagaagaagcucaugagcaacaacgugcagaucguccggcagcaguccuacagcaucaugugcaucaucaaggaggaggugcuggcguacgugguccagcugccccucuacggcgugaucgacacccccugcuggaagcugcacacgagcccccugugcaccaccaacaccaaggagggguccaacaucugccucacgcgcaccgaccggggcugguacugcgacaacgccggcagcgucuccuucuucccgcaggccgagaccugcaaggugcagagcaaccgcguguucugcgacaccaugaacucccugacgcugcccagcgagguaaaccucugcaacgucgacaucuucaaccccaaguacgacugcaagaucaugaccuccaagaccgacgugagcuccagcgugaucaccucccugggggccaucgucagcugcuacggcaagacgaagugcaccgccagcaacaagaaccgggggaucaucaagaccuucuccaacggcugcgacuacgugagcaacaagggcguggacaccguguccgucgggaacacccuguacugcgugaacaagcaggagggccagagccucuacgugaagggggagcccaucaucaacuucuacgacccgcuggucuuccccuccgacgaguucgacgcgagcaucucccaggugaacgagaagaucaaccagagccuggccuucauccgcaaguccgacgagcugcuccacaacgugaacgccggcaagagcacgaccaacaucaugaucaccaccaucaucaucgucaucaucgugauccugcugucccucaucgccguggggcugcugcucuacugcaaggcccgguga

SEQ ID NO: 2745 - RNA, 1545 nt, Artificial Sequence
  derived and/or modified CDS sequence (opt1) from HRSV(A2)__F-del_DSCav1_mut2
auggagcugcucauccugaaggccaacgccaucaccaccauccugacggcggugaccuucugcuucgccagcggccagaacaucaccgaggaguucuaccaguccacgugcagcgccgucuccaagggguaccucggcgcccugcgcaccgggugguacaccagcgugaucaccaucgagcuguccaacaucaaggagaacaagugcaacggcaccgacgccaaggugaagcucaucaagcaggagcuggacaaguacaagaacgcggucacggaccugcagcuccugaugcagagcacccccgccaccggguccggcagcgccaucugcuccggcguggccgugugcaagguccugcaccucgagggggaggugaacaagaucaagagcgcgcugcuguccaccaacaaggccguggucagccucuccaacggcgugagcgugcugacguucaagguccuggaccucaagaacuacaucgacaagcagcugcugccgauccucaacaagcaguccugcagcauccccaacaucgagaccgugaucgaguuccagcagaagaacaaccggcugcuggagaucacccgcgaguucuccgugaacgccggggucaccacgcccgugagcaccuacaugcucaccaacuccgagcugcugagccucaucaacgacaugcccaucaccaacgaccagaagaagcugaugagcaacaacgugcagaucguccggcagcaguccuacagcaucaugugcaucaucaaggaggaggugcuggccuacgugguccagcucccgcuguacggcgugaucgacacgcccugcuggaagcugcacaccagcccccucugcaccaccaacacgaaggagggguccaacaucugccugacccgcaccgaccggggcugguacugcgacaacgccggcuccgugagcuucuucccccaggcggagaccugcaagguccaguccaaccgcguguucugcgacacgaugaacagccugacccucccguccgaggucaaccugugcaacguggacaucuucaaccccaaguacgacugcaagaucaugaccagcaagaccgacguguccagcuccgucaucacgagccugggggccaucguguccugcuacggcaagaccaagugcaccgccagcaacaagaaccgggggaucaucaagaccuucuccaacggcugcgacuacgugagcaacaagggcgucgacacgguguccguggggaacacccucuacugcgucaacaagcaggagggccagagccuguacgugaagggggagcccaucaucaacuucuacgacccccugguguucccgagcgacgaguucgacgccuccaucagccaggucaacgagaagaucaaccagucccucgccuucauccgcaagagcgacgagcugcugcacaacgugaacgcgggcaaguccaccaccaacaucaugaucaccacgaucaucaucgugaucaucgucauccuccugagccugaucgccguggggcuccugcuguacugcaaggcccgguga

SEQ ID NO: 2746 - RNA, 1545 nt, Artificial Sequence
  derived and/or modified CDS sequence (opt2) from HRSV(A2)__F-del_DSCav1_mut2
auggagcuccucauccucaaggccaacgccaucaccaccauccucaccgccgucaccuucugcuucgccuccggccagaacaucaccgaggaguucuaccaguccaccugcuccgccgucuccaagggcuaccucggcgcccuccgcaccggcugguacaccuccgucaucaccaucgagcucuccaacaucaaggagaacaagugcaacggcaccgacgccaaggucaagcucaucaagcaggagcucgacaaguacaagaacgccgucaccgaccuccagcuccucaugcaguccacccccgccaccggcuccggcuccgccaucugcuccggcgucgccgucugcaagguccuccaccucgagggcgaggucaacaagaucaaguccgcccuccucuccaccaacaaggccgucgucucccucuccaacggcgucuccguccucaccuucaagguccucgaccucaagaacuacaucgacaagcagcuccuccccauccucaacaagcaguccugcuccauccccaacaucgagaccgucaucgaguuccagcagaagaacaaccgccuccucgagaucacccgcgaguucuccgucaacgccggcgucaccacccccgucuccaccuacaugcucaccaacuccgagcuccucucccucaucaacgacaugcccaucaccaacgaccagaagaagcucauguccaacaacguccagaucguccgccagcaguccuacuccaucaugugcaucaucaaggaggagguccucgccuacgucguccagcucccccucuacggcgucaucgacacccccugcuggaagcuccacaccuccccccucugcaccaccaacaccaaggagggcuccaacaucugccucacccgcaccgaccgcggcugguacugcgacaacgccggcuccgucuccuucuucccccaggccgagaccugcaagguccaguccaaccgcgucuucugcgacaccaugaacucccucacccuccccuccgaggucaaccucugcaacgucgacaucuucaaccccaaguacgacugcaagaucaugaccuccaagaccgacgucuccuccuccgucaucaccucccucggcgccaucgucuccugcuacggcaagaccaagugcaccgccuccaacaagaaccgcggcaucaucaagaccuucuccaacggcugcgacuacgucuccaacaagggcgucgacaccgucuccgucggcaacacccucuacugcgucaacaagcaggagggccagucccucuacgucaagggcgagcccaucaucaacuucuacgacccccucgucuuccccuccgacgaguucgacgccuccaucucccaggucaacgagaagaucaaccagucccucgccuucauccgcaaguccgacgagcuccuccacaacgucaacgccggcaaguccaccaccaacaucaugaucaccaccaucaucaucgucaucaucgucauccuccucucccucaucgccgucggccuccuccucuacugcaaggcccgcuga

SEQ ID NO: 2747 - RNA, 1545 nt, Artificial Sequence
  derived and/or modified CDS sequence (opt3) from HRSV(A2)__F-del_DSCav1_mut2
auggagcugcucauccuuaaggccaacgcuauuaccacaauacugacugcagugacguucugcuuugccagcggccagaauaucaccgaagaguucuaccaauccacauguucugcggucucaaaaggguauuugggagcuuuaagaacugguugguacaccaguguuauuacaaucgaacugagcaacauuaaggagaauaaaugcaacggcaccgacgccaaggugaaacuaaucaagcaggaacucgauaaguauaaaaaugcaguaacugaccugcagcuucugaugcaguccacacccgccaccgggucuggaucggcuauauguucaggcguggcagucugcaagguguugcaccucgagggugagguuaacaaaaucaagagcgcccugcugaguacgaauaaagcuguggucucccucucuaacggggugagcguauuaacuuuuaagguucuggaucuuaagaauuacauugacaaacaauugcugccuauccuaaacaagcaguccuguucaauuccaaauaucgaaaccgugauagaguuccagcagaaaaacaauaggcuccuggaaauuacacgggaguuuagugucaacgccggagugacuaccccggugagcacauauaugcuuaccaauucugagcuguugucccucaucaacgauaugcccauuacgaacgaccaaaagaaacugaugucaaauaacguccagaucguucgccagcagagcuacaguaucaugugcauuauaaaggaagagguguuagcguauguagugcaacugccucucuacggcgucaucgauacuccauguuggaaacuucauacaucuccccugugcaccacuaauacaaaggaaggcuccaacauuuguuugacccgaacggaccgugggugguacugcgauaaugcaggaagcgugucguucuuuccucaggccgagaccuguaagguucagucuaacagaguguucugcgacacaaugaacucccuaacucugccaucagaagucaaucucugcaauguggauaucuuuaaccccaaauaugacuguaagauaaugaccaguaaaacagauguaagcuccucuguuauuacuagccugggugcuaucgugucaugcuacggcaagaccaaauguacagccaguaauaagaacagggggaucauuaagaccuucuccaauggaugcgacuaugucagcaacaaaggcguggacacugucucuguggguaauacgcuuuacuguguuaacaagcaagaggggcagucacuguaugugaaaggagagccuaucauuaacuuuuacgauccauugguauucccgagugacgaauuugaugcaagcauaucccaggucaaugagaagaucaaccagucucucgcuuucauucggaaaucggacgaacuguuacacaaugugaacgccggcaagagcacaaccaauaucaugaucacuaccauuauaaucguuauuaucgugauucugcuaucccucaucgcggucggccugcuuuuguauugcaaggcccgcuga

SEQ ID NO: 2748 - RNA, 1545 nt, Artificial Sequence
  derived and/or modified CDS sequence (opt4) from HRSV(A2)__F-del_DSCav1_mut2
auggagcugcugauccugaaggccaacgccaucaccaccauccugaccgccgugaccuucugcuucgccagcggccagaacaucaccgaggaguucuaccagagcaccugcagcgccgugagcaagggcuaccugggcgcccugagaaccggcugguacaccagcgugaucaccaucgagcugagcaacaucaaggagaacaagugcaacggcaccgacgccaaggugaagcugaucaagcaggagcuggacaaguacaagaacgccgugaccgaccugcagcugcugaugcagagcacccccgccaccggcagcggcagcgccaucugcagcggcguggccgugugcaaggugcugcaccuggagggcgaggugaacaagaucaagagcgcccugcugagcaccaacaaggccguggugagccugagcaacggcgugagcgugcugaccuucaaggugcuggaccugaagaacuacaucgacaagcagcugcugcccauccugaacaagcagagcugcagcauccccaacaucgagaccgugaucgaguuccagcagaagaacaacagacugcuggagaucaccagagaguucagcgugaacgccggcgugaccacccccgugagcaccuacaugcugaccaacagcgagcugcugagccugaucaacgacaugcccaucaccaacgaccagaagaagcugaugagcaacaacgugcagaucgugagacagcagagcuacagcaucaugugcaucaucaaggaggaggugcuggccuacguggugcagcugccccuguacggcgugaucgacacccccugcuggaagcugcacaccagcccccugugcaccaccaacaccaaggagggcagcaacaucugccugaccagaaccgacagaggcugguacugcgacaacgccggcagcgugagcuucuucccccaggccgagaccugcaaggugcagagcaacagaguguucugcgacaccaugaacagccugacccugcccagcgaggugaaccugugcaacguggacaucuucaaccccaaguacgacugcaagaucaugaccagcaagaccgacgugagcagcagcgugaucaccagccugggcgccaucgugagcugcuacggcaagaccaagugcaccgccagcaacaagaacagaggcaucaucaagaccuucagcaacggcugcgacuacgugagcaacaagggcguggacaccgugagcgugggcaacacccuguacugcgugaacaagcaggagggccagagccuguacgugaagggcgagcccaucaucaacuucuacgacccccugguguuccccagcgacgaguucgacgccagcaucagccaggugaacgagaagaucaaccagagccuggccuucaucagaaagagcgacgagcugcugcacaacgugaacgccggcaagagcaccaccaacaucaugaucaccaccaucaucaucgugaucaucgugauccugcugagccugaucgccgugggccugcugcuguacugcaaggccagauga

SEQ ID NO: 2749 - RNA, 1545 nt, Artificial Sequence
  derived and/or modified CDS sequence (opt5) from HRSV(A2)__F-del_DSCav1_mut2
auggagcugcucauccugaaggccaacgcuauuaccacaauccuuacggccgugaccuucugcuuugcgagcggccagaauauuacagaagaguucuaccaauccaccuguucugcugucagcaaaggguaucugggagcccucagaacaggcugguacaccuccguuaucacaauugaacugucuaacaucaaggagaauaaaugcaacgggaccgacgccaaggugaaacuuaucaagcaggaacuggauaaguauaaaaaugcugugacggaccuccagcugcugaugcagagcacccccgccacaggauccggcucugcuauuuguagcggggucgccgugugcaagguucuccaccuggagggagaggugaacaaaaucaaguccgcgcuucugagcaccaauaaagccgucgugucucucuccaacggcguuagcgugcugacauuuaagguccuugaucugaagaauuacauugacaaacaacuccugccuauccugaacaagcagucuuguuccauuccgaauaucgaaaccgugauugaguuccagcagaaaaacaaucggcuccuggaaaucacgcgcgaguuuagcgugaacgcuggcgucacaacccccguuucuacauauaugcuuaccaauuccgagcugcucagccugaucaacgauaugccuauuaccaacgaccaaaagaaacuuauguccaauaacgugcagaucgugagacagcagucuuacagcauuaugugcaucauuaaggaagagguccuggccuaugugguucaacucccccuguacggggugaucgauacaccuuguuggaaacugcauacgagcccccucugcaccacaaauaccaaggaaggauccaacaucugucugacacggaccgaccgcggcugguacugcgauaaugcugggucugucuccuucuuuccucaggccgagacguguaaggugcagagcaacagaguuuucugcgacacaaugaacucucuuacccugccgagcgaagugaaucucugcaaugucgauauuuuuaaccccaaauaugacuguaagaucaugaccuccaaaacagaugugucuagcuccgucauuaccagccugggagcgaucgugucuugcuacggcaagacaaaauguacggccuccaauaagaaccgggggauuaucaagaccuucagcaauggaugcgacuauguuucuaacaaaggcguggacacagucuccgugggcaauacccuuuacuguguuaacaagcaagaggggcagagccuguaugugaaaggagagccuaucauuaacuuuuacgauccccucgucuucccuuccgacgaauuugaugcuucuaucagccaggugaaugagaagauuaaccagucccuggccuucauccgcaaaucugacgaacugcuccacaaugugaacgcuggcaagagcacaaccaauauuaugaucacgaccauuaucaucguuauuaucgucauucugcuuucccugaucgccguggggcuccugcuguauugcaaggccagauga

SEQ ID NO: 2750 - RNA, 1545 nt, Artificial Sequence
  derived and/or modified CDS sequence (opt6) from HRSV(A2)__F-del_DSCav1_mut2
auggaacuccuaauacuuaaagccaaugcaauaaccacaauacuaacagcaguaacauucugcuuugcaucaggacaaaacauaacagaagaauuuuaccaaucaacauguucagcaguaagcaaaggauaccuaggagccuuacgcacagguugguacacuuccguaauaacaauagaacucucaaauauaaaagaaaacaaaugcaacggaaccgaugcaaaaguaaaacuaauaaaacaagaauuagacaaauacaaaaacgcaguaacagaccuacaauuacuuaugcaaucaacacccgcaacaggauccggcucagcaaucuguucaggaguagcaguaugcaaaguucuccaccuagaaggcgaaguaaacaaaauaaaaucagcccuauuaucuaccaauaaagcaguaguaucacuaucaaauggaguaucuguccuaaccuucaaaguacuugaccuaaaaaauuacaucgacaaacaauuacuaccaauacuuaacaaacaaucauguucaauaccaaacauugaaacaguaauagaauuucaacaaaaaaauaacagauuauuagaaauaacccgcgaauuuucaguuaacgcaggaguaacaacaccaguauccacauacauguuaacaaauucagaacucuuaucacuuauaaacgacaugcccauaacaaacgaccaaaaaaaacucaugucuaacaauguucaaauaguucgacaacaaucauacuccauaaugugcauaauaaaagaagaaguucuagcauauguuguacaacucccacucuaugguguuauagacacaccaugcuggaaacuacauacaagccccuuaugcacuacaaacacaaaagaaggcucuaauauaugucuaacccgcacagacagaggcugguauugcgauaacgcagguucaguaucauucuuuccacaagcagaaacuugcaaaguccaauccaauagagucuucugcgacacuaugaacucacucacacucccaucugaagucaauuuauguaacgucgauaucuucaacccaaaauacgacugcaaaauaaugaccucaaaaacagacguaagcucaucagucauaacuucucuaggcgcaaucgucucauguuacggcaaaacaaaauguaccgcaucaaacaaaaaucgagguauaauaaaaaccuuuucuaacggcugcgacuacguaucaaacaaaggaguagauacuguaagugucggaaacacauuauacugcgucaacaaacaagaaggacaaucccuauauguuaaaggcgaaccuaucauuaauuucuacgacccacucgucuuuccauccgacgaauuugacgcaucaauuucccaaguaaaugaaaaaauaaaccaaucccuugcauucauaagaaaaucagaugaacuauuacacaacguaaacgcaggcaaaucaacaacaaauauaaugaucacaacaauaauaaucguaauaauaguaauccuacucucacuaauagcaguaggcuuacuauuauauugcaaagccagauaa

SEQ ID NO: 2751 - RNA, 1545 nt, Artificial Sequence
  derived and/or modified CDS sequence (opt11) from HRSV(A2)__F-del_DSCav1_mut2
auggaacuucuuauccuaaaagcgaacgccauaaccacaauccuaacagcagucaccuucuguuucgccucaggacaaaacaucaccgaggaauuuuaccaauccacauguagcgcugucucaaaaggcuaccucggcgcccuccgaaccggcugguacacauccguaauaacgaucgaacucuccaacauaaaagaaaauaaaugcaacggcaccgacgccaaagucaaacuuaucaaacaagaacuagacaaauacaaaaacgccgucaccgaccuccagcuccucaugcaauccaccccagcaacaggcuccggaagcgcaaucugcucaggcgucgccguaugcaaaguacuccaccucgaaggagaagucaacaaaaucaaauccgcccuccuauccacaaacaaagcaguugucucacucuccaacgggguaagcguacugaccuucaaaguccuagaccucaaaaacuacaucgauaaacaacuccuuccaauccucaacaaacaaucaugcucuauccccaacaucgaaaccguaaucgaauuucaacaaaaaaacaaccgccuacuugaaaucacacgcgaauuuagcgucaacgcaggaguaacaacacccguguccacauauaugcucacgaacagcgaacuacuaucccugauuaacgacaugcccaucaccaacgaccaaaaaaaacuaaugagcaacaacguacaaaucguccgccaacaaagcuacucuauaaugugcaucaucaaggaagaaguccuagccuacgucguccaauuaccacucuacggcgucaucgacacacccugcuggaaacuccauacauccccccucugcaccaccaacaccaaagaaggguccaacauaugccucacucgcacagaccgcggcugguacugcgacaacgcuggcagcgucagcuucuucccccaggccgaaaccugcaaaguccaauccaacagagucuucugcgacaccaugaacucgcucacccuccccuccgaggucaaccucugcaacgucgacauauucaaccccaaauacgacugcaaaaucaugaccuccaaaaccgacgucagcucaucagucaucacaucccucggggccaucgucuccugcuacggcaaaaccaagugcaccgccucaaacaaaaaccgcggcauuaucaaaacauucuccaacggcugcgacuacgucuccaacaaaggcgucgacacagucuccgucgguaacacccucuacugcguaaauaaacaagaaggccaaucccucuacgucaaaggcgaacccaucaucaacuucuacgacccucucgucuuccccuccgacgaauuugacgccucaaucagccaaguuaacgaaaaaaucaaccaaucacucgccuucauccgcaaauccgacgaacuccuccacaacguuaacgccggcaaaucuaccacgaacaucaugaucaccaccauaaucaucguaauuaucguaauacuccuaucccucauagcaguaggccuccuacucuacugcaaagcccguuaa

SEQ ID NO: 2752 - RNA, 1821 nt, Artificial Sequence
  mRNA product Design a-1 comprising derived and/or modified sequence from HRSV(A2)__F-del_DSCav1_mut2 (opt1)
gggagagucccgcagucggcguccagcggcucugcuuguucgugugugugucguugcaggccuuauucaagcuuaccauggagcugcucauccugaaggccaacgccaucaccaccauccugacggcggugaccuucugcuucgccagcggccagaacaucaccgaggaguucuaccaguccacgugcagcgccgucuccaagggguaccucggcgcccugcggaccggcugguacaccuccgugaucaccaucgagcugagcaacaucaaggagaacaagugcaacgggaccgacgccaaggugaagcucaucaagcaggagcuggacaaguacaagaacgcggucacggaccugcagcuccugaugcaguccaccccggcaaccggcuccggcuccgccaucugcagcggcgucgccgugugcaaggugcugcaccucgagggggaggucaacaagaucaagagcgcccugcuguccaccaacaaggccguggugagccucuccaacggcgucagcgugcugaccuucaaggugcuggaccucaagaacuacaucgacaagcagcugcugcccauccugaacaagcagagcugcuccauccccaacaucgagacggugaucgaguuccagcagaagaacaaccggcuccuggagaucacccgcgaguucagcgugaacgccggggucaccacccccguguccacguacaugcugaccaacagcgagcuccugucccugaucaacgacaugccgaucaccaacgaccagaagaagcucaugagcaacaacgugcagaucguccggcagcaguccuacagcaucaugugcaucaucaaggaggaggugcuggcguacgugguccagcugccccucuacggcgugaucgacacccccugcuggaagcugcacacgagcccccugugcaccaccaacaccaaggagggguccaacaucugccucacgcgcaccgaccggggcugguacugcgacaacgccggcagcgucuccuucuucccgcaggccgagaccugcaaggugcagagcaaccgcguguucugcgacaccaugaacucccugacgcugcccagcgagguaaaccucugcaacgucgacaucuucaaccccaaguacgacugcaagaucaugaccuccaagaccgacgugagcuccagcgugaucaccucccugggggccaucgucagcugcuacggcaagacgaagugcaccgccagcaacaagaaccgggggaucaucaagaccuucuccaacggcugcgacuacgugagcaacaagggcguggacaccguguccgucgggaacacccuguacugcgugaacaagcaggagggccagagccucuacgugaagggggagcccaucaucaacuucuacgacccgcuggucuuccccuccgacgaguucgacgcgagcaucucccaggugaacgagaagaucaaccagagccuggccuucauccgcaaguccgacgagcugcuccacaacgugaacgccggcaagagcacgaccaacaucaugaucaccaccaucaucaucgucaucaucgugauccugcugucccucaucgccguggggcugcugcucuacugcaaggcccggugaggacuagucccuguucccagagcccacuuuuuuuucuuuuuuugaaauaaaauagccugucuuucagaucuaaaaaaaaaaaaaaaaaaaaaaaaaaaaaaaaaaaaaaaaaaaaaaaaaaaaaaaaaaaaaaaaugcaucccccccccccccccccccccccccccccccaaaggcucuuuucagagccaccagaauu

SEQ ID NO: 2753 - RNA, 1821 nt, Artificial Sequence
  mRNA product Design a-1 comprising derived and/or modified sequence from HRSV(A2)__F-del_DSCav1_mut2 (opt1)
gggagagucccgcagucggcguccagcggcucugcuuguucgugugugugucguugcaggccuuauucaagcuuaccauggagcugcucauccugaaggccaacgccaucaccaccauccugacggcggugaccuucugcuucgccagcggccagaacaucaccgaggaguucuaccaguccacgugcagcgccgucuccaagggguaccucggcgcccugcgcaccgggugguacaccagcgugaucaccaucgagcuguccaacaucaaggagaacaagugcaacggcaccgacgccaaggugaagcucaucaagcaggagcuggacaaguacaagaacgcggucacggaccugcagcuccugaugcagagcacccccgccaccggguccggcagcgccaucugcuccggcguggccgugugcaagguccugcaccucgagggggaggugaacaagaucaagagcgcgcugcuguccaccaacaaggccguggucagccucuccaacggcgugagcgugcugacguucaagguccuggaccucaagaacuacaucgacaagcagcugcugccgauccucaacaagcaguccugcagcauccccaacaucgagaccgugaucgaguuccagcagaagaacaaccggcugcuggagaucacccgcgaguucuccgugaacgccggggucaccacgcccgugagcaccuacaugcucaccaacuccgagcugcugagccucaucaacgacaugcccaucaccaacgaccagaagaagcugaugagcaacaacgugcagaucguccggcagcaguccuacagcaucaugugcaucaucaaggaggaggugcuggccuacgugguccagcucccgcuguacggcgugaucgacacgcccugcuggaagcugcacaccagcccccucugcaccaccaacacgaaggagggguccaacaucugccugacccgcaccgaccggggcugguacugcgacaacgccggcuccgugagcuucuucccccaggcggagaccugcaagguccaguccaaccgcguguucugcgacacgaugaacagccugacccucccguccgaggucaaccugugcaacguggacaucuucaaccccaaguacgacugcaagaucaugaccagcaagaccgacguguccagcuccgucaucacgagccugggggccaucguguccugcuacggcaagaccaagugcaccgccagcaacaagaaccgggggaucaucaagaccuucuccaacggcugcgacuacgugagcaacaagggcgucgacacgguguccguggggaacacccucuacugcgucaacaagcaggagggccagagccuguacgugaagggggagcccaucaucaacuucuacgacccccugguguucccgagcgacgaguucgacgccuccaucagccaggucaacgagaagaucaaccagucccucgccuucauccgcaagagcgacgagcugcugcacaacgugaacgcgggcaaguccaccaccaacaucaugaucaccacgaucaucaucgugaucaucgucauccuccugagccugaucgccguggggcuccugcuguacugcaaggcccggugaggacuagucccuguucccagagcccacuuuuuuuucuuuuuuugaaauaaaauagccugucuuucagaucuaaaaaaaaaaaaaaaaaaaaaaaaaaaaaaaaaaaaaaaaaaaaaaaaaaaaaaaaaaaaaaaaugcaucccccccccccccccccccccccccccccccaaaggcucuuuucagagccaccagaauu

SEQ ID NO: 2754 - RNA, 1821 nt, Artificial Sequence
  mRNA product Design a-1 comprising derived and/or modified sequence from HRSV(A2)__F-del_DSCav1_mut2 (opt2)
gggagagucccgcagucggcguccagcggcucugcuuguucgugugugugucguugcaggccuuauucaagcuuaccauggagcuccucauccucaaggccaacgccaucaccaccauccucaccgccgucaccuucugcuucgccuccggccagaacaucaccgaggaguucuaccaguccaccugcuccgccgucuccaagggcuaccucggcgcccuccgcaccggcugguacaccuccgucaucaccaucgagcucuccaacaucaaggagaacaagugcaacggcaccgacgccaaggucaagcucaucaagcaggagcucgacaaguacaagaacgccgucaccgaccuccagcuccucaugcaguccacccccgccaccggcuccggcuccgccaucugcuccggcgucgccgucugcaagguccuccaccucgagggcgaggucaacaagaucaaguccgcccuccucuccaccaacaaggccgucgucucccucuccaacggcgucuccguccucaccuucaagguccucgaccucaagaacuacaucgacaagcagcuccuccccauccucaacaagcaguccugcuccauccccaacaucgagaccgucaucgaguuccagcagaagaacaaccgccuccucgagaucacccgcgaguucuccgucaacgccggcgucaccacccccgucuccaccuacaugcucaccaacuccgagcuccucucccucaucaacgacaugcccaucaccaacgaccagaagaagcucauguccaacaacguccagaucguccgccagcaguccuacuccaucaugugcaucaucaaggaggagguccucgccuacgucguccagcucccccucuacggcgucaucgacacccccugcuggaagcuccacaccuccccccucugcaccaccaacaccaaggagggcuccaacaucugccucacccgcaccgaccgcggcugguacugcgacaacgccggcuccgucuccuucuucccccaggccgagaccugcaagguccaguccaaccgcgucuucugcgacaccaugaacucccucacccuccccuccgaggucaaccucugcaacgucgacaucuucaaccccaaguacgacugcaagaucaugaccuccaagaccgacgucuccuccuccgucaucaccucccucggcgccaucgucuccugcuacggcaagaccaagugcaccgccuccaacaagaaccgcggcaucaucaagaccuucuccaacggcugcgacuacgucuccaacaagggcgucgacaccgucuccgucggcaacacccucuacugcgucaacaagcaggagggccagucccucuacgucaagggcgagcccaucaucaacuucuacgacccccucgucuuccccuccgacgaguucgacgccuccaucucccaggucaacgagaagaucaaccagucccucgccuucauccgcaaguccgacgagcuccuccacaacgucaacgccggcaaguccaccaccaacaucaugaucaccaccaucaucaucgucaucaucgucauccuccucucccucaucgccgucggccuccuccucuacugcaaggcccgcugaggacuagucccuguucccagagcccacuuuuuuuucuuuuuuugaaauaaaauagccugucuuucagaucuaaaaaaaaaaaaaaaaaaaaaaaaaaaaaaaaaaaaaaaaaaaaaaaaaaaaaaaaaaaaaaaaugcaucccccccccccccccccccccccccccccccaaaggcucuuuucagagccaccagaauu

SEQ ID NO: 2755 - RNA, 1821 nt, Artificial Sequence
  mRNA product Design a-1 comprising derived and/or modified sequence from HRSV(A2)__F-del_DSCav1_mut2 (opt3)
gggagagucccgcagucggcguccagcggcucugcuuguucgugugugugucguugcaggccuuauucaagcuuaccauggagcugcucauccuuaaggccaacgcuauuaccacaauacugacugcagugacguucugcuuugccagcggccagaauaucaccgaagaguucuaccaauccacauguucugcggucucaaaaggguauuugggagcuuuaagaacugguugguacaccaguguuauuacaaucgaacugagcaacauuaaggagaauaaaugcaacggcaccgacgccaaggugaaacuaaucaagcaggaacucgauaaguauaaaaaugcaguaacugaccugcagcuucugaugcaguccacacccgccaccgggucuggaucggcuauauguucaggcguggcagucugcaagguguugcaccucgagggugagguuaacaaaaucaagagcgcccugcugaguacgaauaaagcuguggucucccucucuaacggggugagcguauuaacuuuuaagguucuggaucuuaagaauuacauugacaaacaauugcugccuauccuaaacaagcaguccuguucaauuccaaauaucgaaaccgugauagaguuccagcagaaaaacaauaggcuccuggaaauuacacgggaguuuagugucaacgccggagugacuaccccggugagcacauauaugcuuaccaauucugagcuguugucccucaucaacgauaugcccauuacgaacgaccaaaagaaacugaugucaaauaacguccagaucguucgccagcagagcuacaguaucaugugcauuauaaaggaagagguguuagcguauguagugcaacugccucucuacggcgucaucgauacuccauguuggaaacuucauacaucuccccugugcaccacuaauacaaaggaaggcuccaacauuuguuugacccgaacggaccgugggugguacugcgauaaugcaggaagcgugucguucuuuccucaggccgagaccuguaagguucagucuaacagaguguucugcgacacaaugaacucccuaacucugccaucagaagucaaucucugcaauguggauaucuuuaaccccaaauaugacuguaagauaaugaccaguaaaacagauguaagcuccucuguuauuacuagccugggugcuaucgugucaugcuacggcaagaccaaauguacagccaguaauaagaacagggggaucauuaagaccuucuccaauggaugcgacuaugucagcaacaaaggcguggacacugucucuguggguaauacgcuuuacuguguuaacaagcaagaggggcagucacuguaugugaaaggagagccuaucauuaacuuuuacgauccauugguauucccgagugacgaauuugaugcaagcauaucccaggucaaugagaagaucaaccagucucucgcuuucauucggaaaucggacgaacuguuacacaaugugaacgccggcaagagcacaaccaauaucaugaucacuaccauuauaaucguuauuaucgugauucugcuaucccucaucgcggucggccugcuuuuguauugcaaggcccgcugaggacuagucccuguucccagagcccacuuuuuuuucuuuuuuugaaauaaaauagccugucuuucagaucuaaaaaaaaaaaaaaaaaaaaaaaaaaaaaaaaaaaaaaaaaaaaaaaaaaaaaaaaaaaaaaaaugcaucccccccccccccccccccccccccccccccaaaggcucuuuucagagccaccagaauu

SEQ ID NO: 2756 - RNA, 1821 nt, Artificial Sequence
  mRNA product Design a-1 comprising derived and/or modified sequence from HRSV(A2)__F-del_DSCav1_mut2 (opt4)
gggagagucccgcagucggcguccagcggcucugcuuguucgugugugugucguugcaggccuuauucaagcuuaccauggagcugcugauccugaaggccaacgccaucaccaccauccugaccgccgugaccuucugcuucgccagcggccagaacaucaccgaggaguucuaccagagcaccugcagcgccgugagcaagggcuaccugggcgcccugagaaccggcugguacaccagcgugaucaccaucgagcugagcaacaucaaggagaacaagugcaacggcaccgacgccaaggugaagcugaucaagcaggagcuggacaaguacaagaacgccgugaccgaccugcagcugcugaugcagagcacccccgccaccggcagcggcagcgccaucugcagcggcguggccgugugcaaggugcugcaccuggagggcgaggugaacaagaucaagagcgcccugcugagcaccaacaaggccguggugagccugagcaacggcgugagcgugcugaccuucaaggugcuggaccugaagaacuacaucgacaagcagcugcugcccauccugaacaagcagagcugcagcauccccaacaucgagaccgugaucgaguuccagcagaagaacaacagacugcuggagaucaccagagaguucagcgugaacgccggcgugaccacccccgugagcaccuacaugcugaccaacagcgagcugcugagccugaucaacgacaugcccaucaccaacgaccagaagaagcugaugagcaacaacgugcagaucgugagacagcagagcuacagcaucaugugcaucaucaaggaggaggugcuggccuacguggugcagcugccccuguacggcgugaucgacacccccugcuggaagcugcacaccagcccccugugcaccaccaacaccaaggagggcagcaacaucugccugaccagaaccgacagaggcugguacugcgacaacgccggcagcgugagcuucuucccccaggccgagaccugcaaggugcagagcaacagaguguucugcgacaccaugaacagccugacccugcccagcgaggugaaccugugcaacguggacaucuucaaccccaaguacgacugcaagaucaugaccagcaagaccgacgugagcagcagcgugaucaccagccugggcgccaucgugagcugcuacggcaagaccaagugcaccgccagcaacaagaacagaggcaucaucaagaccuucagcaacggcugcgacuacgugagcaacaagggcguggacaccgugagcgugggcaacacccuguacugcgugaacaagcaggagggccagagccuguacgugaagggcgagcccaucaucaacuucuacgacccccugguguuccccagcgacgaguucgacgccagcaucagccaggugaacgagaagaucaaccagagccuggccuucaucagaaagagcgacgagcugcugcacaacgugaacgccggcaagagcaccaccaacaucaugaucaccaccaucaucaucgugaucaucgugauccugcugagccugaucgccgugggccugcugcuguacugcaaggccagaugaggacuagucccuguucccagagcccacuuuuuuuucuuuuuuugaaauaaaauagccugucuuucagaucuaaaaaaaaaaaaaaaaaaaaaaaaaaaaaaaaaaaaaaaaaaaaaaaaaaaaaaaaaaaaaaaaugcaucccccccccccccccccccccccccccccccaaaggcucuuuucagagccaccagaauu

SEQ ID NO: 2757 - RNA, 1821 nt, Artificial Sequence
  mRNA product Design a-1 comprising derived and/or modified sequence from HRSV(A2)__F-del_DSCav1_mut2 (opt5)
gggagagucccgcagucggcguccagcggcucugcuuguucgugugugugucguugcaggccuuauucaagcuuaccauggagcugcucauccugaaggccaacgcuauuaccacaauccuuacggccgugaccuucugcuuugcgagcggccagaauauuacagaagaguucuaccaauccaccuguucugcugucagcaaaggguaucugggagcccucagaacaggcugguacaccuccguuaucacaauugaacugucuaacaucaaggagaauaaaugcaacgggaccgacgccaaggugaaacuuaucaagcaggaacuggauaaguauaaaaaugcugugacggaccuccagcugcugaugcagagcacccccgccacaggauccggcucugcuauuuguagcggggucgccgugugcaagguucuccaccuggagggagaggugaacaaaaucaaguccgcgcuucugagcaccaauaaagccgucgugucucucuccaacggcguuagcgugcugacauuuaagguccuugaucugaagaauuacauugacaaacaacuccugccuauccugaacaagcagucuuguuccauuccgaauaucgaaaccgugauugaguuccagcagaaaaacaaucggcuccuggaaaucacgcgcgaguuuagcgugaacgcuggcgucacaacccccguuucuacauauaugcuuaccaauuccgagcugcucagccugaucaacgauaugccuauuaccaacgaccaaaagaaacuuauguccaauaacgugcagaucgugagacagcagucuuacagcauuaugugcaucauuaaggaagagguccuggccuaugugguucaacucccccuguacggggugaucgauacaccuuguuggaaacugcauacgagcccccucugcaccacaaauaccaaggaaggauccaacaucugucugacacggaccgaccgcggcugguacugcgauaaugcugggucugucuccuucuuuccucaggccgagacguguaaggugcagagcaacagaguuuucugcgacacaaugaacucucuuacccugccgagcgaagugaaucucugcaaugucgauauuuuuaaccccaaauaugacuguaagaucaugaccuccaaaacagaugugucuagcuccgucauuaccagccugggagcgaucgugucuugcuacggcaagacaaaauguacggccuccaauaagaaccgggggauuaucaagaccuucagcaauggaugcgacuauguuucuaacaaaggcguggacacagucuccgugggcaauacccuuuacuguguuaacaagcaagaggggcagagccuguaugugaaaggagagccuaucauuaacuuuuacgauccccucgucuucccuuccgacgaauuugaugcuucuaucagccaggugaaugagaagauuaaccagucccuggccuucauccgcaaaucugacgaacugcuccacaaugugaacgcuggcaagagcacaaccaauauuaugaucacgaccauuaucaucguuauuaucgucauucugcuuucccugaucgccguggggcuccugcuguauugcaaggccagaugaggacuagucccuguucccagagcccacuuuuuuuucuuuuuuugaaauaaaauagccugucuuucagaucuaaaaaaaaaaaaaaaaaaaaaaaaaaaaaaaaaaaaaaaaaaaaaaaaaaaaaaaaaaaaaaaaugcaucccccccccccccccccccccccccccccccaaaggcucuuuucagagccaccagaauu

SEQ ID NO: 2758 - RNA, 1821 nt, Artificial Sequence
  mRNA product Design a-1 comprising derived and/or modified sequence from HRSV(A2)__F-del_DSCav1_mut2 (opt6)
gggagagucccgcagucggcguccagcggcucugcuuguucgugugugugucguugcaggccuuauucaagcuuaccauggaacuccuaauacuuaaagccaaugcaauaaccacaauacuaacagcaguaacauucugcuuugcaucaggacaaaacauaacagaagaauuuuaccaaucaacauguucagcaguaagcaaaggauaccuaggagccuuacgcacagguugguacacuuccguaauaacaauagaacucucaaauauaaaagaaaacaaaugcaacggaaccgaugcaaaaguaaaacuaauaaaacaagaauuagacaaauacaaaaacgcaguaacagaccuacaauuacuuaugcaaucaacacccgcaacaggauccggcucagcaaucuguucaggaguagcaguaugcaaaguucuccaccuagaaggcgaaguaaacaaaauaaaaucagcccuauuaucuaccaauaaagcaguaguaucacuaucaaauggaguaucuguccuaaccuucaaaguacuugaccuaaaaaauuacaucgacaaacaauuacuaccaauacuuaacaaacaaucauguucaauaccaaacauugaaacaguaauagaauuucaacaaaaaaauaacagauuauuagaaauaacccgcgaauuuucaguuaacgcaggaguaacaacaccaguauccacauacauguuaacaaauucagaacucuuaucacuuauaaacgacaugcccauaacaaacgaccaaaaaaaacucaugucuaacaauguucaaauaguucgacaacaaucauacuccauaaugugcauaauaaaagaagaaguucuagcauauguuguacaacucccacucuaugguguuauagacacaccaugcuggaaacuacauacaagccccuuaugcacuacaaacacaaaagaaggcucuaauauaugucuaacccgcacagacagaggcugguauugcgauaacgcagguucaguaucauucuuuccacaagcagaaacuugcaaaguccaauccaauagagucuucugcgacacuaugaacucacucacacucccaucugaagucaauuuauguaacgucgauaucuucaacccaaaauacgacugcaaaauaaugaccucaaaaacagacguaagcucaucagucauaacuucucuaggcgcaaucgucucauguuacggcaaaacaaaauguaccgcaucaaacaaaaaucgagguauaauaaaaaccuuuucuaacggcugcgacuacguaucaaacaaaggaguagauacuguaagugucggaaacacauuauacugcgucaacaaacaagaaggacaaucccuauauguuaaaggcgaaccuaucauuaauuucuacgacccacucgucuuuccauccgacgaauuugacgcaucaauuucccaaguaaaugaaaaaauaaaccaaucccuugcauucauaagaaaaucagaugaacuauuacacaacguaaacgcaggcaaaucaacaacaaauauaaugaucacaacaauaauaaucguaauaauaguaauccuacucucacuaauagcaguaggcuuacuauuauauugcaaagccagauaaggacuagucccuguucccagagcccacuuuuuuuucuuuuuuugaaauaaaauagccugucuuucagaucuaaaaaaaaaaaaaaaaaaaaaaaaaaaaaaaaaaaaaaaaaaaaaaaaaaaaaaaaaaaaaaaaugcaucccccccccccccccccccccccccccccccaaaggcucuuuucagagccaccagaauu

SEQ ID NO: 2759 - RNA, 1821 nt, Artificial Sequence
  mRNA product Design a-1 comprising derived and/or modified sequence from HRSV(A2)__F-del_DSCav1_mut2 (opt11)
gggagagucccgcagucggcguccagcggcucugcuuguucgugugugugucguugcaggccuuauucaagcuuaccauggaacuucuuauccuaaaagcgaacgccauaaccacaauccuaacagcagucaccuucuguuucgccucaggacaaaacaucaccgaggaauuuuaccaauccacauguagcgcugucucaaaaggcuaccucggcgcccuccgaaccggcugguacacauccguaauaacgaucgaacucuccaacauaaaagaaaauaaaugcaacggcaccgacgccaaagucaaacuuaucaaacaagaacuagacaaauacaaaaacgccgucaccgaccuccagcuccucaugcaauccaccccagcaacaggcuccggaagcgcaaucugcucaggcgucgccguaugcaaaguacuccaccucgaaggagaagucaacaaaaucaaauccgcccuccuauccacaaacaaagcaguugucucacucuccaacgggguaagcguacugaccuucaaaguccuagaccucaaaaacuacaucgauaaacaacuccuuccaauccucaacaaacaaucaugcucuauccccaacaucgaaaccguaaucgaauuucaacaaaaaaacaaccgccuacuugaaaucacacgcgaauuuagcgucaacgcaggaguaacaacacccguguccacauauaugcucacgaacagcgaacuacuaucccugauuaacgacaugcccaucaccaacgaccaaaaaaaacuaaugagcaacaacguacaaaucguccgccaacaaagcuacucuauaaugugcaucaucaaggaagaaguccuagccuacgucguccaauuaccacucuacggcgucaucgacacacccugcuggaaacuccauacauccccccucugcaccaccaacaccaaagaaggguccaacauaugccucacucgcacagaccgcggcugguacugcgacaacgcuggcagcgucagcuucuucccccaggccgaaaccugcaaaguccaauccaacagagucuucugcgacaccaugaacucgcucacccuccccuccgaggucaaccucugcaacgucgacauauucaaccccaaauacgacugcaaaaucaugaccuccaaaaccgacgucagcucaucagucaucacaucccucggggccaucgucuccugcuacggcaaaaccaagugcaccgccucaaacaaaaaccgcggcauuaucaaaacauucuccaacggcugcgacuacgucuccaacaaaggcgucgacacagucuccgucgguaacacccucuacugcguaaauaaacaagaaggccaaucccucuacgucaaaggcgaacccaucaucaacuucuacgacccucucgucuuccccuccgacgaauuugacgccucaaucagccaaguuaacgaaaaaaucaaccaaucacucgccuucauccgcaaauccgacgaacuccuccacaacguuaacgccggcaaaucuaccacgaacaucaugaucaccaccauaaucaucguaauuaucguaauacuccuaucccucauagcaguaggccuccuacucuacugcaaagcccguuaaggacuagucccuguucccagagcccacuuuuuuuucuuuuuuugaaauaaaauagccugucuuucagaucuaaaaaaaaaaaaaaaaaaaaaaaaaaaaaaaaaaaaaaaaaaaaaaaaaaaaaaaaaaaaaaaaugcaucccccccccccccccccccccccccccccccaaaggcucuuuucagagccaccagaauu

SEQ ID NO: 2760 - RNA, 1840 nt, Artificial Sequence
  mRNA product Design a-2 comprising derived and/or modified sequence from HRSV(A2)__F-del_DSCav1_mut2 (opt1)
gggagaguccgcucagccagguugcagaagcggcuuagcguguguccuaaucuucucucugcguguagguaggccugugccgcaaacaagcuuaccauggagcugcucauccugaaggccaacgccaucaccaccauccugacggcggugaccuucugcuucgccagcggccagaacaucaccgaggaguucuaccaguccacgugcagcgccgucuccaagggguaccucggcgcccugcggaccggcugguacaccuccgugaucaccaucgagcugagcaacaucaaggagaacaagugcaacgggaccgacgccaaggugaagcucaucaagcaggagcuggacaaguacaagaacgcggucacggaccugcagcuccugaugcaguccaccccggcaaccggcuccggcuccgccaucugcagcggcgucgccgugugcaaggugcugcaccucgagggggaggucaacaagaucaagagcgcccugcuguccaccaacaaggccguggugagccucuccaacggcgucagcgugcugaccuucaaggugcuggaccucaagaacuacaucgacaagcagcugcugcccauccugaacaagcagagcugcuccauccccaacaucgagacggugaucgaguuccagcagaagaacaaccggcuccuggagaucacccgcgaguucagcgugaacgccggggucaccacccccguguccacguacaugcugaccaacagcgagcuccugucccugaucaacgacaugccgaucaccaacgaccagaagaagcucaugagcaacaacgugcagaucguccggcagcaguccuacagcaucaugugcaucaucaaggaggaggugcuggcguacgugguccagcugccccucuacggcgugaucgacacccccugcuggaagcugcacacgagcccccugugcaccaccaacaccaaggagggguccaacaucugccucacgcgcaccgaccggggcugguacugcgacaacgccggcagcgucuccuucuucccgcaggccgagaccugcaaggugcagagcaaccgcguguucugcgacaccaugaacucccugacgcugcccagcgagguaaaccucugcaacgucgacaucuucaaccccaaguacgacugcaagaucaugaccuccaagaccgacgugagcuccagcgugaucaccucccugggggccaucgucagcugcuacggcaagacgaagugcaccgccagcaacaagaaccgggggaucaucaagaccuucuccaacggcugcgacuacgugagcaacaagggcguggacaccguguccgucgggaacacccuguacugcgugaacaagcaggagggccagagccucuacgugaagggggagcccaucaucaacuucuacgacccgcuggucuuccccuccgacgaguucgacgcgagcaucucccaggugaacgagaagaucaaccagagccuggccuucauccgcaaguccgacgagcugcuccacaacgugaacgccggcaagagcacgaccaacaucaugaucaccaccaucaucaucgucaucaucgugauccugcugucccucaucgccguggggcugcugcucuacugcaaggcccggugaggacuagucccuguucccagagcccacuuuuuuuucuuuuuuugaaauaaaauagccugucuuucagaucuaaaaaaaaaaaaaaaaaaaaaaaaaaaaaaaaaaaaaaaaaaaaaaaaaaaaaaaaaaaaaaaaugcaucccccccccccccccccccccccccccccccaaaggcucuuuucagagccaccagaauu

SEQ ID NO: 2761 - RNA, 1840 nt, Artificial Sequence
  mRNA product Design a-2 comprising derived and/or modified sequence from HRSV(A2)__F-del_DSCav1_mut2 (opt1)
gggagaguccgcucagccagguugcagaagcggcuuagcguguguccuaaucuucucucugcguguagguaggccugugccgcaaacaagcuuaccauggagcugcucauccugaaggccaacgccaucaccaccauccugacggcggugaccuucugcuucgccagcggccagaacaucaccgaggaguucuaccaguccacgugcagcgccgucuccaagggguaccucggcgcccugcgcaccgggugguacaccagcgugaucaccaucgagcuguccaacaucaaggagaacaagugcaacggcaccgacgccaaggugaagcucaucaagcaggagcuggacaaguacaagaacgcggucacggaccugcagcuccugaugcagagcacccccgccaccggguccggcagcgccaucugcuccggcguggccgugugcaagguccugcaccucgagggggaggugaacaagaucaagagcgcgcugcuguccaccaacaaggccguggucagccucuccaacggcgugagcgugcugacguucaagguccuggaccucaagaacuacaucgacaagcagcugcugccgauccucaacaagcaguccugcagcauccccaacaucgagaccgugaucgaguuccagcagaagaacaaccggcugcuggagaucacccgcgaguucuccgugaacgccggggucaccacgcccgugagcaccuacaugcucaccaacuccgagcugcugagccucaucaacgacaugcccaucaccaacgaccagaagaagcugaugagcaacaacgugcagaucguccggcagcaguccuacagcaucaugugcaucaucaaggaggaggugcuggccuacgugguccagcucccgcuguacggcgugaucgacacgcccugcuggaagcugcacaccagcccccucugcaccaccaacacgaaggagggguccaacaucugccugacccgcaccgaccggggcugguacugcgacaacgccggcuccgugagcuucuucccccaggcggagaccugcaagguccaguccaaccgcguguucugcgacacgaugaacagccugacccucccguccgaggucaaccugugcaacguggacaucuucaaccccaaguacgacugcaagaucaugaccagcaagaccgacguguccagcuccgucaucacgagccugggggccaucguguccugcuacggcaagaccaagugcaccgccagcaacaagaaccgggggaucaucaagaccuucuccaacggcugcgacuacgugagcaacaagggcgucgacacgguguccguggggaacacccucuacugcgucaacaagcaggagggccagagccuguacgugaagggggagcccaucaucaacuucuacgacccccugguguucccgagcgacgaguucgacgccuccaucagccaggucaacgagaagaucaaccagucccucgccuucauccgcaagagcgacgagcugcugcacaacgugaacgcgggcaaguccaccaccaacaucaugaucaccacgaucaucaucgugaucaucgucauccuccugagccugaucgccguggggcuccugcuguacugcaaggcccggugaggacuagucccuguucccagagcccacuuuuuuuucuuuuuuugaaauaaaauagccugucuuucagaucuaaaaaaaaaaaaaaaaaaaaaaaaaaaaaaaaaaaaaaaaaaaaaaaaaaaaaaaaaaaaaaaaugcaucccccccccccccccccccccccccccccccaaaggcucuuuucagagccaccagaauu

SEQ ID NO: 2762 - RNA, 1840 nt, Artificial Sequence
  mRNA product Design a-2 comprising derived and/or modified sequence from HRSV(A2)__F-del_DSCav1_mut2 (opt2)
gggagaguccgcucagccagguugcagaagcggcuuagcguguguccuaaucuucucucugcguguagguaggccugugccgcaaacaagcuuaccauggagcuccucauccucaaggccaacgccaucaccaccauccucaccgccgucaccuucugcuucgccuccggccagaacaucaccgaggaguucuaccaguccaccugcuccgccgucuccaagggcuaccucggcgcccuccgcaccggcugguacaccuccgucaucaccaucgagcucuccaacaucaaggagaacaagugcaacggcaccgacgccaaggucaagcucaucaagcaggagcucgacaaguacaagaacgccgucaccgaccuccagcuccucaugcaguccacccccgccaccggcuccggcuccgccaucugcuccggcgucgccgucugcaagguccuccaccucgagggcgaggucaacaagaucaaguccgcccuccucuccaccaacaaggccgucgucucccucuccaacggcgucuccguccucaccuucaagguccucgaccucaagaacuacaucgacaagcagcuccuccccauccucaacaagcaguccugcuccauccccaacaucgagaccgucaucgaguuccagcagaagaacaaccgccuccucgagaucacccgcgaguucuccgucaacgccggcgucaccacccccgucuccaccuacaugcucaccaacuccgagcuccucucccucaucaacgacaugcccaucaccaacgaccagaagaagcucauguccaacaacguccagaucguccgccagcaguccuacuccaucaugugcaucaucaaggaggagguccucgccuacgucguccagcucccccucuacggcgucaucgacacccccugcuggaagcuccacaccuccccccucugcaccaccaacaccaaggagggcuccaacaucugccucacccgcaccgaccgcggcugguacugcgacaacgccggcuccgucuccuucuucccccaggccgagaccugcaagguccaguccaaccgcgucuucugcgacaccaugaacucccucacccuccccuccgaggucaaccucugcaacgucgacaucuucaaccccaaguacgacugcaagaucaugaccuccaagaccgacgucuccuccuccgucaucaccucccucggcgccaucgucuccugcuacggcaagaccaagugcaccgccuccaacaagaaccgcggcaucaucaagaccuucuccaacggcugcgacuacgucuccaacaagggcgucgacaccgucuccgucggcaacacccucuacugcgucaacaagcaggagggccagucccucuacgucaagggcgagcccaucaucaacuucuacgacccccucgucuuccccuccgacgaguucgacgccuccaucucccaggucaacgagaagaucaaccagucccucgccuucauccgcaaguccgacgagcuccuccacaacgucaacgccggcaaguccaccaccaacaucaugaucaccaccaucaucaucgucaucaucgucauccuccucucccucaucgccgucggccuccuccucuacugcaaggcccgcugaggacuagucccuguucccagagcccacuuuuuuuucuuuuuuugaaauaaaauagccugucuuucagaucuaaaaaaaaaaaaaaaaaaaaaaaaaaaaaaaaaaaaaaaaaaaaaaaaaaaaaaaaaaaaaaaaugcaucccccccccccccccccccccccccccccccaaaggcucuuuucagagccaccagaauu

SEQ ID NO: 2763 - RNA, 1840 nt, Artificial Sequence
  mRNA product Design a-2 comprising derived and/or modified sequence from HRSV(A2)__F-del_DSCav1_mut2 (opt3)
gggagaguccgcucagccagguugcagaagcggcuuagcguguguccuaaucuucucucugcguguagguaggccugugccgcaaacaagcuuaccauggagcugcucauccuuaaggccaacgcuauuaccacaauacugacugcagugacguucugcuuugccagcggccagaauaucaccgaagaguucuaccaauccacauguucugcggucucaaaaggguauuugggagcuuuaagaacugguugguacaccaguguuauuacaaucgaacugagcaacauuaaggagaauaaaugcaacggcaccgacgccaaggugaaacuaaucaagcaggaacucgauaaguauaaaaaugcaguaacugaccugcagcuucugaugcaguccacacccgccaccgggucuggaucggcuauauguucaggcguggcagucugcaagguguugcaccucgagggugagguuaacaaaaucaagagcgcccugcugaguacgaauaaagcuguggucucccucucuaacggggugagcguauuaacuuuuaagguucuggaucuuaagaauuacauugacaaacaauugcugccuauccuaaacaagcaguccuguucaauuccaaauaucgaaaccgugauagaguuccagcagaaaaacaauaggcuccuggaaauuacacgggaguuuagugucaacgccggagugacuaccccggugagcacauauaugcuuaccaauucugagcuguugucccucaucaacgauaugcccauuacgaacgaccaaaagaaacugaugucaaauaacguccagaucguucgccagcagagcuacaguaucaugugcauuauaaaggaagagguguuagcguauguagugcaacugccucucuacggcgucaucgauacuccauguuggaaacuucauacaucuccccugugcaccacuaauacaaaggaaggcuccaacauuuguuugacccgaacggaccgugggugguacugcgauaaugcaggaagcgugucguucuuuccucaggccgagaccuguaagguucagucuaacagaguguucugcgacacaaugaacucccuaacucugccaucagaagucaaucucugcaauguggauaucuuuaaccccaaauaugacuguaagauaaugaccaguaaaacagauguaagcuccucuguuauuacuagccugggugcuaucgugucaugcuacggcaagaccaaauguacagccaguaauaagaacagggggaucauuaagaccuucuccaauggaugcgacuaugucagcaacaaaggcguggacacugucucuguggguaauacgcuuuacuguguuaacaagcaagaggggcagucacuguaugugaaaggagagccuaucauuaacuuuuacgauccauugguauucccgagugacgaauuugaugcaagcauaucccaggucaaugagaagaucaaccagucucucgcuuucauucggaaaucggacgaacuguuacacaaugugaacgccggcaagagcacaaccaauaucaugaucacuaccauuauaaucguuauuaucgugauucugcuaucccucaucgcggucggccugcuuuuguauugcaaggcccgcugaggacuagucccuguucccagagcccacuuuuuuuucuuuuuuugaaauaaaauagccugucuuucagaucuaaaaaaaaaaaaaaaaaaaaaaaaaaaaaaaaaaaaaaaaaaaaaaaaaaaaaaaaaaaaaaaaugcaucccccccccccccccccccccccccccccccaaaggcucuuuucagagccaccagaauu

SEQ ID NO: 2764 - RNA, 1840 nt, Artificial Sequence
  mRNA product Design a-2 comprising derived and/or modified sequence from HRSV(A2)__F-del_DSCav1_mut2 (opt4)
gggagaguccgcucagccagguugcagaagcggcuuagcguguguccuaaucuucucucugcguguagguaggccugugccgcaaacaagcuuaccauggagcugcugauccugaaggccaacgccaucaccaccauccugaccgccgugaccuucugcuucgccagcggccagaacaucaccgaggaguucuaccagagcaccugcagcgccgugagcaagggcuaccugggcgcccugagaaccggcugguacaccagcgugaucaccaucgagcugagcaacaucaaggagaacaagugcaacggcaccgacgccaaggugaagcugaucaagcaggagcuggacaaguacaagaacgccgugaccgaccugcagcugcugaugcagagcacccccgccaccggcagcggcagcgccaucugcagcggcguggccgugugcaaggugcugcaccuggagggcgaggugaacaagaucaagagcgcccugcugagcaccaacaaggccguggugagccugagcaacggcgugagcgugcugaccuucaaggugcuggaccugaagaacuacaucgacaagcagcugcugcccauccugaacaagcagagcugcagcauccccaacaucgagaccgugaucgaguuccagcagaagaacaacagacugcuggagaucaccagagaguucagcgugaacgccggcgugaccacccccgugagcaccuacaugcugaccaacagcgagcugcugagccugaucaacgacaugcccaucaccaacgaccagaagaagcugaugagcaacaacgugcagaucgugagacagcagagcuacagcaucaugugcaucaucaaggaggaggugcuggccuacguggugcagcugccccuguacggcgugaucgacacccccugcuggaagcugcacaccagcccccugugcaccaccaacaccaaggagggcagcaacaucugccugaccagaaccgacagaggcugguacugcgacaacgccggcagcgugagcuucuucccccaggccgagaccugcaaggugcagagcaacagaguguucugcgacaccaugaacagccugacccugcccagcgaggugaaccugugcaacguggacaucuucaaccccaaguacgacugcaagaucaugaccagcaagaccgacgugagcagcagcgugaucaccagccugggcgccaucgugagcugcuacggcaagaccaagugcaccgccagcaacaagaacagaggcaucaucaagaccuucagcaacggcugcgacuacgugagcaacaagggcguggacaccgugagcgugggcaacacccuguacugcgugaacaagcaggagggccagagccuguacgugaagggcgagcccaucaucaacuucuacgacccccugguguuccccagcgacgaguucgacgccagcaucagccaggugaacgagaagaucaaccagagccuggccuucaucagaaagagcgacgagcugcugcacaacgugaacgccggcaagagcaccaccaacaucaugaucaccaccaucaucaucgugaucaucgugauccugcugagccugaucgccgugggccugcugcuguacugcaaggccagaugaggacuagucccuguucccagagcccacuuuuuuuucuuuuuuugaaauaaaauagccugucuuucagaucuaaaaaaaaaaaaaaaaaaaaaaaaaaaaaaaaaaaaaaaaaaaaaaaaaaaaaaaaaaaaaaaaugcaucccccccccccccccccccccccccccccccaaaggcucuuuucagagccaccagaauu

SEQ ID NO: 2765 - RNA, 1840 nt, Artificial Sequence
  mRNA product Design a-2 comprising derived and/or modified sequence from HRSV(A2)__F-del_DSCav1_mut2 (opt5)
gggagaguccgcucagccagguugcagaagcggcuuagcguguguccuaaucuucucucugcguguagguaggccugugccgcaaacaagcuuaccauggagcugcucauccugaaggccaacgcuauuaccacaauccuuacggccgugaccuucugcuuugcgagcggccagaauauuacagaagaguucuaccaauccaccuguucugcugucagcaaaggguaucugggagcccucagaacaggcugguacaccuccguuaucacaauugaacugucuaacaucaaggagaauaaaugcaacgggaccgacgccaaggugaaacuuaucaagcaggaacuggauaaguauaaaaaugcugugacggaccuccagcugcugaugcagagcacccccgccacaggauccggcucugcuauuuguagcggggucgccgugugcaagguucuccaccuggagggagaggugaacaaaaucaaguccgcgcuucugagcaccaauaaagccgucgugucucucuccaacggcguuagcgugcugacauuuaagguccuugaucugaagaauuacauugacaaacaacuccugccuauccugaacaagcagucuuguuccauuccgaauaucgaaaccgugauugaguuccagcagaaaaacaaucggcuccuggaaaucacgcgcgaguuuagcgugaacgcuggcgucacaacccccguuucuacauauaugcuuaccaauuccgagcugcucagccugaucaacgauaugccuauuaccaacgaccaaaagaaacuuauguccaauaacgugcagaucgugagacagcagucuuacagcauuaugugcaucauuaaggaagagguccuggccuaugugguucaacucccccuguacggggugaucgauacaccuuguuggaaacugcauacgagcccccucugcaccacaaauaccaaggaaggauccaacaucugucugacacggaccgaccgcggcugguacugcgauaaugcugggucugucuccuucuuuccucaggccgagacguguaaggugcagagcaacagaguuuucugcgacacaaugaacucucuuacccugccgagcgaagugaaucucugcaaugucgauauuuuuaaccccaaauaugacuguaagaucaugaccuccaaaacagaugugucuagcuccgucauuaccagccugggagcgaucgugucuugcuacggcaagacaaaauguacggccuccaauaagaaccgggggauuaucaagaccuucagcaauggaugcgacuauguuucuaacaaaggcguggacacagucuccgugggcaauacccuuuacuguguuaacaagcaagaggggcagagccuguaugugaaaggagagccuaucauuaacuuuuacgauccccucgucuucccuuccgacgaauuugaugcuucuaucagccaggugaaugagaagauuaaccagucccuggccuucauccgcaaaucugacgaacugcuccacaaugugaacgcuggcaagagcacaaccaauauuaugaucacgaccauuaucaucguuauuaucgucauucugcuuucccugaucgccguggggcuccugcuguauugcaaggccagaugaggacuagucccuguucccagagcccacuuuuuuuucuuuuuuugaaauaaaauagccugucuuucagaucuaaaaaaaaaaaaaaaaaaaaaaaaaaaaaaaaaaaaaaaaaaaaaaaaaaaaaaaaaaaaaaaaugcaucccccccccccccccccccccccccccccccaaaggcucuuuucagagccaccagaauu

SEQ ID NO: 2766 - RNA, 1840 nt, Artificial Sequence
  mRNA product Design a-2 comprising derived and/or modified sequence from HRSV(A2)__F-del_DSCav1_mut2 (opt6)
gggagaguccgcucagccagguugcagaagcggcuuagcguguguccuaaucuucucucugcguguagguaggccugugccgcaaacaagcuuaccauggaacuccuaauacuuaaagccaaugcaauaaccacaauacuaacagcaguaacauucugcuuugcaucaggacaaaacauaacagaagaauuuuaccaaucaacauguucagcaguaagcaaaggauaccuaggagccuuacgcacagguugguacacuuccguaauaacaauagaacucucaaauauaaaagaaaacaaaugcaacggaaccgaugcaaaaguaaaacuaauaaaacaagaauuagacaaauacaaaaacgcaguaacagaccuacaauuacuuaugcaaucaacacccgcaacaggauccggcucagcaaucuguucaggaguagcaguaugcaaaguucuccaccuagaaggcgaaguaaacaaaauaaaaucagcccuauuaucuaccaauaaagcaguaguaucacuaucaaauggaguaucuguccuaaccuucaaaguacuugaccuaaaaaauuacaucgacaaacaauuacuaccaauacuuaacaaacaaucauguucaauaccaaacauugaaacaguaauagaauuucaacaaaaaaauaacagauuauuagaaauaacccgcgaauuuucaguuaacgcaggaguaacaacaccaguauccacauacauguuaacaaauucagaacucuuaucacuuauaaacgacaugcccauaacaaacgaccaaaaaaaacucaugucuaacaauguucaaauaguucgacaacaaucauacuccauaaugugcauaauaaaagaagaaguucuagcauauguuguacaacucccacucuaugguguuauagacacaccaugcuggaaacuacauacaagccccuuaugcacuacaaacacaaaagaaggcucuaauauaugucuaacccgcacagacagaggcugguauugcgauaacgcagguucaguaucauucuuuccacaagcagaaacuugcaaaguccaauccaauagagucuucugcgacacuaugaacucacucacacucccaucugaagucaauuuauguaacgucgauaucuucaacccaaaauacgacugcaaaauaaugaccucaaaaacagacguaagcucaucagucauaacuucucuaggcgcaaucgucucauguuacggcaaaacaaaauguaccgcaucaaacaaaaaucgagguauaauaaaaaccuuuucuaacggcugcgacuacguaucaaacaaaggaguagauacuguaagugucggaaacacauuauacugcgucaacaaacaagaaggacaaucccuauauguuaaaggcgaaccuaucauuaauuucuacgacccacucgucuuuccauccgacgaauuugacgcaucaauuucccaaguaaaugaaaaaauaaaccaaucccuugcauucauaagaaaaucagaugaacuauuacacaacguaaacgcaggcaaaucaacaacaaauauaaugaucacaacaauaauaaucguaauaauaguaauccuacucucacuaauagcaguaggcuuacuauuauauugcaaagccagauaaggacuagucccuguucccagagcccacuuuuuuuucuuuuuuugaaauaaaauagccugucuuucagaucuaaaaaaaaaaaaaaaaaaaaaaaaaaaaaaaaaaaaaaaaaaaaaaaaaaaaaaaaaaaaaaaaugcaucccccccccccccccccccccccccccccccaaaggcucuuuucagagccaccagaauu

SEQ ID NO: 2767 - RNA, 1840 nt, Artificial Sequence
  mRNA product Design a-2 comprising derived and/or modified sequence from HRSV(A2)__F-del_DSCav1_mut2 (opt11)
gggagaguccgcucagccagguugcagaagcggcuuagcguguguccuaaucuucucucugcguguagguaggccugugccgcaaacaagcuuaccauggaacuucuuauccuaaaagcgaacgccauaaccacaauccuaacagcagucaccuucuguuucgccucaggacaaaacaucaccgaggaauuuuaccaauccacauguagcgcugucucaaaaggcuaccucggcgcccuccgaaccggcugguacacauccguaauaacgaucgaacucuccaacauaaaagaaaauaaaugcaacggcaccgacgccaaagucaaacuuaucaaacaagaacuagacaaauacaaaaacgccgucaccgaccuccagcuccucaugcaauccaccccagcaacaggcuccggaagcgcaaucugcucaggcgucgccguaugcaaaguacuccaccucgaaggagaagucaacaaaaucaaauccgcccuccuauccacaaacaaagcaguugucucacucuccaacgggguaagcguacugaccuucaaaguccuagaccucaaaaacuacaucgauaaacaacuccuuccaauccucaacaaacaaucaugcucuauccccaacaucgaaaccguaaucgaauuucaacaaaaaaacaaccgccuacuugaaaucacacgcgaauuuagcgucaacgcaggaguaacaacacccguguccacauauaugcucacgaacagcgaacuacuaucccugauuaacgacaugcccaucaccaacgaccaaaaaaaacuaaugagcaacaacguacaaaucguccgccaacaaagcuacucuauaaugugcaucaucaaggaagaaguccuagccuacgucguccaauuaccacucuacggcgucaucgacacacccugcuggaaacuccauacauccccccucugcaccaccaacaccaaagaaggguccaacauaugccucacucgcacagaccgcggcugguacugcgacaacgcuggcagcgucagcuucuucccccaggccgaaaccugcaaaguccaauccaacagagucuucugcgacaccaugaacucgcucacccuccccuccgaggucaaccucugcaacgucgacauauucaaccccaaauacgacugcaaaaucaugaccuccaaaaccgacgucagcucaucagucaucacaucccucggggccaucgucuccugcuacggcaaaaccaagugcaccgccucaaacaaaaaccgcggcauuaucaaaacauucuccaacggcugcgacuacgucuccaacaaaggcgucgacacagucuccgucgguaacacccucuacugcguaaauaaacaagaaggccaaucccucuacgucaaaggcgaacccaucaucaacuucuacgacccucucgucuuccccuccgacgaauuugacgccucaaucagccaaguuaacgaaaaaaucaaccaaucacucgccuucauccgcaaauccgacgaacuccuccacaacguuaacgccggcaaaucuaccacgaacaucaugaucaccaccauaaucaucguaauuaucguaauacuccuaucccucauagcaguaggccuccuacucuacugcaaagcccguuaaggacuagucccuguucccagagcccacuuuuuuuucuuuuuuugaaauaaaauagccugucuuucagaucuaaaaaaaaaaaaaaaaaaaaaaaaaaaaaaaaaaaaaaaaaaaaaaaaaaaaaaaaaaaaaaaaugcaucccccccccccccccccccccccccccccccaaaggcucuuuucagagccaccagaauu

SEQ ID NO: 2768 - RNA, 1918 nt, Artificial Sequence
  mRNA product Design a-3 comprising derived and/or modified sequence from HRSV(A2)__F-del_DSCav1_mut2 (opt1)
gggagagggcgcuuggcuugcaaggacccugagcugcggcauugaagcacacccaacccaacucgacugaagucagccucacugaaccggaucugagaaucuucucucucugggcuugccagggcucuccgaaccuagcuagcauccucuucaauuccaacuagaaagcuuaccauggagcugcucauccugaaggccaacgccaucaccaccauccugacggcggugaccuucugcuucgccagcggccagaacaucaccgaggaguucuaccaguccacgugcagcgccgucuccaagggguaccucggcgcccugcggaccggcugguacaccuccgugaucaccaucgagcugagcaacaucaaggagaacaagugcaacgggaccgacgccaaggugaagcucaucaagcaggagcuggacaaguacaagaacgcggucacggaccugcagcuccugaugcaguccaccccggcaaccggcuccggcuccgccaucugcagcggcgucgccgugugcaaggugcugcaccucgagggggaggucaacaagaucaagagcgcccugcuguccaccaacaaggccguggugagccucuccaacggcgucagcgugcugaccuucaaggugcuggaccucaagaacuacaucgacaagcagcugcugcccauccugaacaagcagagcugcuccauccccaacaucgagacggugaucgaguuccagcagaagaacaaccggcuccuggagaucacccgcgaguucagcgugaacgccggggucaccacccccguguccacguacaugcugaccaacagcgagcuccugucccugaucaacgacaugccgaucaccaacgaccagaagaagcucaugagcaacaacgugcagaucguccggcagcaguccuacagcaucaugugcaucaucaaggaggaggugcuggcguacgugguccagcugccccucuacggcgugaucgacacccccugcuggaagcugcacacgagcccccugugcaccaccaacaccaaggagggguccaacaucugccucacgcgcaccgaccggggcugguacugcgacaacgccggcagcgucuccuucuucccgcaggccgagaccugcaaggugcagagcaaccgcguguucugcgacaccaugaacucccugacgcugcccagcgagguaaaccucugcaacgucgacaucuucaaccccaaguacgacugcaagaucaugaccuccaagaccgacgugagcuccagcgugaucaccucccugggggccaucgucagcugcuacggcaagacgaagugcaccgccagcaacaagaaccgggggaucaucaagaccuucuccaacggcugcgacuacgugagcaacaagggcguggacaccguguccgucgggaacacccuguacugcgugaacaagcaggagggccagagccucuacgugaagggggagcccaucaucaacuucuacgacccgcuggucuuccccuccgacgaguucgacgcgagcaucucccaggugaacgagaagaucaaccagagccuggccuucauccgcaaguccgacgagcugcuccacaacgugaacgccggcaagagcacgaccaacaucaugaucaccaccaucaucaucgucaucaucgugauccugcugucccucaucgccguggggcugcugcucuacugcaaggcccggugaggacuagucccuguucccagagcccacuuuuuuuucuuuuuuugaaauaaaauagccugucuuucagaucuaaaaaaaaaaaaaaaaaaaaaaaaaaaaaaaaaaaaaaaaaaaaaaaaaaaaaaaaaaaaaaaaugcaucccccccccccccccccccccccccccccccaaaggcucuuuucagagccaccagaauu

SEQ ID NO: 2769 - RNA, 1918 nt, Artificial Sequence
  mRNA product Design a-3 comprising derived and/or modified sequence from HRSV(A2)__F-del_DSCav1_mut2 (opt1)
gggagagggcgcuuggcuugcaaggacccugagcugcggcauugaagcacacccaacccaacucgacugaagucagccucacugaaccggaucugagaaucuucucucucugggcuugccagggcucuccgaaccuagcuagcauccucuucaauuccaacuagaaagcuuaccauggagcugcucauccugaaggccaacgccaucaccaccauccugacggcggugaccuucugcuucgccagcggccagaacaucaccgaggaguucuaccaguccacgugcagcgccgucuccaagggguaccucggcgcccugcgcaccgggugguacaccagcgugaucaccaucgagcuguccaacaucaaggagaacaagugcaacggcaccgacgccaaggugaagcucaucaagcaggagcuggacaaguacaagaacgcggucacggaccugcagcuccugaugcagagcacccccgccaccggguccggcagcgccaucugcuccggcguggccgugugcaagguccugcaccucgagggggaggugaacaagaucaagagcgcgcugcuguccaccaacaaggccguggucagccucuccaacggcgugagcgugcugacguucaagguccuggaccucaagaacuacaucgacaagcagcugcugccgauccucaacaagcaguccugcagcauccccaacaucgagaccgugaucgaguuccagcagaagaacaaccggcugcuggagaucacccgcgaguucuccgugaacgccggggucaccacgcccgugagcaccuacaugcucaccaacuccgagcugcugagccucaucaacgacaugcccaucaccaacgaccagaagaagcugaugagcaacaacgugcagaucguccggcagcaguccuacagcaucaugugcaucaucaaggaggaggugcuggccuacgugguccagcucccgcuguacggcgugaucgacacgcccugcuggaagcugcacaccagcccccucugcaccaccaacacgaaggagggguccaacaucugccugacccgcaccgaccggggcugguacugcgacaacgccggcuccgugagcuucuucccccaggcggagaccugcaagguccaguccaaccgcguguucugcgacacgaugaacagccugacccucccguccgaggucaaccugugcaacguggacaucuucaaccccaaguacgacugcaagaucaugaccagcaagaccgacguguccagcuccgucaucacgagccugggggccaucguguccugcuacggcaagaccaagugcaccgccagcaacaagaaccgggggaucaucaagaccuucuccaacggcugcgacuacgugagcaacaagggcgucgacacgguguccguggggaacacccucuacugcgucaacaagcaggagggccagagccuguacgugaagggggagcccaucaucaacuucuacgacccccugguguucccgagcgacgaguucgacgccuccaucagccaggucaacgagaagaucaaccagucccucgccuucauccgcaagagcgacgagcugcugcacaacgugaacgcgggcaaguccaccaccaacaucaugaucaccacgaucaucaucgugaucaucgucauccuccugagccugaucgccguggggcuccugcuguacugcaaggcccggugaggacuagucccuguucccagagcccacuuuuuuuucuuuuuuugaaauaaaauagccugucuuucagaucuaaaaaaaaaaaaaaaaaaaaaaaaaaaaaaaaaaaaaaaaaaaaaaaaaaaaaaaaaaaaaaaaugcaucccccccccccccccccccccccccccccccaaaggcucuuuucagagccaccagaauu

SEQ ID NO: 2770 - RNA, 1918 nt, Artificial Sequence
  mRNA product Design a-3 comprising derived and/or modified sequence from HRSV(A2)__F-del_DSCav1_mut2 (opt2)
gggagagggcgcuuggcuugcaaggacccugagcugcggcauugaagcacacccaacccaacucgacugaagucagccucacugaaccggaucugagaaucuucucucucugggcuugccagggcucuccgaaccuagcuagcauccucuucaauuccaacuagaaagcuuaccauggagcuccucauccucaaggccaacgccaucaccaccauccucaccgccgucaccuucugcuucgccuccggccagaacaucaccgaggaguucuaccaguccaccugcuccgccgucuccaagggcuaccucggcgcccuccgcaccggcugguacaccuccgucaucaccaucgagcucuccaacaucaaggagaacaagugcaacggcaccgacgccaaggucaagcucaucaagcaggagcucgacaaguacaagaacgccgucaccgaccuccagcuccucaugcaguccacccccgccaccggcuccggcuccgccaucugcuccggcgucgccgucugcaagguccuccaccucgagggcgaggucaacaagaucaaguccgcccuccucuccaccaacaaggccgucgucucccucuccaacggcgucuccguccucaccuucaagguccucgaccucaagaacuacaucgacaagcagcuccuccccauccucaacaagcaguccugcuccauccccaacaucgagaccgucaucgaguuccagcagaagaacaaccgccuccucgagaucacccgcgaguucuccgucaacgccggcgucaccacccccgucuccaccuacaugcucaccaacuccgagcuccucucccucaucaacgacaugcccaucaccaacgaccagaagaagcucauguccaacaacguccagaucguccgccagcaguccuacuccaucaugugcaucaucaaggaggagguccucgccuacgucguccagcucccccucuacggcgucaucgacacccccugcuggaagcuccacaccuccccccucugcaccaccaacaccaaggagggcuccaacaucugccucacccgcaccgaccgcggcugguacugcgacaacgccggcuccgucuccuucuucccccaggccgagaccugcaagguccaguccaaccgcgucuucugcgacaccaugaacucccucacccuccccuccgaggucaaccucugcaacgucgacaucuucaaccccaaguacgacugcaagaucaugaccuccaagaccgacgucuccuccuccgucaucaccucccucggcgccaucgucuccugcuacggcaagaccaagugcaccgccuccaacaagaaccgcggcaucaucaagaccuucuccaacggcugcgacuacgucuccaacaagggcgucgacaccgucuccgucggcaacacccucuacugcgucaacaagcaggagggccagucccucuacgucaagggcgagcccaucaucaacuucuacgacccccucgucuuccccuccgacgaguucgacgccuccaucucccaggucaacgagaagaucaaccagucccucgccuucauccgcaaguccgacgagcuccuccacaacgucaacgccggcaaguccaccaccaacaucaugaucaccaccaucaucaucgucaucaucgucauccuccucucccucaucgccgucggccuccuccucuacugcaaggcccgcugaggacuagucccuguucccagagcccacuuuuuuuucuuuuuuugaaauaaaauagccugucuuucagaucuaaaaaaaaaaaaaaaaaaaaaaaaaaaaaaaaaaaaaaaaaaaaaaaaaaaaaaaaaaaaaaaaugcaucccccccccccccccccccccccccccccccaaaggcucuuuucagagccaccagaauu

SEQ ID NO: 2771 - RNA, 1918 nt, Artificial Sequence
  mRNA product Design a-3 comprising derived and/or modified sequence from HRSV(A2)__F-del_DSCav1_mut2 (opt3)
gggagagggcgcuuggcuugcaaggacccugagcugcggcauugaagcacacccaacccaacucgacugaagucagccucacugaaccggaucugagaaucuucucucucugggcuugccagggcucuccgaaccuagcuagcauccucuucaauuccaacuagaaagcuuaccauggagcugcucauccuuaaggccaacgcuauuaccacaauacugacugcagugacguucugcuuugccagcggccagaauaucaccgaagaguucuaccaauccacauguucugcggucucaaaaggguauuugggagcuuuaagaacugguugguacaccaguguuauuacaaucgaacugagcaacauuaaggagaauaaaugcaacggcaccgacgccaaggugaaacuaaucaagcaggaacucgauaaguauaaaaaugcaguaacugaccugcagcuucugaugcaguccacacccgccaccgggucuggaucggcuauauguucaggcguggcagucugcaagguguugcaccucgagggugagguuaacaaaaucaagagcgcccugcugaguacgaauaaagcuguggucucccucucuaacggggugagcguauuaacuuuuaagguucuggaucuuaagaauuacauugacaaacaauugcugccuauccuaaacaagcaguccuguucaauuccaaauaucgaaaccgugauagaguuccagcagaaaaacaauaggcuccuggaaauuacacgggaguuuagugucaacgccggagugacuaccccggugagcacauauaugcuuaccaauucugagcuguugucccucaucaacgauaugcccauuacgaacgaccaaaagaaacugaugucaaauaacguccagaucguucgccagcagagcuacaguaucaugugcauuauaaaggaagagguguuagcguauguagugcaacugccucucuacggcgucaucgauacuccauguuggaaacuucauacaucuccccugugcaccacuaauacaaaggaaggcuccaacauuuguuugacccgaacggaccgugggugguacugcgauaaugcaggaagcgugucguucuuuccucaggccgagaccuguaagguucagucuaacagaguguucugcgacacaaugaacucccuaacucugccaucagaagucaaucucugcaauguggauaucuuuaaccccaaauaugacuguaagauaaugaccaguaaaacagauguaagcuccucuguuauuacuagccugggugcuaucgugucaugcuacggcaagaccaaauguacagccaguaauaagaacagggggaucauuaagaccuucuccaauggaugcgacuaugucagcaacaaaggcguggacacugucucuguggguaauacgcuuuacuguguuaacaagcaagaggggcagucacuguaugugaaaggagagccuaucauuaacuuuuacgauccauugguauucccgagugacgaauuugaugcaagcauaucccaggucaaugagaagaucaaccagucucucgcuuucauucggaaaucggacgaacuguuacacaaugugaacgccggcaagagcacaaccaauaucaugaucacuaccauuauaaucguuauuaucgugauucugcuaucccucaucgcggucggccugcuuuuguauugcaaggcccgcugaggacuagucccuguucccagagcccacuuuuuuuucuuuuuuugaaauaaaauagccugucuuucagaucuaaaaaaaaaaaaaaaaaaaaaaaaaaaaaaaaaaaaaaaaaaaaaaaaaaaaaaaaaaaaaaaaugcaucccccccccccccccccccccccccccccccaaaggcucuuuucagagccaccagaauu

SEQ ID NO: 2772 - RNA, 1918 nt, Artificial Sequence
  mRNA product Design a-3 comprising derived and/or modified sequence from HRSV(A2)__F-del_DSCav1_mut2 (opt4)
gggagagggcgcuuggcuugcaaggacccugagcugcggcauugaagcacacccaacccaacucgacugaagucagccucacugaaccggaucugagaaucuucucucucugggcuugccagggcucuccgaaccuagcuagcauccucuucaauuccaacuagaaagcuuaccauggagcugcugauccugaaggccaacgccaucaccaccauccugaccgccgugaccuucugcuucgccagcggccagaacaucaccgaggaguucuaccagagcaccugcagcgccgugagcaagggcuaccugggcgcccugagaaccggcugguacaccagcgugaucaccaucgagcugagcaacaucaaggagaacaagugcaacggcaccgacgccaaggugaagcugaucaagcaggagcuggacaaguacaagaacgccgugaccgaccugcagcugcugaugcagagcacccccgccaccggcagcggcagcgccaucugcagcggcguggccgugugcaaggugcugcaccuggagggcgaggugaacaagaucaagagcgcccugcugagcaccaacaaggccguggugagccugagcaacggcgugagcgugcugaccuucaaggugcuggaccugaagaacuacaucgacaagcagcugcugcccauccugaacaagcagagcugcagcauccccaacaucgagaccgugaucgaguuccagcagaagaacaacagacugcuggagaucaccagagaguucagcgugaacgccggcgugaccacccccgugagcaccuacaugcugaccaacagcgagcugcugagccugaucaacgacaugcccaucaccaacgaccagaagaagcugaugagcaacaacgugcagaucgugagacagcagagcuacagcaucaugugcaucaucaaggaggaggugcuggccuacguggugcagcugccccuguacggcgugaucgacacccccugcuggaagcugcacaccagcccccugugcaccaccaacaccaaggagggcagcaacaucugccugaccagaaccgacagaggcugguacugcgacaacgccggcagcgugagcuucuucccccaggccgagaccugcaaggugcagagcaacagaguguucugcgacaccaugaacagccugacccugcccagcgaggugaaccugugcaacguggacaucuucaaccccaaguacgacugcaagaucaugaccagcaagaccgacgugagcagcagcgugaucaccagccugggcgccaucgugagcugcuacggcaagaccaagugcaccgccagcaacaagaacagaggcaucaucaagaccuucagcaacggcugcgacuacgugagcaacaagggcguggacaccgugagcgugggcaacacccuguacugcgugaacaagcaggagggccagagccuguacgugaagggcgagcccaucaucaacuucuacgacccccugguguuccccagcgacgaguucgacgccagcaucagccaggugaacgagaagaucaaccagagccuggccuucaucagaaagagcgacgagcugcugcacaacgugaacgccggcaagagcaccaccaacaucaugaucaccaccaucaucaucgugaucaucgugauccugcugagccugaucgccgugggccugcugcuguacugcaaggccagaugaggacuagucccuguucccagagcccacuuuuuuuucuuuuuuugaaauaaaauagccugucuuucagaucuaaaaaaaaaaaaaaaaaaaaaaaaaaaaaaaaaaaaaaaaaaaaaaaaaaaaaaaaaaaaaaaaugcaucccccccccccccccccccccccccccccccaaaggcucuuuucagagccaccagaauu

SEQ ID NO: 2773 - RNA, 1918 nt, Artificial Sequence
  mRNA product Design a-3 comprising derived and/or modified sequence from HRSV(A2)__F-del_DSCav1_mut2 (opt5)
gggagagggcgcuuggcuugcaaggacccugagcugcggcauugaagcacacccaacccaacucgacugaagucagccucacugaaccggaucugagaaucuucucucucugggcuugccagggcucuccgaaccuagcuagcauccucuucaauuccaacuagaaagcuuaccauggagcugcucauccugaaggccaacgcuauuaccacaauccuuacggccgugaccuucugcuuugcgagcggccagaauauuacagaagaguucuaccaauccaccuguucugcugucagcaaaggguaucugggagcccucagaacaggcugguacaccuccguuaucacaauugaacugucuaacaucaaggagaauaaaugcaacgggaccgacgccaaggugaaacuuaucaagcaggaacuggauaaguauaaaaaugcugugacggaccuccagcugcugaugcagagcacccccgccacaggauccggcucugcuauuuguagcggggucgccgugugcaagguucuccaccuggagggagaggugaacaaaaucaaguccgcgcuucugagcaccaauaaagccgucgugucucucuccaacggcguuagcgugcugacauuuaagguccuugaucugaagaauuacauugacaaacaacuccugccuauccugaacaagcagucuuguuccauuccgaauaucgaaaccgugauugaguuccagcagaaaaacaaucggcuccuggaaaucacgcgcgaguuuagcgugaacgcuggcgucacaacccccguuucuacauauaugcuuaccaauuccgagcugcucagccugaucaacgauaugccuauuaccaacgaccaaaagaaacuuauguccaauaacgugcagaucgugagacagcagucuuacagcauuaugugcaucauuaaggaagagguccuggccuaugugguucaacucccccuguacggggugaucgauacaccuuguuggaaacugcauacgagcccccucugcaccacaaauaccaaggaaggauccaacaucugucugacacggaccgaccgcggcugguacugcgauaaugcugggucugucuccuucuuuccucaggccgagacguguaaggugcagagcaacagaguuuucugcgacacaaugaacucucuuacccugccgagcgaagugaaucucugcaaugucgauauuuuuaaccccaaauaugacuguaagaucaugaccuccaaaacagaugugucuagcuccgucauuaccagccugggagcgaucgugucuugcuacggcaagacaaaauguacggccuccaauaagaaccgggggauuaucaagaccuucagcaauggaugcgacuauguuucuaacaaaggcguggacacagucuccgugggcaauacccuuuacuguguuaacaagcaagaggggcagagccuguaugugaaaggagagccuaucauuaacuuuuacgauccccucgucuucccuuccgacgaauuugaugcuucuaucagccaggugaaugagaagauuaaccagucccuggccuucauccgcaaaucugacgaacugcuccacaaugugaacgcuggcaagagcacaaccaauauuaugaucacgaccauuaucaucguuauuaucgucauucugcuuucccugaucgccguggggcuccugcuguauugcaaggccagaugaggacuagucccuguucccagagcccacuuuuuuuucuuuuuuugaaauaaaauagccugucuuucagaucuaaaaaaaaaaaaaaaaaaaaaaaaaaaaaaaaaaaaaaaaaaaaaaaaaaaaaaaaaaaaaaaaugcaucccccccccccccccccccccccccccccccaaaggcucuuuucagagccaccagaauu

SEQ ID NO: 2774 - RNA, 1918 nt, Artificial Sequence
  mRNA product Design a-3 comprising derived and/or modified sequence from HRSV(A2)__F-del_DSCav1_mut2 (opt6)
gggagagggcgcuuggcuugcaaggacccugagcugcggcauugaagcacacccaacccaacucgacugaagucagccucacugaaccggaucugagaaucuucucucucugggcuugccagggcucuccgaaccuagcuagcauccucuucaauuccaacuagaaagcuuaccauggaacuccuaauacuuaaagccaaugcaauaaccacaauacuaacagcaguaacauucugcuuugcaucaggacaaaacauaacagaagaauuuuaccaaucaacauguucagcaguaagcaaaggauaccuaggagccuuacgcacagguugguacacuuccguaauaacaauagaacucucaaauauaaaagaaaacaaaugcaacggaaccgaugcaaaaguaaaacuaauaaaacaagaauuagacaaauacaaaaacgcaguaacagaccuacaauuacuuaugcaaucaacacccgcaacaggauccggcucagcaaucuguucaggaguagcaguaugcaaaguucuccaccuagaaggcgaaguaaacaaaauaaaaucagcccuauuaucuaccaauaaagcaguaguaucacuaucaaauggaguaucuguccuaaccuucaaaguacuugaccuaaaaaauuacaucgacaaacaauuacuaccaauacuuaacaaacaaucauguucaauaccaaacauugaaacaguaauagaauuucaacaaaaaaauaacagauuauuagaaauaacccgcgaauuuucaguuaacgcaggaguaacaacaccaguauccacauacauguuaacaaauucagaacucuuaucacuuauaaacgacaugcccauaacaaacgaccaaaaaaaacucaugucuaacaauguucaaauaguucgacaacaaucauacuccauaaugugcauaauaaaagaagaaguucuagcauauguuguacaacucccacucuaugguguuauagacacaccaugcuggaaacuacauacaagccccuuaugcacuacaaacacaaaagaaggcucuaauauaugucuaacccgcacagacagaggcugguauugcgauaacgcagguucaguaucauucuuuccacaagcagaaacuugcaaaguccaauccaauagagucuucugcgacacuaugaacucacucacacucccaucugaagucaauuuauguaacgucgauaucuucaacccaaaauacgacugcaaaauaaugaccucaaaaacagacguaagcucaucagucauaacuucucuaggcgcaaucgucucauguuacggcaaaacaaaauguaccgcaucaaacaaaaaucgagguauaauaaaaaccuuuucuaacggcugcgacuacguaucaaacaaaggaguagauacuguaagugucggaaacacauuauacugcgucaacaaacaagaaggacaaucccuauauguuaaaggcgaaccuaucauuaauuucuacgacccacucgucuuuccauccgacgaauuugacgcaucaauuucccaaguaaaugaaaaaauaaaccaaucccuugcauucauaagaaaaucagaugaacuauuacacaacguaaacgcaggcaaaucaacaacaaauauaaugaucacaacaauaauaaucguaauaauaguaauccuacucucacuaauagcaguaggcuuacuauuauauugcaaagccagauaaggacuagucccuguucccagagcccacuuuuuuuucuuuuuuugaaauaaaauagccugucuuucagaucuaaaaaaaaaaaaaaaaaaaaaaaaaaaaaaaaaaaaaaaaaaaaaaaaaaaaaaaaaaaaaaaaugcaucccccccccccccccccccccccccccccccaaaggcucuuuucagagccaccagaauu

SEQ ID NO: 2775 - RNA, 1918 nt, Artificial Sequence
  mRNA product Design a-3 comprising derived and/or modified sequence from HRSV(A2)__F-del_DSCav1_mut2 (opt11)
gggagagggcgcuuggcuugcaaggacccugagcugcggcauugaagcacacccaacccaacucgacugaagucagccucacugaaccggaucugagaaucuucucucucugggcuugccagggcucuccgaaccuagcuagcauccucuucaauuccaacuagaaagcuuaccauggaacuucuuauccuaaaagcgaacgccauaaccacaauccuaacagcagucaccuucuguuucgccucaggacaaaacaucaccgaggaauuuuaccaauccacauguagcgcugucucaaaaggcuaccucggcgcccuccgaaccggcugguacacauccguaauaacgaucgaacucuccaacauaaaagaaaauaaaugcaacggcaccgacgccaaagucaaacuuaucaaacaagaacuagacaaauacaaaaacgccgucaccgaccuccagcuccucaugcaauccaccccagcaacaggcuccggaagcgcaaucugcucaggcgucgccguaugcaaaguacuccaccucgaaggagaagucaacaaaaucaaauccgcccuccuauccacaaacaaagcaguugucucacucuccaacgggguaagcguacugaccuucaaaguccuagaccucaaaaacuacaucgauaaacaacuccuuccaauccucaacaaacaaucaugcucuauccccaacaucgaaaccguaaucgaauuucaacaaaaaaacaaccgccuacuugaaaucacacgcgaauuuagcgucaacgcaggaguaacaacacccguguccacauauaugcucacgaacagcgaacuacuaucccugauuaacgacaugcccaucaccaacgaccaaaaaaaacuaaugagcaacaacguacaaaucguccgccaacaaagcuacucuauaaugugcaucaucaaggaagaaguccuagccuacgucguccaauuaccacucuacggcgucaucgacacacccugcuggaaacuccauacauccccccucugcaccaccaacaccaaagaaggguccaacauaugccucacucgcacagaccgcggcugguacugcgacaacgcuggcagcgucagcuucuucccccaggccgaaaccugcaaaguccaauccaacagagucuucugcgacaccaugaacucgcucacccuccccuccgaggucaaccucugcaacgucgacauauucaaccccaaauacgacugcaaaaucaugaccuccaaaaccgacgucagcucaucagucaucacaucccucggggccaucgucuccugcuacggcaaaaccaagugcaccgccucaaacaaaaaccgcggcauuaucaaaacauucuccaacggcugcgacuacgucuccaacaaaggcgucgacacagucuccgucgguaacacccucuacugcguaaauaaacaagaaggccaaucccucuacgucaaaggcgaacccaucaucaacuucuacgacccucucgucuuccccuccgacgaauuugacgccucaaucagccaaguuaacgaaaaaaucaaccaaucacucgccuucauccgcaaauccgacgaacuccuccacaacguuaacgccggcaaaucuaccacgaacaucaugaucaccaccauaaucaucguaauuaucguaauacuccuaucccucauagcaguaggccuccuacucuacugcaaagcccguuaaggacuagucccuguucccagagcccacuuuuuuuucuuuuuuugaaauaaaauagccugucuuucagaucuaaaaaaaaaaaaaaaaaaaaaaaaaaaaaaaaaaaaaaaaaaaaaaaaaaaaaaaaaaaaaaaaugcaucccccccccccccccccccccccccccccccaaaggcucuuuucagagccaccagaauu

SEQ ID NO: 2776 - RNA, 1867 nt, Artificial Sequence
  mRNA product Design a-4 comprising derived and/or modified sequence from HRSV(A2)__F-del_DSCav1_mut2 (opt1)
gggagacuccugucgggcggaaguaggaggaguagaguuuaaaaacaguacucuuuuuccgguucgggacguaguugaagcaacgacaagccggauaaccgcucuugagacaggaagcuuaccauggagcugcucauccugaaggccaacgccaucaccaccauccugacggcggugaccuucugcuucgccagcggccagaacaucaccgaggaguucuaccaguccacgugcagcgccgucuccaagggguaccucggcgcccugcggaccggcugguacaccuccgugaucaccaucgagcugagcaacaucaaggagaacaagugcaacgggaccgacgccaaggugaagcucaucaagcaggagcuggacaaguacaagaacgcggucacggaccugcagcuccugaugcaguccaccccggcaaccggcuccggcuccgccaucugcagcggcgucgccgugugcaaggugcugcaccucgagggggaggucaacaagaucaagagcgcccugcuguccaccaacaaggccguggugagccucuccaacggcgucagcgugcugaccuucaaggugcuggaccucaagaacuacaucgacaagcagcugcugcccauccugaacaagcagagcugcuccauccccaacaucgagacggugaucgaguuccagcagaagaacaaccggcuccuggagaucacccgcgaguucagcgugaacgccggggucaccacccccguguccacguacaugcugaccaacagcgagcuccugucccugaucaacgacaugccgaucaccaacgaccagaagaagcucaugagcaacaacgugcagaucguccggcagcaguccuacagcaucaugugcaucaucaaggaggaggugcuggcguacgugguccagcugccccucuacggcgugaucgacacccccugcuggaagcugcacacgagcccccugugcaccaccaacaccaaggagggguccaacaucugccucacgcgcaccgaccggggcugguacugcgacaacgccggcagcgucuccuucuucccgcaggccgagaccugcaaggugcagagcaaccgcguguucugcgacaccaugaacucccugacgcugcccagcgagguaaaccucugcaacgucgacaucuucaaccccaaguacgacugcaagaucaugaccuccaagaccgacgugagcuccagcgugaucaccucccugggggccaucgucagcugcuacggcaagacgaagugcaccgccagcaacaagaaccgggggaucaucaagaccuucuccaacggcugcgacuacgugagcaacaagggcguggacaccguguccgucgggaacacccuguacugcgugaacaagcaggagggccagagccucuacgugaagggggagcccaucaucaacuucuacgacccgcuggucuuccccuccgacgaguucgacgcgagcaucucccaggugaacgagaagaucaaccagagccuggccuucauccgcaaguccgacgagcugcuccacaacgugaacgccggcaagagcacgaccaacaucaugaucaccaccaucaucaucgucaucaucgugauccugcugucccucaucgccguggggcugcugcucuacugcaaggcccggugaggacuagucccuguucccagagcccacuuuuuuuucuuuuuuugaaauaaaauagccugucuuucagaucuaaaaaaaaaaaaaaaaaaaaaaaaaaaaaaaaaaaaaaaaaaaaaaaaaaaaaaaaaaaaaaaaugcaucccccccccccccccccccccccccccccccaaaggcucuuuucagagccaccagaauu

SEQ ID NO: 2777 - RNA, 1867 nt, Artificial Sequence
  mRNA product Design a-4 comprising derived and/or modified sequence from HRSV(A2)__F-del_DSCav1_mut2 (opt1)
gggagacuccugucgggcggaaguaggaggaguagaguuuaaaaacaguacucuuuuuccgguucgggacguaguugaagcaacgacaagccggauaaccgcucuugagacaggaagcuuaccauggagcugcucauccugaaggccaacgccaucaccaccauccugacggcggugaccuucugcuucgccagcggccagaacaucaccgaggaguucuaccaguccacgugcagcgccgucuccaagggguaccucggcgcccugcgcaccgggugguacaccagcgugaucaccaucgagcuguccaacaucaaggagaacaagugcaacggcaccgacgccaaggugaagcucaucaagcaggagcuggacaaguacaagaacgcggucacggaccugcagcuccugaugcagagcacccccgccaccggguccggcagcgccaucugcuccggcguggccgugugcaagguccugcaccucgagggggaggugaacaagaucaagagcgcgcugcuguccaccaacaaggccguggucagccucuccaacggcgugagcgugcugacguucaagguccuggaccucaagaacuacaucgacaagcagcugcugccgauccucaacaagcaguccugcagcauccccaacaucgagaccgugaucgaguuccagcagaagaacaaccggcugcuggagaucacccgcgaguucuccgugaacgccggggucaccacgcccgugagcaccuacaugcucaccaacuccgagcugcugagccucaucaacgacaugcccaucaccaacgaccagaagaagcugaugagcaacaacgugcagaucguccggcagcaguccuacagcaucaugugcaucaucaaggaggaggugcuggccuacgugguccagcucccgcuguacggcgugaucgacacgcccugcuggaagcugcacaccagcccccucugcaccaccaacacgaaggagggguccaacaucugccugacccgcaccgaccggggcugguacugcgacaacgccggcuccgugagcuucuucccccaggcggagaccugcaagguccaguccaaccgcguguucugcgacacgaugaacagccugacccucccguccgaggucaaccugugcaacguggacaucuucaaccccaaguacgacugcaagaucaugaccagcaagaccgacguguccagcuccgucaucacgagccugggggccaucguguccugcuacggcaagaccaagugcaccgccagcaacaagaaccgggggaucaucaagaccuucuccaacggcugcgacuacgugagcaacaagggcgucgacacgguguccguggggaacacccucuacugcgucaacaagcaggagggccagagccuguacgugaagggggagcccaucaucaacuucuacgacccccugguguucccgagcgacgaguucgacgccuccaucagccaggucaacgagaagaucaaccagucccucgccuucauccgcaagagcgacgagcugcugcacaacgugaacgcgggcaaguccaccaccaacaucaugaucaccacgaucaucaucgugaucaucgucauccuccugagccugaucgccguggggcuccugcuguacugcaaggcccggugaggacuagucccuguucccagagcccacuuuuuuuucuuuuuuugaaauaaaauagccugucuuucagaucuaaaaaaaaaaaaaaaaaaaaaaaaaaaaaaaaaaaaaaaaaaaaaaaaaaaaaaaaaaaaaaaaugcaucccccccccccccccccccccccccccccccaaaggcucuuuucagagccaccagaauu

SEQ ID NO: 2778 - RNA, 1867 nt, Artificial Sequence
  mRNA product Design a-4 comprising derived and/or modified sequence from HRSV(A2)__F-del_DSCav1_mut2 (opt2)
gggagacuccugucgggcggaaguaggaggaguagaguuuaaaaacaguacucuuuuuccgguucgggacguaguugaagcaacgacaagccggauaaccgcucuugagacaggaagcuuaccauggagcuccucauccucaaggccaacgccaucaccaccauccucaccgccgucaccuucugcuucgccuccggccagaacaucaccgaggaguucuaccaguccaccugcuccgccgucuccaagggcuaccucggcgcccuccgcaccggcugguacaccuccgucaucaccaucgagcucuccaacaucaaggagaacaagugcaacggcaccgacgccaaggucaagcucaucaagcaggagcucgacaaguacaagaacgccgucaccgaccuccagcuccucaugcaguccacccccgccaccggcuccggcuccgccaucugcuccggcgucgccgucugcaagguccuccaccucgagggcgaggucaacaagaucaaguccgcccuccucuccaccaacaaggccgucgucucccucuccaacggcgucuccguccucaccuucaagguccucgaccucaagaacuacaucgacaagcagcuccuccccauccucaacaagcaguccugcuccauccccaacaucgagaccgucaucgaguuccagcagaagaacaaccgccuccucgagaucacccgcgaguucuccgucaacgccggcgucaccacccccgucuccaccuacaugcucaccaacuccgagcuccucucccucaucaacgacaugcccaucaccaacgaccagaagaagcucauguccaacaacguccagaucguccgccagcaguccuacuccaucaugugcaucaucaaggaggagguccucgccuacgucguccagcucccccucuacggcgucaucgacacccccugcuggaagcuccacaccuccccccucugcaccaccaacaccaaggagggcuccaacaucugccucacccgcaccgaccgcggcugguacugcgacaacgccggcuccgucuccuucuucccccaggccgagaccugcaagguccaguccaaccgcgucuucugcgacaccaugaacucccucacccuccccuccgaggucaaccucugcaacgucgacaucuucaaccccaaguacgacugcaagaucaugaccuccaagaccgacgucuccuccuccgucaucaccucccucggcgccaucgucuccugcuacggcaagaccaagugcaccgccuccaacaagaaccgcggcaucaucaagaccuucuccaacggcugcgacuacgucuccaacaagggcgucgacaccgucuccgucggcaacacccucuacugcgucaacaagcaggagggccagucccucuacgucaagggcgagcccaucaucaacuucuacgacccccucgucuuccccuccgacgaguucgacgccuccaucucccaggucaacgagaagaucaaccagucccucgccuucauccgcaaguccgacgagcuccuccacaacgucaacgccggcaaguccaccaccaacaucaugaucaccaccaucaucaucgucaucaucgucauccuccucucccucaucgccgucggccuccuccucuacugcaaggcccgcugaggacuagucccuguucccagagcccacuuuuuuuucuuuuuuugaaauaaaauagccugucuuucagaucuaaaaaaaaaaaaaaaaaaaaaaaaaaaaaaaaaaaaaaaaaaaaaaaaaaaaaaaaaaaaaaaaugcaucccccccccccccccccccccccccccccccaaaggcucuuuucagagccaccagaauu

SEQ ID NO: 2779 - RNA, 1867 nt, Artificial Sequence
  mRNA product Design a-4 comprising derived and/or modified sequence from HRSV(A2)__F-del_DSCav1_mut2 (opt3)
gggagacuccugucgggcggaaguaggaggaguagaguuuaaaaacaguacucuuuuuccgguucgggacguaguugaagcaacgacaagccggauaaccgcucuugagacaggaagcuuaccauggagcugcucauccuuaaggccaacgcuauuaccacaauacugacugcagugacguucugcuuugccagcggccagaauaucaccgaagaguucuaccaauccacauguucugcggucucaaaaggguauuugggagcuuuaagaacugguugguacaccaguguuauuacaaucgaacugagcaacauuaaggagaauaaaugcaacggcaccgacgccaaggugaaacuaaucaagcaggaacucgauaaguauaaaaaugcaguaacugaccugcagcuucugaugcaguccacacccgccaccgggucuggaucggcuauauguucaggcguggcagucugcaagguguugcaccucgagggugagguuaacaaaaucaagagcgcccugcugaguacgaauaaagcuguggucucccucucuaacggggugagcguauuaacuuuuaagguucuggaucuuaagaauuacauugacaaacaauugcugccuauccuaaacaagcaguccuguucaauuccaaauaucgaaaccgugauagaguuccagcagaaaaacaauaggcuccuggaaauuacacgggaguuuagugucaacgccggagugacuaccccggugagcacauauaugcuuaccaauucugagcuguugucccucaucaacgauaugcccauuacgaacgaccaaaagaaacugaugucaaauaacguccagaucguucgccagcagagcuacaguaucaugugcauuauaaaggaagagguguuagcguauguagugcaacugccucucuacggcgucaucgauacuccauguuggaaacuucauacaucuccccugugcaccacuaauacaaaggaaggcuccaacauuuguuugacccgaacggaccgugggugguacugcgauaaugcaggaagcgugucguucuuuccucaggccgagaccuguaagguucagucuaacagaguguucugcgacacaaugaacucccuaacucugccaucagaagucaaucucugcaauguggauaucuuuaaccccaaauaugacuguaagauaaugaccaguaaaacagauguaagcuccucuguuauuacuagccugggugcuaucgugucaugcuacggcaagaccaaauguacagccaguaauaagaacagggggaucauuaagaccuucuccaauggaugcgacuaugucagcaacaaaggcguggacacugucucuguggguaauacgcuuuacuguguuaacaagcaagaggggcagucacuguaugugaaaggagagccuaucauuaacuuuuacgauccauugguauucccgagugacgaauuugaugcaagcauaucccaggucaaugagaagaucaaccagucucucgcuuucauucggaaaucggacgaacuguuacacaaugugaacgccggcaagagcacaaccaauaucaugaucacuaccauuauaaucguuauuaucgugauucugcuaucccucaucgcggucggccugcuuuuguauugcaaggcccgcugaggacuagucccuguucccagagcccacuuuuuuuucuuuuuuugaaauaaaauagccugucuuucagaucuaaaaaaaaaaaaaaaaaaaaaaaaaaaaaaaaaaaaaaaaaaaaaaaaaaaaaaaaaaaaaaaaugcaucccccccccccccccccccccccccccccccaaaggcucuuuucagagccaccagaauu

SEQ ID NO: 2780 - RNA, 1867 nt, Artificial Sequence
  mRNA product Design a-4 comprising derived and/or modified sequence from HRSV(A2)__F-del_DSCav1_mut2 (opt4)
gggagacuccugucgggcggaaguaggaggaguagaguuuaaaaacaguacucuuuuuccgguucgggacguaguugaagcaacgacaagccggauaaccgcucuugagacaggaagcuuaccauggagcugcugauccugaaggccaacgccaucaccaccauccugaccgccgugaccuucugcuucgccagcggccagaacaucaccgaggaguucuaccagagcaccugcagcgccgugagcaagggcuaccugggcgcccugagaaccggcugguacaccagcgugaucaccaucgagcugagcaacaucaaggagaacaagugcaacggcaccgacgccaaggugaagcugaucaagcaggagcuggacaaguacaagaacgccgugaccgaccugcagcugcugaugcagagcacccccgccaccggcagcggcagcgccaucugcagcggcguggccgugugcaaggugcugcaccuggagggcgaggugaacaagaucaagagcgcccugcugagcaccaacaaggccguggugagccugagcaacggcgugagcgugcugaccuucaaggugcuggaccugaagaacuacaucgacaagcagcugcugcccauccugaacaagcagagcugcagcauccccaacaucgagaccgugaucgaguuccagcagaagaacaacagacugcuggagaucaccagagaguucagcgugaacgccggcgugaccacccccgugagcaccuacaugcugaccaacagcgagcugcugagccugaucaacgacaugcccaucaccaacgaccagaagaagcugaugagcaacaacgugcagaucgugagacagcagagcuacagcaucaugugcaucaucaaggaggaggugcuggccuacguggugcagcugccccuguacggcgugaucgacacccccugcuggaagcugcacaccagcccccugugcaccaccaacaccaaggagggcagcaacaucugccugaccagaaccgacagaggcugguacugcgacaacgccggcagcgugagcuucuucccccaggccgagaccugcaaggugcagagcaacagaguguucugcgacaccaugaacagccugacccugcccagcgaggugaaccugugcaacguggacaucuucaaccccaaguacgacugcaagaucaugaccagcaagaccgacgugagcagcagcgugaucaccagccugggcgccaucgugagcugcuacggcaagaccaagugcaccgccagcaacaagaacagaggcaucaucaagaccuucagcaacggcugcgacuacgugagcaacaagggcguggacaccgugagcgugggcaacacccuguacugcgugaacaagcaggagggccagagccuguacgugaagggcgagcccaucaucaacuucuacgacccccugguguuccccagcgacgaguucgacgccagcaucagccaggugaacgagaagaucaaccagagccuggccuucaucagaaagagcgacgagcugcugcacaacgugaacgccggcaagagcaccaccaacaucaugaucaccaccaucaucaucgugaucaucgugauccugcugagccugaucgccgugggccugcugcuguacugcaaggccagaugaggacuagucccuguucccagagcccacuuuuuuuucuuuuuuugaaauaaaauagccugucuuucagaucuaaaaaaaaaaaaaaaaaaaaaaaaaaaaaaaaaaaaaaaaaaaaaaaaaaaaaaaaaaaaaaaaugcaucccccccccccccccccccccccccccccccaaaggcucuuuucagagccaccagaauu

SEQ ID NO: 2781 - RNA, 1867 nt, Artificial Sequence
  mRNA product Design a-4 comprising derived and/or modified sequence from HRSV(A2)__F-del_DSCav1_mut2 (opt5)
gggagacuccugucgggcggaaguaggaggaguagaguuuaaaaacaguacucuuuuuccgguucgggacguaguugaagcaacgacaagccggauaaccgcucuugagacaggaagcuuaccauggagcugcucauccugaaggccaacgcuauuaccacaauccuuacggccgugaccuucugcuuugcgagcggccagaauauuacagaagaguucuaccaauccaccuguucugcugucagcaaaggguaucugggagcccucagaacaggcugguacaccuccguuaucacaauugaacugucuaacaucaaggagaauaaaugcaacgggaccgacgccaaggugaaacuuaucaagcaggaacuggauaaguauaaaaaugcugugacggaccuccagcugcugaugcagagcacccccgccacaggauccggcucugcuauuuguagcggggucgccgugugcaagguucuccaccuggagggagaggugaacaaaaucaaguccgcgcuucugagcaccaauaaagccgucgugucucucuccaacggcguuagcgugcugacauuuaagguccuugaucugaagaauuacauugacaaacaacuccugccuauccugaacaagcagucuuguuccauuccgaauaucgaaaccgugauugaguuccagcagaaaaacaaucggcuccuggaaaucacgcgcgaguuuagcgugaacgcuggcgucacaacccccguuucuacauauaugcuuaccaauuccgagcugcucagccugaucaacgauaugccuauuaccaacgaccaaaagaaacuuauguccaauaacgugcagaucgugagacagcagucuuacagcauuaugugcaucauuaaggaagagguccuggccuaugugguucaacucccccuguacggggugaucgauacaccuuguuggaaacugcauacgagcccccucugcaccacaaauaccaaggaaggauccaacaucugucugacacggaccgaccgcggcugguacugcgauaaugcugggucugucuccuucuuuccucaggccgagacguguaaggugcagagcaacagaguuuucugcgacacaaugaacucucuuacccugccgagcgaagugaaucucugcaaugucgauauuuuuaaccccaaauaugacuguaagaucaugaccuccaaaacagaugugucuagcuccgucauuaccagccugggagcgaucgugucuugcuacggcaagacaaaauguacggccuccaauaagaaccgggggauuaucaagaccuucagcaauggaugcgacuauguuucuaacaaaggcguggacacagucuccgugggcaauacccuuuacuguguuaacaagcaagaggggcagagccuguaugugaaaggagagccuaucauuaacuuuuacgauccccucgucuucccuuccgacgaauuugaugcuucuaucagccaggugaaugagaagauuaaccagucccuggccuucauccgcaaaucugacgaacugcuccacaaugugaacgcuggcaagagcacaaccaauauuaugaucacgaccauuaucaucguuauuaucgucauucugcuuucccugaucgccguggggcuccugcuguauugcaaggccagaugaggacuagucccuguucccagagcccacuuuuuuuucuuuuuuugaaauaaaauagccugucuuucagaucuaaaaaaaaaaaaaaaaaaaaaaaaaaaaaaaaaaaaaaaaaaaaaaaaaaaaaaaaaaaaaaaaugcaucccccccccccccccccccccccccccccccaaaggcucuuuucagagccaccagaauu

SEQ ID NO: 2782 - RNA, 1867 nt, Artificial Sequence
  mRNA product Design a-4 comprising derived and/or modified sequence from HRSV(A2)__F-del_DSCav1_mut2 (opt6)
gggagacuccugucgggcggaaguaggaggaguagaguuuaaaaacaguacucuuuuuccgguucgggacguaguugaagcaacgacaagccggauaaccgcucuugagacaggaagcuuaccauggaacuccuaauacuuaaagccaaugcaauaaccacaauacuaacagcaguaacauucugcuuugcaucaggacaaaacauaacagaagaauuuuaccaaucaacauguucagcaguaagcaaaggauaccuaggagccuuacgcacagguugguacacuuccguaauaacaauagaacucucaaauauaaaagaaaacaaaugcaacggaaccgaugcaaaaguaaaacuaauaaaacaagaauuagacaaauacaaaaacgcaguaacagaccuacaauuacuuaugcaaucaacacccgcaacaggauccggcucagcaaucuguucaggaguagcaguaugcaaaguucuccaccuagaaggcgaaguaaacaaaauaaaaucagcccuauuaucuaccaauaaagcaguaguaucacuaucaaauggaguaucuguccuaaccuucaaaguacuugaccuaaaaaauuacaucgacaaacaauuacuaccaauacuuaacaaacaaucauguucaauaccaaacauugaaacaguaauagaauuucaacaaaaaaauaacagauuauuagaaauaacccgcgaauuuucaguuaacgcaggaguaacaacaccaguauccacauacauguuaacaaauucagaacucuuaucacuuauaaacgacaugcccauaacaaacgaccaaaaaaaacucaugucuaacaauguucaaauaguucgacaacaaucauacuccauaaugugcauaauaaaagaagaaguucuagcauauguuguacaacucccacucuaugguguuauagacacaccaugcuggaaacuacauacaagccccuuaugcacuacaaacacaaaagaaggcucuaauauaugucuaacccgcacagacagaggcugguauugcgauaacgcagguucaguaucauucuuuccacaagcagaaacuugcaaaguccaauccaauagagucuucugcgacacuaugaacucacucacacucccaucugaagucaauuuauguaacgucgauaucuucaacccaaaauacgacugcaaaauaaugaccucaaaaacagacguaagcucaucagucauaacuucucuaggcgcaaucgucucauguuacggcaaaacaaaauguaccgcaucaaacaaaaaucgagguauaauaaaaaccuuuucuaacggcugcgacuacguaucaaacaaaggaguagauacuguaagugucggaaacacauuauacugcgucaacaaacaagaaggacaaucccuauauguuaaaggcgaaccuaucauuaauuucuacgacccacucgucuuuccauccgacgaauuugacgcaucaauuucccaaguaaaugaaaaaauaaaccaaucccuugcauucauaagaaaaucagaugaacuauuacacaacguaaacgcaggcaaaucaacaacaaauauaaugaucacaacaauaauaaucguaauaauaguaauccuacucucacuaauagcaguaggcuuacuauuauauugcaaagccagauaaggacuagucccuguucccagagcccacuuuuuuuucuuuuuuugaaauaaaauagccugucuuucagaucuaaaaaaaaaaaaaaaaaaaaaaaaaaaaaaaaaaaaaaaaaaaaaaaaaaaaaaaaaaaaaaaaugcaucccccccccccccccccccccccccccccccaaaggcucuuuucagagccaccagaauu

SEQ ID NO: 2783 - RNA, 1867 nt, Artificial Sequence
  mRNA product Design a-4 comprising derived and/or modified sequence from HRSV(A2)__F-del_DSCav1_mut2 (opt11)
gggagacuccugucgggcggaaguaggaggaguagaguuuaaaaacaguacucuuuuuccgguucgggacguaguugaagcaacgacaagccggauaaccgcucuugagacaggaagcuuaccauggaacuucuuauccuaaaagcgaacgccauaaccacaauccuaacagcagucaccuucuguuucgccucaggacaaaacaucaccgaggaauuuuaccaauccacauguagcgcugucucaaaaggcuaccucggcgcccuccgaaccggcugguacacauccguaauaacgaucgaacucuccaacauaaaagaaaauaaaugcaacggcaccgacgccaaagucaaacuuaucaaacaagaacuagacaaauacaaaaacgccgucaccgaccuccagcuccucaugcaauccaccccagcaacaggcuccggaagcgcaaucugcucaggcgucgccguaugcaaaguacuccaccucgaaggagaagucaacaaaaucaaauccgcccuccuauccacaaacaaagcaguugucucacucuccaacgggguaagcguacugaccuucaaaguccuagaccucaaaaacuacaucgauaaacaacuccuuccaauccucaacaaacaaucaugcucuauccccaacaucgaaaccguaaucgaauuucaacaaaaaaacaaccgccuacuugaaaucacacgcgaauuuagcgucaacgcaggaguaacaacacccguguccacauauaugcucacgaacagcgaacuacuaucccugauuaacgacaugcccaucaccaacgaccaaaaaaaacuaaugagcaacaacguacaaaucguccgccaacaaagcuacucuauaaugugcaucaucaaggaagaaguccuagccuacgucguccaauuaccacucuacggcgucaucgacacacccugcuggaaacuccauacauccccccucugcaccaccaacaccaaagaaggguccaacauaugccucacucgcacagaccgcggcugguacugcgacaacgcuggcagcgucagcuucuucccccaggccgaaaccugcaaaguccaauccaacagagucuucugcgacaccaugaacucgcucacccuccccuccgaggucaaccucugcaacgucgacauauucaaccccaaauacgacugcaaaaucaugaccuccaaaaccgacgucagcucaucagucaucacaucccucggggccaucgucuccugcuacggcaaaaccaagugcaccgccucaaacaaaaaccgcggcauuaucaaaacauucuccaacggcugcgacuacgucuccaacaaaggcgucgacacagucuccgucgguaacacccucuacugcguaaauaaacaagaaggccaaucccucuacgucaaaggcgaacccaucaucaacuucuacgacccucucgucuuccccuccgacgaauuugacgccucaaucagccaaguuaacgaaaaaaucaaccaaucacucgccuucauccgcaaauccgacgaacuccuccacaacguuaacgccggcaaaucuaccacgaacaucaugaucaccaccauaaucaucguaauuaucguaauacuccuaucccucauagcaguaggccuccuacucuacugcaaagcccguuaaggacuagucccuguucccagagcccacuuuuuuuucuuuuuuugaaauaaaauagccugucuuucagaucuaaaaaaaaaaaaaaaaaaaaaaaaaaaaaaaaaaaaaaaaaaaaaaaaaaaaaaaaaaaaaaaaugcaucccccccccccccccccccccccccccccccaaaggcucuuuucagagccaccagaauu

SEQ ID NO: 2784 - RNA, 1813 nt, Artificial Sequence
  mRNA product Design a-5 comprising derived and/or modified sequence from HRSV(A2)__F-del_DSCav1_mut2 (opt1)
gggagacuuucccauucuguagcagaauuugguguugccuguggucuuggucccgcggagaagcuuaccauggagcugcucauccugaaggccaacgccaucaccaccauccugacggcggugaccuucugcuucgccagcggccagaacaucaccgaggaguucuaccaguccacgugcagcgccgucuccaagggguaccucggcgcccugcggaccggcugguacaccuccgugaucaccaucgagcugagcaacaucaaggagaacaagugcaacgggaccgacgccaaggugaagcucaucaagcaggagcuggacaaguacaagaacgcggucacggaccugcagcuccugaugcaguccaccccggcaaccggcuccggcuccgccaucugcagcggcgucgccgugugcaaggugcugcaccucgagggggaggucaacaagaucaagagcgcccugcuguccaccaacaaggccguggugagccucuccaacggcgucagcgugcugaccuucaaggugcuggaccucaagaacuacaucgacaagcagcugcugcccauccugaacaagcagagcugcuccauccccaacaucgagacggugaucgaguuccagcagaagaacaaccggcuccuggagaucacccgcgaguucagcgugaacgccggggucaccacccccguguccacguacaugcugaccaacagcgagcuccugucccugaucaacgacaugccgaucaccaacgaccagaagaagcucaugagcaacaacgugcagaucguccggcagcaguccuacagcaucaugugcaucaucaaggaggaggugcuggcguacgugguccagcugccccucuacggcgugaucgacacccccugcuggaagcugcacacgagcccccugugcaccaccaacaccaaggagggguccaacaucugccucacgcgcaccgaccggggcugguacugcgacaacgccggcagcgucuccuucuucccgcaggccgagaccugcaaggugcagagcaaccgcguguucugcgacaccaugaacucccugacgcugcccagcgagguaaaccucugcaacgucgacaucuucaaccccaaguacgacugcaagaucaugaccuccaagaccgacgugagcuccagcgugaucaccucccugggggccaucgucagcugcuacggcaagacgaagugcaccgccagcaacaagaaccgggggaucaucaagaccuucuccaacggcugcgacuacgugagcaacaagggcguggacaccguguccgucgggaacacccuguacugcgugaacaagcaggagggccagagccucuacgugaagggggagcccaucaucaacuucuacgacccgcuggucuuccccuccgacgaguucgacgcgagcaucucccaggugaacgagaagaucaaccagagccuggccuucauccgcaaguccgacgagcugcuccacaacgugaacgccggcaagagcacgaccaacaucaugaucaccaccaucaucaucgucaucaucgugauccugcugucccucaucgccguggggcugcugcucuacugcaaggcccggugaggacuagucccuguucccagagcccacuuuuuuuucuuuuuuugaaauaaaauagccugucuuucagaucuaaaaaaaaaaaaaaaaaaaaaaaaaaaaaaaaaaaaaaaaaaaaaaaaaaaaaaaaaaaaaaaaugcaucccccccccccccccccccccccccccccccaaaggcucuuuucagagccaccagaauu

SEQ ID NO: 2785 - RNA, 1813 nt, Artificial Sequence
  mRNA product Design a-5 comprising derived and/or modified sequence from HRSV(A2)__F-del_DSCav1_mut2 (opt1)
gggagacuuucccauucuguagcagaauuugguguugccuguggucuuggucccgcggagaagcuuaccauggagcugcucauccugaaggccaacgccaucaccaccauccugacggcggugaccuucugcuucgccagcggccagaacaucaccgaggaguucuaccaguccacgugcagcgccgucuccaagggguaccucggcgcccugcgcaccgggugguacaccagcgugaucaccaucgagcuguccaacaucaaggagaacaagugcaacggcaccgacgccaaggugaagcucaucaagcaggagcuggacaaguacaagaacgcggucacggaccugcagcuccugaugcagagcacccccgccaccggguccggcagcgccaucugcuccggcguggccgugugcaagguccugcaccucgagggggaggugaacaagaucaagagcgcgcugcuguccaccaacaaggccguggucagccucuccaacggcgugagcgugcugacguucaagguccuggaccucaagaacuacaucgacaagcagcugcugccgauccucaacaagcaguccugcagcauccccaacaucgagaccgugaucgaguuccagcagaagaacaaccggcugcuggagaucacccgcgaguucuccgugaacgccggggucaccacgcccgugagcaccuacaugcucaccaacuccgagcugcugagccucaucaacgacaugcccaucaccaacgaccagaagaagcugaugagcaacaacgugcagaucguccggcagcaguccuacagcaucaugugcaucaucaaggaggaggugcuggccuacgugguccagcucccgcuguacggcgugaucgacacgcccugcuggaagcugcacaccagcccccucugcaccaccaacacgaaggagggguccaacaucugccugacccgcaccgaccggggcugguacugcgacaacgccggcuccgugagcuucuucccccaggcggagaccugcaagguccaguccaaccgcguguucugcgacacgaugaacagccugacccucccguccgaggucaaccugugcaacguggacaucuucaaccccaaguacgacugcaagaucaugaccagcaagaccgacguguccagcuccgucaucacgagccugggggccaucguguccugcuacggcaagaccaagugcaccgccagcaacaagaaccgggggaucaucaagaccuucuccaacggcugcgacuacgugagcaacaagggcgucgacacgguguccguggggaacacccucuacugcgucaacaagcaggagggccagagccuguacgugaagggggagcccaucaucaacuucuacgacccccugguguucccgagcgacgaguucgacgccuccaucagccaggucaacgagaagaucaaccagucccucgccuucauccgcaagagcgacgagcugcugcacaacgugaacgcgggcaaguccaccaccaacaucaugaucaccacgaucaucaucgugaucaucgucauccuccugagccugaucgccguggggcuccugcuguacugcaaggcccggugaggacuagucccuguucccagagcccacuuuuuuuucuuuuuuugaaauaaaauagccugucuuucagaucuaaaaaaaaaaaaaaaaaaaaaaaaaaaaaaaaaaaaaaaaaaaaaaaaaaaaaaaaaaaaaaaaugcaucccccccccccccccccccccccccccccccaaaggcucuuuucagagccaccagaauu

SEQ ID NO: 2786 - RNA, 1813 nt, Artificial Sequence
  mRNA product Design a-5 comprising derived and/or modified sequence from HRSV(A2)__F-del_DSCav1_mut2 (opt2)
gggagacuuucccauucuguagcagaauuugguguugccuguggucuuggucccgcggagaagcuuaccauggagcuccucauccucaaggccaacgccaucaccaccauccucaccgccgucaccuucugcuucgccuccggccagaacaucaccgaggaguucuaccaguccaccugcuccgccgucuccaagggcuaccucggcgcccuccgcaccggcugguacaccuccgucaucaccaucgagcucuccaacaucaaggagaacaagugcaacggcaccgacgccaaggucaagcucaucaagcaggagcucgacaaguacaagaacgccgucaccgaccuccagcuccucaugcaguccacccccgccaccggcuccggcuccgccaucugcuccggcgucgccgucugcaagguccuccaccucgagggcgaggucaacaagaucaaguccgcccuccucuccaccaacaaggccgucgucucccucuccaacggcgucuccguccucaccuucaagguccucgaccucaagaacuacaucgacaagcagcuccuccccauccucaacaagcaguccugcuccauccccaacaucgagaccgucaucgaguuccagcagaagaacaaccgccuccucgagaucacccgcgaguucuccgucaacgccggcgucaccacccccgucuccaccuacaugcucaccaacuccgagcuccucucccucaucaacgacaugcccaucaccaacgaccagaagaagcucauguccaacaacguccagaucguccgccagcaguccuacuccaucaugugcaucaucaaggaggagguccucgccuacgucguccagcucccccucuacggcgucaucgacacccccugcuggaagcuccacaccuccccccucugcaccaccaacaccaaggagggcuccaacaucugccucacccgcaccgaccgcggcugguacugcgacaacgccggcuccgucuccuucuucccccaggccgagaccugcaagguccaguccaaccgcgucuucugcgacaccaugaacucccucacccuccccuccgaggucaaccucugcaacgucgacaucuucaaccccaaguacgacugcaagaucaugaccuccaagaccgacgucuccuccuccgucaucaccucccucggcgccaucgucuccugcuacggcaagaccaagugcaccgccuccaacaagaaccgcggcaucaucaagaccuucuccaacggcugcgacuacgucuccaacaagggcgucgacaccgucuccgucggcaacacccucuacugcgucaacaagcaggagggccagucccucuacgucaagggcgagcccaucaucaacuucuacgacccccucgucuuccccuccgacgaguucgacgccuccaucucccaggucaacgagaagaucaaccagucccucgccuucauccgcaaguccgacgagcuccuccacaacgucaacgccggcaaguccaccaccaacaucaugaucaccaccaucaucaucgucaucaucgucauccuccucucccucaucgccgucggccuccuccucuacugcaaggcccgcugaggacuagucccuguucccagagcccacuuuuuuuucuuuuuuugaaauaaaauagccugucuuucagaucuaaaaaaaaaaaaaaaaaaaaaaaaaaaaaaaaaaaaaaaaaaaaaaaaaaaaaaaaaaaaaaaaugcaucccccccccccccccccccccccccccccccaaaggcucuuuucagagccaccagaauu

SEQ ID NO: 2787 - RNA, 1813 nt, Artificial Sequence
  mRNA product Design a-5 comprising derived and/or modified sequence from HRSV(A2)__F-del_DSCav1_mut2 (opt3)
gggagacuuucccauucuguagcagaauuugguguugccuguggucuuggucccgcggagaagcuuaccauggagcugcucauccuuaaggccaacgcuauuaccacaauacugacugcagugacguucugcuuugccagcggccagaauaucaccgaagaguucuaccaauccacauguucugcggucucaaaaggguauuugggagcuuuaagaacugguugguacaccaguguuauuacaaucgaacugagcaacauuaaggagaauaaaugcaacggcaccgacgccaaggugaaacuaaucaagcaggaacucgauaaguauaaaaaugcaguaacugaccugcagcuucugaugcaguccacacccgccaccgggucuggaucggcuauauguucaggcguggcagucugcaagguguugcaccucgagggugagguuaacaaaaucaagagcgcccugcugaguacgaauaaagcuguggucucccucucuaacggggugagcguauuaacuuuuaagguucuggaucuuaagaauuacauugacaaacaauugcugccuauccuaaacaagcaguccuguucaauuccaaauaucgaaaccgugauagaguuccagcagaaaaacaauaggcuccuggaaauuacacgggaguuuagugucaacgccggagugacuaccccggugagcacauauaugcuuaccaauucugagcuguugucccucaucaacgauaugcccauuacgaacgaccaaaagaaacugaugucaaauaacguccagaucguucgccagcagagcuacaguaucaugugcauuauaaaggaagagguguuagcguauguagugcaacugccucucuacggcgucaucgauacuccauguuggaaacuucauacaucuccccugugcaccacuaauacaaaggaaggcuccaacauuuguuugacccgaacggaccgugggugguacugcgauaaugcaggaagcgugucguucuuuccucaggccgagaccuguaagguucagucuaacagaguguucugcgacacaaugaacucccuaacucugccaucagaagucaaucucugcaauguggauaucuuuaaccccaaauaugacuguaagauaaugaccaguaaaacagauguaagcuccucuguuauuacuagccugggugcuaucgugucaugcuacggcaagaccaaauguacagccaguaauaagaacagggggaucauuaagaccuucuccaauggaugcgacuaugucagcaacaaaggcguggacacugucucuguggguaauacgcuuuacuguguuaacaagcaagaggggcagucacuguaugugaaaggagagccuaucauuaacuuuuacgauccauugguauucccgagugacgaauuugaugcaagcauaucccaggucaaugagaagaucaaccagucucucgcuuucauucggaaaucggacgaacuguuacacaaugugaacgccggcaagagcacaaccaauaucaugaucacuaccauuauaaucguuauuaucgugauucugcuaucccucaucgcggucggccugcuuuuguauugcaaggcccgcugaggacuagucccuguucccagagcccacuuuuuuuucuuuuuuugaaauaaaauagccugucuuucagaucuaaaaaaaaaaaaaaaaaaaaaaaaaaaaaaaaaaaaaaaaaaaaaaaaaaaaaaaaaaaaaaaaugcaucccccccccccccccccccccccccccccccaaaggcucuuuucagagccaccagaauu

SEQ ID NO: 2788 - RNA, 1813 nt, Artificial Sequence
  mRNA product Design a-5 comprising derived and/or modified sequence from HRSV(A2)__F-del_DSCav1_mut2 (opt4)
gggagacuuucccauucuguagcagaauuugguguugccuguggucuuggucccgcggagaagcuuaccauggagcugcugauccugaaggccaacgccaucaccaccauccugaccgccgugaccuucugcuucgccagcggccagaacaucaccgaggaguucuaccagagcaccugcagcgccgugagcaagggcuaccugggcgcccugagaaccggcugguacaccagcgugaucaccaucgagcugagcaacaucaaggagaacaagugcaacggcaccgacgccaaggugaagcugaucaagcaggagcuggacaaguacaagaacgccgugaccgaccugcagcugcugaugcagagcacccccgccaccggcagcggcagcgccaucugcagcggcguggccgugugcaaggugcugcaccuggagggcgaggugaacaagaucaagagcgcccugcugagcaccaacaaggccguggugagccugagcaacggcgugagcgugcugaccuucaaggugcuggaccugaagaacuacaucgacaagcagcugcugcccauccugaacaagcagagcugcagcauccccaacaucgagaccgugaucgaguuccagcagaagaacaacagacugcuggagaucaccagagaguucagcgugaacgccggcgugaccacccccgugagcaccuacaugcugaccaacagcgagcugcugagccugaucaacgacaugcccaucaccaacgaccagaagaagcugaugagcaacaacgugcagaucgugagacagcagagcuacagcaucaugugcaucaucaaggaggaggugcuggccuacguggugcagcugccccuguacggcgugaucgacacccccugcuggaagcugcacaccagcccccugugcaccaccaacaccaaggagggcagcaacaucugccugaccagaaccgacagaggcugguacugcgacaacgccggcagcgugagcuucuucccccaggccgagaccugcaaggugcagagcaacagaguguucugcgacaccaugaacagccugacccugcccagcgaggugaaccugugcaacguggacaucuucaaccccaaguacgacugcaagaucaugaccagcaagaccgacgugagcagcagcgugaucaccagccugggcgccaucgugagcugcuacggcaagaccaagugcaccgccagcaacaagaacagaggcaucaucaagaccuucagcaacggcugcgacuacgugagcaacaagggcguggacaccgugagcgugggcaacacccuguacugcgugaacaagcaggagggccagagccuguacgugaagggcgagcccaucaucaacuucuacgacccccugguguuccccagcgacgaguucgacgccagcaucagccaggugaacgagaagaucaaccagagccuggccuucaucagaaagagcgacgagcugcugcacaacgugaacgccggcaagagcaccaccaacaucaugaucaccaccaucaucaucgugaucaucgugauccugcugagccugaucgccgugggccugcugcuguacugcaaggccagaugaggacuagucccuguucccagagcccacuuuuuuuucuuuuuuugaaauaaaauagccugucuuucagaucuaaaaaaaaaaaaaaaaaaaaaaaaaaaaaaaaaaaaaaaaaaaaaaaaaaaaaaaaaaaaaaaaugcaucccccccccccccccccccccccccccccccaaaggcucuuuucagagccaccagaauu

SEQ ID NO: 2789 - RNA, 1813 nt, Artificial Sequence
  mRNA product Design a-5 comprising derived and/or modified sequence from HRSV(A2)__F-del_DSCav1_mut2 (opt5)
gggagacuuucccauucuguagcagaauuugguguugccuguggucuuggucccgcggagaagcuuaccauggagcugcucauccugaaggccaacgcuauuaccacaauccuuacggccgugaccuucugcuuugcgagcggccagaauauuacagaagaguucuaccaauccaccuguucugcugucagcaaaggguaucugggagcccucagaacaggcugguacaccuccguuaucacaauugaacugucuaacaucaaggagaauaaaugcaacgggaccgacgccaaggugaaacuuaucaagcaggaacuggauaaguauaaaaaugcugugacggaccuccagcugcugaugcagagcacccccgccacaggauccggcucugcuauuuguagcggggucgccgugugcaagguucuccaccuggagggagaggugaacaaaaucaaguccgcgcuucugagcaccaauaaagccgucgugucucucuccaacggcguuagcgugcugacauuuaagguccuugaucugaagaauuacauugacaaacaacuccugccuauccugaacaagcagucuuguuccauuccgaauaucgaaaccgugauugaguuccagcagaaaaacaaucggcuccuggaaaucacgcgcgaguuuagcgugaacgcuggcgucacaacccccguuucuacauauaugcuuaccaauuccgagcugcucagccugaucaacgauaugccuauuaccaacgaccaaaagaaacuuauguccaauaacgugcagaucgugagacagcagucuuacagcauuaugugcaucauuaaggaagagguccuggccuaugugguucaacucccccuguacggggugaucgauacaccuuguuggaaacugcauacgagcccccucugcaccacaaauaccaaggaaggauccaacaucugucugacacggaccgaccgcggcugguacugcgauaaugcugggucugucuccuucuuuccucaggccgagacguguaaggugcagagcaacagaguuuucugcgacacaaugaacucucuuacccugccgagcgaagugaaucucugcaaugucgauauuuuuaaccccaaauaugacuguaagaucaugaccuccaaaacagaugugucuagcuccgucauuaccagccugggagcgaucgugucuugcuacggcaagacaaaauguacggccuccaauaagaaccgggggauuaucaagaccuucagcaauggaugcgacuauguuucuaacaaaggcguggacacagucuccgugggcaauacccuuuacuguguuaacaagcaagaggggcagagccuguaugugaaaggagagccuaucauuaacuuuuacgauccccucgucuucccuuccgacgaauuugaugcuucuaucagccaggugaaugagaagauuaaccagucccuggccuucauccgcaaaucugacgaacugcuccacaaugugaacgcuggcaagagcacaaccaauauuaugaucacgaccauuaucaucguuauuaucgucauucugcuuucccugaucgccguggggcuccugcuguauugcaaggccagaugaggacuagucccuguucccagagcccacuuuuuuuucuuuuuuugaaauaaaauagccugucuuucagaucuaaaaaaaaaaaaaaaaaaaaaaaaaaaaaaaaaaaaaaaaaaaaaaaaaaaaaaaaaaaaaaaaugcaucccccccccccccccccccccccccccccccaaaggcucuuuucagagccaccagaauu

SEQ ID NO: 2790 - RNA, 1813 nt, Artificial Sequence
  mRNA product Design a-5 comprising derived and/or modified sequence from HRSV(A2)__F-del_DSCav1_mut2 (opt6)
gggagacuuucccauucuguagcagaauuugguguugccuguggucuuggucccgcggagaagcuuaccauggaacuccuaauacuuaaagccaaugcaauaaccacaauacuaacagcaguaacauucugcuuugcaucaggacaaaacauaacagaagaauuuuaccaaucaacauguucagcaguaagcaaaggauaccuaggagccuuacgcacagguugguacacuuccguaauaacaauagaacucucaaauauaaaagaaaacaaaugcaacggaaccgaugcaaaaguaaaacuaauaaaacaagaauuagacaaauacaaaaacgcaguaacagaccuacaauuacuuaugcaaucaacacccgcaacaggauccggcucagcaaucuguucaggaguagcaguaugcaaaguucuccaccuagaaggcgaaguaaacaaaauaaaaucagcccuauuaucuaccaauaaagcaguaguaucacuaucaaauggaguaucuguccuaaccuucaaaguacuugaccuaaaaaauuacaucgacaaacaauuacuaccaauacuuaacaaacaaucauguucaauaccaaacauugaaacaguaauagaauuucaacaaaaaaauaacagauuauuagaaauaacccgcgaauuuucaguuaacgcaggaguaacaacaccaguauccacauacauguuaacaaauucagaacucuuaucacuuauaaacgacaugcccauaacaaacgaccaaaaaaaacucaugucuaacaauguucaaauaguucgacaacaaucauacuccauaaugugcauaauaaaagaagaaguucuagcauauguuguacaacucccacucuaugguguuauagacacaccaugcuggaaacuacauacaagccccuuaugcacuacaaacacaaaagaaggcucuaauauaugucuaacccgcacagacagaggcugguauugcgauaacgcagguucaguaucauucuuuccacaagcagaaacuugcaaaguccaauccaauagagucuucugcgacacuaugaacucacucacacucccaucugaagucaauuuauguaacgucgauaucuucaacccaaaauacgacugcaaaauaaugaccucaaaaacagacguaagcucaucagucauaacuucucuaggcgcaaucgucucauguuacggcaaaacaaaauguaccgcaucaaacaaaaaucgagguauaauaaaaaccuuuucuaacggcugcgacuacguaucaaacaaaggaguagauacuguaagugucggaaacacauuauacugcgucaacaaacaagaaggacaaucccuauauguuaaaggcgaaccuaucauuaauuucuacgacccacucgucuuuccauccgacgaauuugacgcaucaauuucccaaguaaaugaaaaaauaaaccaaucccuugcauucauaagaaaaucagaugaacuauuacacaacguaaacgcaggcaaaucaacaacaaauauaaugaucacaacaauaauaaucguaauaauaguaauccuacucucacuaauagcaguaggcuuacuauuauauugcaaagccagauaaggacuagucccuguucccagagcccacuuuuuuuucuuuuuuugaaauaaaauagccugucuuucagaucuaaaaaaaaaaaaaaaaaaaaaaaaaaaaaaaaaaaaaaaaaaaaaaaaaaaaaaaaaaaaaaaaugcaucccccccccccccccccccccccccccccccaaaggcucuuuucagagccaccagaauu

SEQ ID NO: 2791 - RNA, 1813 nt, Artificial Sequence
  mRNA product Design a-5 comprising derived and/or modified sequence from HRSV(A2)__F-del_DSCav1_mut2 (opt11)
gggagacuuucccauucuguagcagaauuugguguugccuguggucuuggucccgcggagaagcuuaccauggaacuucuuauccuaaaagcgaacgccauaaccacaauccuaacagcagucaccuucuguuucgccucaggacaaaacaucaccgaggaauuuuaccaauccacauguagcgcugucucaaaaggcuaccucggcgcccuccgaaccggcugguacacauccguaauaacgaucgaacucuccaacauaaaagaaaauaaaugcaacggcaccgacgccaaagucaaacuuaucaaacaagaacuagacaaauacaaaaacgccgucaccgaccuccagcuccucaugcaauccaccccagcaacaggcuccggaagcgcaaucugcucaggcgucgccguaugcaaaguacuccaccucgaaggagaagucaacaaaaucaaauccgcccuccuauccacaaacaaagcaguugucucacucuccaacgggguaagcguacugaccuucaaaguccuagaccucaaaaacuacaucgauaaacaacuccuuccaauccucaacaaacaaucaugcucuauccccaacaucgaaaccguaaucgaauuucaacaaaaaaacaaccgccuacuugaaaucacacgcgaauuuagcgucaacgcaggaguaacaacacccguguccacauauaugcucacgaacagcgaacuacuaucccugauuaacgacaugcccaucaccaacgaccaaaaaaaacuaaugagcaacaacguacaaaucguccgccaacaaagcuacucuauaaugugcaucaucaaggaagaaguccuagccuacgucguccaauuaccacucuacggcgucaucgacacacccugcuggaaacuccauacauccccccucugcaccaccaacaccaaagaaggguccaacauaugccucacucgcacagaccgcggcugguacugcgacaacgcuggcagcgucagcuucuucccccaggccgaaaccugcaaaguccaauccaacagagucuucugcgacaccaugaacucgcucacccuccccuccgaggucaaccucugcaacgucgacauauucaaccccaaauacgacugcaaaaucaugaccuccaaaaccgacgucagcucaucagucaucacaucccucggggccaucgucuccugcuacggcaaaaccaagugcaccgccucaaacaaaaaccgcggcauuaucaaaacauucuccaacggcugcgacuacgucuccaacaaaggcgucgacacagucuccgucgguaacacccucuacugcguaaauaaacaagaaggccaaucccucuacgucaaaggcgaacccaucaucaacuucuacgacccucucgucuuccccuccgacgaauuugacgccucaaucagccaaguuaacgaaaaaaucaaccaaucacucgccuucauccgcaaauccgacgaacuccuccacaacguuaacgccggcaaaucuaccacgaacaucaugaucaccaccauaaucaucguaauuaucguaauacuccuaucccucauagcaguaggccuccuacucuacugcaaagcccguuaaggacuagucccuguucccagagcccacuuuuuuuucuuuuuuugaaauaaaauagccugucuuucagaucuaaaaaaaaaaaaaaaaaaaaaaaaaaaaaaaaaaaaaaaaaaaaaaaaaaaaaaaaaaaaaaaaugcaucccccccccccccccccccccccccccccccaaaggcucuuuucagagccaccagaauu

SEQ ID NO: 2792 - RNA, 1994 nt, Artificial Sequence
  mRNA product Design b-1 comprising derived and/or modified sequence from HRSV(A2)__F-del_DSCav1_mut2 (opt1)
gggagacggagacggccugcaggaccugcucucucagcccucagccgaggccuacgccgagccgagugcgcagccgacgaccgggaggagccgcagccuucaacucugagguacugugauccgcgcugcccgccgggccgccccaguccgcugcugcggcaccuccuucccucgcgcccucuucgcucgccagcgccuucccugugagccugcgucaccgcggccgccaagcuuaccauggagcugcucauccugaaggccaacgccaucaccaccauccugacggcggugaccuucugcuucgccagcggccagaacaucaccgaggaguucuaccaguccacgugcagcgccgucuccaagggguaccucggcgcccugcggaccggcugguacaccuccgugaucaccaucgagcugagcaacaucaaggagaacaagugcaacgggaccgacgccaaggugaagcucaucaagcaggagcuggacaaguacaagaacgcggucacggaccugcagcuccugaugcaguccaccccggcaaccggcuccggcuccgccaucugcagcggcgucgccgugugcaaggugcugcaccucgagggggaggucaacaagaucaagagcgcccugcuguccaccaacaaggccguggugagccucuccaacggcgucagcgugcugaccuucaaggugcuggaccucaagaacuacaucgacaagcagcugcugcccauccugaacaagcagagcugcuccauccccaacaucgagacggugaucgaguuccagcagaagaacaaccggcuccuggagaucacccgcgaguucagcgugaacgccggggucaccacccccguguccacguacaugcugaccaacagcgagcuccugucccugaucaacgacaugccgaucaccaacgaccagaagaagcucaugagcaacaacgugcagaucguccggcagcaguccuacagcaucaugugcaucaucaaggaggaggugcuggcguacgugguccagcugccccucuacggcgugaucgacacccccugcuggaagcugcacacgagcccccugugcaccaccaacaccaaggagggguccaacaucugccucacgcgcaccgaccggggcugguacugcgacaacgccggcagcgucuccuucuucccgcaggccgagaccugcaaggugcagagcaaccgcguguucugcgacaccaugaacucccugacgcugcccagcgagguaaaccucugcaacgucgacaucuucaaccccaaguacgacugcaagaucaugaccuccaagaccgacgugagcuccagcgugaucaccucccugggggccaucgucagcugcuacggcaagacgaagugcaccgccagcaacaagaaccgggggaucaucaagaccuucuccaacggcugcgacuacgugagcaacaagggcguggacaccguguccgucgggaacacccuguacugcgugaacaagcaggagggccagagccucuacgugaagggggagcccaucaucaacuucuacgacccgcuggucuuccccuccgacgaguucgacgcgagcaucucccaggugaacgagaagaucaaccagagccuggccuucauccgcaaguccgacgagcugcuccacaacgugaacgccggcaagagcacgaccaacaucaugaucaccaccaucaucaucgucaucaucgugauccugcugucccucaucgccguggggcugcugcucuacugcaaggcccggugaggacuaguguccaccugucccuccugggcugcuggauugucucguuuuccugccaaauaaacaggaucagcgcuuuacagaucuaaaaaaaaaaaaaaaaaaaaaaaaaaaaaaaaaaaaaaaaaaaaaaaaaaaaaaaaaaaaaaaaugcaucccccccccccccccccccccccccccccccaaaggcucuuuucagagccaccagaauu

SEQ ID NO: 2793 - RNA, 1994 nt, Artificial Sequence
  mRNA product Design b-1 comprising derived and/or modified sequence from HRSV(A2)__F-del_DSCav1_mut2 (opt1)
gggagacggagacggccugcaggaccugcucucucagcccucagccgaggccuacgccgagccgagugcgcagccgacgaccgggaggagccgcagccuucaacucugagguacugugauccgcgcugcccgccgggccgccccaguccgcugcugcggcaccuccuucccucgcgcccucuucgcucgccagcgccuucccugugagccugcgucaccgcggccgccaagcuuaccauggagcugcucauccugaaggccaacgccaucaccaccauccugacggcggugaccuucugcuucgccagcggccagaacaucaccgaggaguucuaccaguccacgugcagcgccgucuccaagggguaccucggcgcccugcgcaccgggugguacaccagcgugaucaccaucgagcuguccaacaucaaggagaacaagugcaacggcaccgacgccaaggugaagcucaucaagcaggagcuggacaaguacaagaacgcggucacggaccugcagcuccugaugcagagcacccccgccaccggguccggcagcgccaucugcuccggcguggccgugugcaagguccugcaccucgagggggaggugaacaagaucaagagcgcgcugcuguccaccaacaaggccguggucagccucuccaacggcgugagcgugcugacguucaagguccuggaccucaagaacuacaucgacaagcagcugcugccgauccucaacaagcaguccugcagcauccccaacaucgagaccgugaucgaguuccagcagaagaacaaccggcugcuggagaucacccgcgaguucuccgugaacgccggggucaccacgcccgugagcaccuacaugcucaccaacuccgagcugcugagccucaucaacgacaugcccaucaccaacgaccagaagaagcugaugagcaacaacgugcagaucguccggcagcaguccuacagcaucaugugcaucaucaaggaggaggugcuggccuacgugguccagcucccgcuguacggcgugaucgacacgcccugcuggaagcugcacaccagcccccucugcaccaccaacacgaaggagggguccaacaucugccugacccgcaccgaccggggcugguacugcgacaacgccggcuccgugagcuucuucccccaggcggagaccugcaagguccaguccaaccgcguguucugcgacacgaugaacagccugacccucccguccgaggucaaccugugcaacguggacaucuucaaccccaaguacgacugcaagaucaugaccagcaagaccgacguguccagcuccgucaucacgagccugggggccaucguguccugcuacggcaagaccaagugcaccgccagcaacaagaaccgggggaucaucaagaccuucuccaacggcugcgacuacgugagcaacaagggcgucgacacgguguccguggggaacacccucuacugcgucaacaagcaggagggccagagccuguacgugaagggggagcccaucaucaacuucuacgacccccugguguucccgagcgacgaguucgacgccuccaucagccaggucaacgagaagaucaaccagucccucgccuucauccgcaagagcgacgagcugcugcacaacgugaacgcgggcaaguccaccaccaacaucaugaucaccacgaucaucaucgugaucaucgucauccuccugagccugaucgccguggggcuccugcuguacugcaaggcccggugaggacuaguguccaccugucccuccugggcugcuggauugucucguuuuccugccaaauaaacaggaucagcgcuuuacagaucuaaaaaaaaaaaaaaaaaaaaaaaaaaaaaaaaaaaaaaaaaaaaaaaaaaaaaaaaaaaaaaaaugcaucccccccccccccccccccccccccccccccaaaggcucuuuucagagccaccagaauu

SEQ ID NO: 2794 - RNA, 1994 nt, Artificial Sequence
  mRNA product Design b-1 comprising derived and/or modified sequence from HRSV(A2)__F-del_DSCav1_mut2 (opt2)
gggagacggagacggccugcaggaccugcucucucagcccucagccgaggccuacgccgagccgagugcgcagccgacgaccgggaggagccgcagccuucaacucugagguacugugauccgcgcugcccgccgggccgccccaguccgcugcugcggcaccuccuucccucgcgcccucuucgcucgccagcgccuucccugugagccugcgucaccgcggccgccaagcuuaccauggagcuccucauccucaaggccaacgccaucaccaccauccucaccgccgucaccuucugcuucgccuccggccagaacaucaccgaggaguucuaccaguccaccugcuccgccgucuccaagggcuaccucggcgcccuccgcaccggcugguacaccuccgucaucaccaucgagcucuccaacaucaaggagaacaagugcaacggcaccgacgccaaggucaagcucaucaagcaggagcucgacaaguacaagaacgccgucaccgaccuccagcuccucaugcaguccacccccgccaccggcuccggcuccgccaucugcuccggcgucgccgucugcaagguccuccaccucgagggcgaggucaacaagaucaaguccgcccuccucuccaccaacaaggccgucgucucccucuccaacggcgucuccguccucaccuucaagguccucgaccucaagaacuacaucgacaagcagcuccuccccauccucaacaagcaguccugcuccauccccaacaucgagaccgucaucgaguuccagcagaagaacaaccgccuccucgagaucacccgcgaguucuccgucaacgccggcgucaccacccccgucuccaccuacaugcucaccaacuccgagcuccucucccucaucaacgacaugcccaucaccaacgaccagaagaagcucauguccaacaacguccagaucguccgccagcaguccuacuccaucaugugcaucaucaaggaggagguccucgccuacgucguccagcucccccucuacggcgucaucgacacccccugcuggaagcuccacaccuccccccucugcaccaccaacaccaaggagggcuccaacaucugccucacccgcaccgaccgcggcugguacugcgacaacgccggcuccgucuccuucuucccccaggccgagaccugcaagguccaguccaaccgcgucuucugcgacaccaugaacucccucacccuccccuccgaggucaaccucugcaacgucgacaucuucaaccccaaguacgacugcaagaucaugaccuccaagaccgacgucuccuccuccgucaucaccucccucggcgccaucgucuccugcuacggcaagaccaagugcaccgccuccaacaagaaccgcggcaucaucaagaccuucuccaacggcugcgacuacgucuccaacaagggcgucgacaccgucuccgucggcaacacccucuacugcgucaacaagcaggagggccagucccucuacgucaagggcgagcccaucaucaacuucuacgacccccucgucuuccccuccgacgaguucgacgccuccaucucccaggucaacgagaagaucaaccagucccucgccuucauccgcaaguccgacgagcuccuccacaacgucaacgccggcaaguccaccaccaacaucaugaucaccaccaucaucaucgucaucaucgucauccuccucucccucaucgccgucggccuccuccucuacugcaaggcccgcugaggacuaguguccaccugucccuccugggcugcuggauugucucguuuuccugccaaauaaacaggaucagcgcuuuacagaucuaaaaaaaaaaaaaaaaaaaaaaaaaaaaaaaaaaaaaaaaaaaaaaaaaaaaaaaaaaaaaaaaugcaucccccccccccccccccccccccccccccccaaaggcucuuuucagagccaccagaauu

SEQ ID NO: 2795 - RNA, 1994 nt, Artificial Sequence
  mRNA product Design b-1 comprising derived and/or modified sequence from HRSV(A2)__F-del_DSCav1_mut2 (opt3)
gggagacggagacggccugcaggaccugcucucucagcccucagccgaggccuacgccgagccgagugcgcagccgacgaccgggaggagccgcagccuucaacucugagguacugugauccgcgcugcccgccgggccgccccaguccgcugcugcggcaccuccuucccucgcgcccucuucgcucgccagcgccuucccugugagccugcgucaccgcggccgccaagcuuaccauggagcugcucauccuuaaggccaacgcuauuaccacaauacugacugcagugacguucugcuuugccagcggccagaauaucaccgaagaguucuaccaauccacauguucugcggucucaaaaggguauuugggagcuuuaagaacugguugguacaccaguguuauuacaaucgaacugagcaacauuaaggagaauaaaugcaacggcaccgacgccaaggugaaacuaaucaagcaggaacucgauaaguauaaaaaugcaguaacugaccugcagcuucugaugcaguccacacccgccaccgggucuggaucggcuauauguucaggcguggcagucugcaagguguugcaccucgagggugagguuaacaaaaucaagagcgcccugcugaguacgaauaaagcuguggucucccucucuaacggggugagcguauuaacuuuuaagguucuggaucuuaagaauuacauugacaaacaauugcugccuauccuaaacaagcaguccuguucaauuccaaauaucgaaaccgugauagaguuccagcagaaaaacaauaggcuccuggaaauuacacgggaguuuagugucaacgccggagugacuaccccggugagcacauauaugcuuaccaauucugagcuguugucccucaucaacgauaugcccauuacgaacgaccaaaagaaacugaugucaaauaacguccagaucguucgccagcagagcuacaguaucaugugcauuauaaaggaagagguguuagcguauguagugcaacugccucucuacggcgucaucgauacuccauguuggaaacuucauacaucuccccugugcaccacuaauacaaaggaaggcuccaacauuuguuugacccgaacggaccgugggugguacugcgauaaugcaggaagcgugucguucuuuccucaggccgagaccuguaagguucagucuaacagaguguucugcgacacaaugaacucccuaacucugccaucagaagucaaucucugcaauguggauaucuuuaaccccaaauaugacuguaagauaaugaccaguaaaacagauguaagcuccucuguuauuacuagccugggugcuaucgugucaugcuacggcaagaccaaauguacagccaguaauaagaacagggggaucauuaagaccuucuccaauggaugcgacuaugucagcaacaaaggcguggacacugucucuguggguaauacgcuuuacuguguuaacaagcaagaggggcagucacuguaugugaaaggagagccuaucauuaacuuuuacgauccauugguauucccgagugacgaauuugaugcaagcauaucccaggucaaugagaagaucaaccagucucucgcuuucauucggaaaucggacgaacuguuacacaaugugaacgccggcaagagcacaaccaauaucaugaucacuaccauuauaaucguuauuaucgugauucugcuaucccucaucgcggucggccugcuuuuguauugcaaggcccgcugaggacuaguguccaccugucccuccugggcugcuggauugucucguuuuccugccaaauaaacaggaucagcgcuuuacagaucuaaaaaaaaaaaaaaaaaaaaaaaaaaaaaaaaaaaaaaaaaaaaaaaaaaaaaaaaaaaaaaaaugcaucccccccccccccccccccccccccccccccaaaggcucuuuucagagccaccagaauu

SEQ ID NO: 2796 - RNA, 1994 nt, Artificial Sequence
  mRNA product Design b-1 comprising derived and/or modified sequence from HRSV(A2)__F-del_DSCav1_mut2 (opt4)
gggagacggagacggccugcaggaccugcucucucagcccucagccgaggccuacgccgagccgagugcgcagccgacgaccgggaggagccgcagccuucaacucugagguacugugauccgcgcugcccgccgggccgccccaguccgcugcugcggcaccuccuucccucgcgcccucuucgcucgccagcgccuucccugugagccugcgucaccgcggccgccaagcuuaccauggagcugcugauccugaaggccaacgccaucaccaccauccugaccgccgugaccuucugcuucgccagcggccagaacaucaccgaggaguucuaccagagcaccugcagcgccgugagcaagggcuaccugggcgcccugagaaccggcugguacaccagcgugaucaccaucgagcugagcaacaucaaggagaacaagugcaacggcaccgacgccaaggugaagcugaucaagcaggagcuggacaaguacaagaacgccgugaccgaccugcagcugcugaugcagagcacccccgccaccggcagcggcagcgccaucugcagcggcguggccgugugcaaggugcugcaccuggagggcgaggugaacaagaucaagagcgcccugcugagcaccaacaaggccguggugagccugagcaacggcgugagcgugcugaccuucaaggugcuggaccugaagaacuacaucgacaagcagcugcugcccauccugaacaagcagagcugcagcauccccaacaucgagaccgugaucgaguuccagcagaagaacaacagacugcuggagaucaccagagaguucagcgugaacgccggcgugaccacccccgugagcaccuacaugcugaccaacagcgagcugcugagccugaucaacgacaugcccaucaccaacgaccagaagaagcugaugagcaacaacgugcagaucgugagacagcagagcuacagcaucaugugcaucaucaaggaggaggugcuggccuacguggugcagcugccccuguacggcgugaucgacacccccugcuggaagcugcacaccagcccccugugcaccaccaacaccaaggagggcagcaacaucugccugaccagaaccgacagaggcugguacugcgacaacgccggcagcgugagcuucuucccccaggccgagaccugcaaggugcagagcaacagaguguucugcgacaccaugaacagccugacccugcccagcgaggugaaccugugcaacguggacaucuucaaccccaaguacgacugcaagaucaugaccagcaagaccgacgugagcagcagcgugaucaccagccugggcgccaucgugagcugcuacggcaagaccaagugcaccgccagcaacaagaacagaggcaucaucaagaccuucagcaacggcugcgacuacgugagcaacaagggcguggacaccgugagcgugggcaacacccuguacugcgugaacaagcaggagggccagagccuguacgugaagggcgagcccaucaucaacuucuacgacccccugguguuccccagcgacgaguucgacgccagcaucagccaggugaacgagaagaucaaccagagccuggccuucaucagaaagagcgacgagcugcugcacaacgugaacgccggcaagagcaccaccaacaucaugaucaccaccaucaucaucgugaucaucgugauccugcugagccugaucgccgugggccugcugcuguacugcaaggccagaugaggacuaguguccaccugucccuccugggcugcuggauugucucguuuuccugccaaauaaacaggaucagcgcuuuacagaucuaaaaaaaaaaaaaaaaaaaaaaaaaaaaaaaaaaaaaaaaaaaaaaaaaaaaaaaaaaaaaaaaugcaucccccccccccccccccccccccccccccccaaaggcucuuuucagagccaccagaauu

SEQ ID NO: 2797 - RNA, 1994 nt, Artificial Sequence
  mRNA product Design b-1 comprising derived and/or modified sequence from HRSV(A2)__F-del_DSCav1_mut2 (opt5)
gggagacggagacggccugcaggaccugcucucucagcccucagccgaggccuacgccgagccgagugcgcagccgacgaccgggaggagccgcagccuucaacucugagguacugugauccgcgcugcccgccgggccgccccaguccgcugcugcggcaccuccuucccucgcgcccucuucgcucgccagcgccuucccugugagccugcgucaccgcggccgccaagcuuaccauggagcugcucauccugaaggccaacgcuauuaccacaauccuuacggccgugaccuucugcuuugcgagcggccagaauauuacagaagaguucuaccaauccaccuguucugcugucagcaaaggguaucugggagcccucagaacaggcugguacaccuccguuaucacaauugaacugucuaacaucaaggagaauaaaugcaacgggaccgacgccaaggugaaacuuaucaagcaggaacuggauaaguauaaaaaugcugugacggaccuccagcugcugaugcagagcacccccgccacaggauccggcucugcuauuuguagcggggucgccgugugcaagguucuccaccuggagggagaggugaacaaaaucaaguccgcgcuucugagcaccaauaaagccgucgugucucucuccaacggcguuagcgugcugacauuuaagguccuugaucugaagaauuacauugacaaacaacuccugccuauccugaacaagcagucuuguuccauuccgaauaucgaaaccgugauugaguuccagcagaaaaacaaucggcuccuggaaaucacgcgcgaguuuagcgugaacgcuggcgucacaacccccguuucuacauauaugcuuaccaauuccgagcugcucagccugaucaacgauaugccuauuaccaacgaccaaaagaaacuuauguccaauaacgugcagaucgugagacagcagucuuacagcauuaugugcaucauuaaggaagagguccuggccuaugugguucaacucccccuguacggggugaucgauacaccuuguuggaaacugcauacgagcccccucugcaccacaaauaccaaggaaggauccaacaucugucugacacggaccgaccgcggcugguacugcgauaaugcugggucugucuccuucuuuccucaggccgagacguguaaggugcagagcaacagaguuuucugcgacacaaugaacucucuuacccugccgagcgaagugaaucucugcaaugucgauauuuuuaaccccaaauaugacuguaagaucaugaccuccaaaacagaugugucuagcuccgucauuaccagccugggagcgaucgugucuugcuacggcaagacaaaauguacggccuccaauaagaaccgggggauuaucaagaccuucagcaauggaugcgacuauguuucuaacaaaggcguggacacagucuccgugggcaauacccuuuacuguguuaacaagcaagaggggcagagccuguaugugaaaggagagccuaucauuaacuuuuacgauccccucgucuucccuuccgacgaauuugaugcuucuaucagccaggugaaugagaagauuaaccagucccuggccuucauccgcaaaucugacgaacugcuccacaaugugaacgcuggcaagagcacaaccaauauuaugaucacgaccauuaucaucguuauuaucgucauucugcuuucccugaucgccguggggcuccugcuguauugcaaggccagaugaggacuaguguccaccugucccuccugggcugcuggauugucucguuuuccugccaaauaaacaggaucagcgcuuuacagaucuaaaaaaaaaaaaaaaaaaaaaaaaaaaaaaaaaaaaaaaaaaaaaaaaaaaaaaaaaaaaaaaaugcaucccccccccccccccccccccccccccccccaaaggcucuuuucagagccaccagaauu

SEQ ID NO: 2798 - RNA, 1994 nt, Artificial Sequence
  mRNA product Design b-1 comprising derived and/or modified sequence from HRSV(A2)__F-del_DSCav1_mut2 (opt6)
gggagacggagacggccugcaggaccugcucucucagcccucagccgaggccuacgccgagccgagugcgcagccgacgaccgggaggagccgcagccuucaacucugagguacugugauccgcgcugcccgccgggccgccccaguccgcugcugcggcaccuccuucccucgcgcccucuucgcucgccagcgccuucccugugagccugcgucaccgcggccgccaagcuuaccauggaacuccuaauacuuaaagccaaugcaauaaccacaauacuaacagcaguaacauucugcuuugcaucaggacaaaacauaacagaagaauuuuaccaaucaacauguucagcaguaagcaaaggauaccuaggagccuuacgcacagguugguacacuuccguaauaacaauagaacucucaaauauaaaagaaaacaaaugcaacggaaccgaugcaaaaguaaaacuaauaaaacaagaauuagacaaauacaaaaacgcaguaacagaccuacaauuacuuaugcaaucaacacccgcaacaggauccggcucagcaaucuguucaggaguagcaguaugcaaaguucuccaccuagaaggcgaaguaaacaaaauaaaaucagcccuauuaucuaccaauaaagcaguaguaucacuaucaaauggaguaucuguccuaaccuucaaaguacuugaccuaaaaaauuacaucgacaaacaauuacuaccaauacuuaacaaacaaucauguucaauaccaaacauugaaacaguaauagaauuucaacaaaaaaauaacagauuauuagaaauaacccgcgaauuuucaguuaacgcaggaguaacaacaccaguauccacauacauguuaacaaauucagaacucuuaucacuuauaaacgacaugcccauaacaaacgaccaaaaaaaacucaugucuaacaauguucaaauaguucgacaacaaucauacuccauaaugugcauaauaaaagaagaaguucuagcauauguuguacaacucccacucuaugguguuauagacacaccaugcuggaaacuacauacaagccccuuaugcacuacaaacacaaaagaaggcucuaauauaugucuaacccgcacagacagaggcugguauugcgauaacgcagguucaguaucauucuuuccacaagcagaaacuugcaaaguccaauccaauagagucuucugcgacacuaugaacucacucacacucccaucugaagucaauuuauguaacgucgauaucuucaacccaaaauacgacugcaaaauaaugaccucaaaaacagacguaagcucaucagucauaacuucucuaggcgcaaucgucucauguuacggcaaaacaaaauguaccgcaucaaacaaaaaucgagguauaauaaaaaccuuuucuaacggcugcgacuacguaucaaacaaaggaguagauacuguaagugucggaaacacauuauacugcgucaacaaacaagaaggacaaucccuauauguuaaaggcgaaccuaucauuaauuucuacgacccacucgucuuuccauccgacgaauuugacgcaucaauuucccaaguaaaugaaaaaauaaaccaaucccuugcauucauaagaaaaucagaugaacuauuacacaacguaaacgcaggcaaaucaacaacaaauauaaugaucacaacaauaauaaucguaauaauaguaauccuacucucacuaauagcaguaggcuuacuauuauauugcaaagccagauaaggacuaguguccaccugucccuccugggcugcuggauugucucguuuuccugccaaauaaacaggaucagcgcuuuacagaucuaaaaaaaaaaaaaaaaaaaaaaaaaaaaaaaaaaaaaaaaaaaaaaaaaaaaaaaaaaaaaaaaugcaucccccccccccccccccccccccccccccccaaaggcucuuuucagagccaccagaauu

SEQ ID NO: 2799 - RNA, 1994 nt, Artificial Sequence
  mRNA product Design b-1 comprising derived and/or modified sequence from HRSV(A2)__F-del_DSCav1_mut2 (opt11)
gggagacggagacggccugcaggaccugcucucucagcccucagccgaggccuacgccgagccgagugcgcagccgacgaccgggaggagccgcagccuucaacucugagguacugugauccgcgcugcccgccgggccgccccaguccgcugcugcggcaccuccuucccucgcgcccucuucgcucgccagcgccuucccugugagccugcgucaccgcggccgccaagcuuaccauggaacuucuuauccuaaaagcgaacgccauaaccacaauccuaacagcagucaccuucuguuucgccucaggacaaaacaucaccgaggaauuuuaccaauccacauguagcgcugucucaaaaggcuaccucggcgcccuccgaaccggcugguacacauccguaauaacgaucgaacucuccaacauaaaagaaaauaaaugcaacggcaccgacgccaaagucaaacuuaucaaacaagaacuagacaaauacaaaaacgccgucaccgaccuccagcuccucaugcaauccaccccagcaacaggcuccggaagcgcaaucugcucaggcgucgccguaugcaaaguacuccaccucgaaggagaagucaacaaaaucaaauccgcccuccuauccacaaacaaagcaguugucucacucuccaacgggguaagcguacugaccuucaaaguccuagaccucaaaaacuacaucgauaaacaacuccuuccaauccucaacaaacaaucaugcucuauccccaacaucgaaaccguaaucgaauuucaacaaaaaaacaaccgccuacuugaaaucacacgcgaauuuagcgucaacgcaggaguaacaacacccguguccacauauaugcucacgaacagcgaacuacuaucccugauuaacgacaugcccaucaccaacgaccaaaaaaaacuaaugagcaacaacguacaaaucguccgccaacaaagcuacucuauaaugugcaucaucaaggaagaaguccuagccuacgucguccaauuaccacucuacggcgucaucgacacacccugcuggaaacuccauacauccccccucugcaccaccaacaccaaagaaggguccaacauaugccucacucgcacagaccgcggcugguacugcgacaacgcuggcagcgucagcuucuucccccaggccgaaaccugcaaaguccaauccaacagagucuucugcgacaccaugaacucgcucacccuccccuccgaggucaaccucugcaacgucgacauauucaaccccaaauacgacugcaaaaucaugaccuccaaaaccgacgucagcucaucagucaucacaucccucggggccaucgucuccugcuacggcaaaaccaagugcaccgccucaaacaaaaaccgcggcauuaucaaaacauucuccaacggcugcgacuacgucuccaacaaaggcgucgacacagucuccgucgguaacacccucuacugcguaaauaaacaagaaggccaaucccucuacgucaaaggcgaacccaucaucaacuucuacgacccucucgucuuccccuccgacgaauuugacgccucaaucagccaaguuaacgaaaaaaucaaccaaucacucgccuucauccgcaaauccgacgaacuccuccacaacguuaacgccggcaaaucuaccacgaacaucaugaucaccaccauaaucaucguaauuaucguaauacuccuaucccucauagcaguaggccuccuacucuacugcaaagcccguuaaggacuaguguccaccugucccuccugggcugcuggauugucucguuuuccugccaaauaaacaggaucagcgcuuuacagaucuaaaaaaaaaaaaaaaaaaaaaaaaaaaaaaaaaaaaaaaaaaaaaaaaaaaaaaaaaaaaaaaaugcaucccccccccccccccccccccccccccccccaaaggcucuuuucagagccaccagaauu

SEQ ID NO: 2800 - RNA, 1814 nt, Artificial Sequence
  mRNA product Design b-2 comprising derived and/or modified sequence from HRSV(A2)__F-del_DSCav1_mut2 (opt1)
gggagagccucugcuggaguccggggaguggcguuggcugcuagagcgaagcuuaccauggagcugcucauccugaaggccaacgccaucaccaccauccugacggcggugaccuucugcuucgccagcggccagaacaucaccgaggaguucuaccaguccacgugcagcgccgucuccaagggguaccucggcgcccugcggaccggcugguacaccuccgugaucaccaucgagcugagcaacaucaaggagaacaagugcaacgggaccgacgccaaggugaagcucaucaagcaggagcuggacaaguacaagaacgcggucacggaccugcagcuccugaugcaguccaccccggcaaccggcuccggcuccgccaucugcagcggcgucgccgugugcaaggugcugcaccucgagggggaggucaacaagaucaagagcgcccugcuguccaccaacaaggccguggugagccucuccaacggcgucagcgugcugaccuucaaggugcuggaccucaagaacuacaucgacaagcagcugcugcccauccugaacaagcagagcugcuccauccccaacaucgagacggugaucgaguuccagcagaagaacaaccggcuccuggagaucacccgcgaguucagcgugaacgccggggucaccacccccguguccacguacaugcugaccaacagcgagcuccugucccugaucaacgacaugccgaucaccaacgaccagaagaagcucaugagcaacaacgugcagaucguccggcagcaguccuacagcaucaugugcaucaucaaggaggaggugcuggcguacgugguccagcugccccucuacggcgugaucgacacccccugcuggaagcugcacacgagcccccugugcaccaccaacaccaaggagggguccaacaucugccucacgcgcaccgaccggggcugguacugcgacaacgccggcagcgucuccuucuucccgcaggccgagaccugcaaggugcagagcaaccgcguguucugcgacaccaugaacucccugacgcugcccagcgagguaaaccucugcaacgucgacaucuucaaccccaaguacgacugcaagaucaugaccuccaagaccgacgugagcuccagcgugaucaccucccugggggccaucgucagcugcuacggcaagacgaagugcaccgccagcaacaagaaccgggggaucaucaagaccuucuccaacggcugcgacuacgugagcaacaagggcguggacaccguguccgucgggaacacccuguacugcgugaacaagcaggagggccagagccucuacgugaagggggagcccaucaucaacuucuacgacccgcuggucuuccccuccgacgaguucgacgcgagcaucucccaggugaacgagaagaucaaccagagccuggccuucauccgcaaguccgacgagcugcuccacaacgugaacgccggcaagagcacgaccaacaucaugaucaccaccaucaucaucgucaucaucgugauccugcugucccucaucgccguggggcugcugcucuacugcaaggcccggugaggacuaguguccaccugucccuccugggcugcuggauugucucguuuuccugccaaauaaacaggaucagcgcuuuacagaucuaaaaaaaaaaaaaaaaaaaaaaaaaaaaaaaaaaaaaaaaaaaaaaaaaaaaaaaaaaaaaaaaugcaucccccccccccccccccccccccccccccccaaaggcucuuuucagagccaccagaauu

SEQ ID NO: 2801 - RNA, 1814 nt, Artificial Sequence
  mRNA product Design b-2 comprising derived and/or modified sequence from HRSV(A2)__F-del_DSCav1_mut2 (opt1)
gggagagccucugcuggaguccggggaguggcguuggcugcuagagcgaagcuuaccauggagcugcucauccugaaggccaacgccaucaccaccauccugacggcggugaccuucugcuucgccagcggccagaacaucaccgaggaguucuaccaguccacgugcagcgccgucuccaagggguaccucggcgcccugcgcaccgggugguacaccagcgugaucaccaucgagcuguccaacaucaaggagaacaagugcaacggcaccgacgccaaggugaagcucaucaagcaggagcuggacaaguacaagaacgcggucacggaccugcagcuccugaugcagagcacccccgccaccggguccggcagcgccaucugcuccggcguggccgugugcaagguccugcaccucgagggggaggugaacaagaucaagagcgcgcugcuguccaccaacaaggccguggucagccucuccaacggcgugagcgugcugacguucaagguccuggaccucaagaacuacaucgacaagcagcugcugccgauccucaacaagcaguccugcagcauccccaacaucgagaccgugaucgaguuccagcagaagaacaaccggcugcuggagaucacccgcgaguucuccgugaacgccggggucaccacgcccgugagcaccuacaugcucaccaacuccgagcugcugagccucaucaacgacaugcccaucaccaacgaccagaagaagcugaugagcaacaacgugcagaucguccggcagcaguccuacagcaucaugugcaucaucaaggaggaggugcuggccuacgugguccagcucccgcuguacggcgugaucgacacgcccugcuggaagcugcacaccagcccccucugcaccaccaacacgaaggagggguccaacaucugccugacccgcaccgaccggggcugguacugcgacaacgccggcuccgugagcuucuucccccaggcggagaccugcaagguccaguccaaccgcguguucugcgacacgaugaacagccugacccucccguccgaggucaaccugugcaacguggacaucuucaaccccaaguacgacugcaagaucaugaccagcaagaccgacguguccagcuccgucaucacgagccugggggccaucguguccugcuacggcaagaccaagugcaccgccagcaacaagaaccgggggaucaucaagaccuucuccaacggcugcgacuacgugagcaacaagggcgucgacacgguguccguggggaacacccucuacugcgucaacaagcaggagggccagagccuguacgugaagggggagcccaucaucaacuucuacgacccccugguguucccgagcgacgaguucgacgccuccaucagccaggucaacgagaagaucaaccagucccucgccuucauccgcaagagcgacgagcugcugcacaacgugaacgcgggcaaguccaccaccaacaucaugaucaccacgaucaucaucgugaucaucgucauccuccugagccugaucgccguggggcuccugcuguacugcaaggcccggugaggacuaguguccaccugucccuccugggcugcuggauugucucguuuuccugccaaauaaacaggaucagcgcuuuacagaucuaaaaaaaaaaaaaaaaaaaaaaaaaaaaaaaaaaaaaaaaaaaaaaaaaaaaaaaaaaaaaaaaugcaucccccccccccccccccccccccccccccccaaaggcucuuuucagagccaccagaauu

SEQ ID NO: 2802 - RNA, 1814 nt, Artificial Sequence
  mRNA product Design b-2 comprising derived and/or modified sequence from HRSV(A2)__F-del_DSCav1_mut2 (opt2)
gggagagccucugcuggaguccggggaguggcguuggcugcuagagcgaagcuuaccauggagcuccucauccucaaggccaacgccaucaccaccauccucaccgccgucaccuucugcuucgccuccggccagaacaucaccgaggaguucuaccaguccaccugcuccgccgucuccaagggcuaccucggcgcccuccgcaccggcugguacaccuccgucaucaccaucgagcucuccaacaucaaggagaacaagugcaacggcaccgacgccaaggucaagcucaucaagcaggagcucgacaaguacaagaacgccgucaccgaccuccagcuccucaugcaguccacccccgccaccggcuccggcuccgccaucugcuccggcgucgccgucugcaagguccuccaccucgagggcgaggucaacaagaucaaguccgcccuccucuccaccaacaaggccgucgucucccucuccaacggcgucuccguccucaccuucaagguccucgaccucaagaacuacaucgacaagcagcuccuccccauccucaacaagcaguccugcuccauccccaacaucgagaccgucaucgaguuccagcagaagaacaaccgccuccucgagaucacccgcgaguucuccgucaacgccggcgucaccacccccgucuccaccuacaugcucaccaacuccgagcuccucucccucaucaacgacaugcccaucaccaacgaccagaagaagcucauguccaacaacguccagaucguccgccagcaguccuacuccaucaugugcaucaucaaggaggagguccucgccuacgucguccagcucccccucuacggcgucaucgacacccccugcuggaagcuccacaccuccccccucugcaccaccaacaccaaggagggcuccaacaucugccucacccgcaccgaccgcggcugguacugcgacaacgccggcuccgucuccuucuucccccaggccgagaccugcaagguccaguccaaccgcgucuucugcgacaccaugaacucccucacccuccccuccgaggucaaccucugcaacgucgacaucuucaaccccaaguacgacugcaagaucaugaccuccaagaccgacgucuccuccuccgucaucaccucccucggcgccaucgucuccugcuacggcaagaccaagugcaccgccuccaacaagaaccgcggcaucaucaagaccuucuccaacggcugcgacuacgucuccaacaagggcgucgacaccgucuccgucggcaacacccucuacugcgucaacaagcaggagggccagucccucuacgucaagggcgagcccaucaucaacuucuacgacccccucgucuuccccuccgacgaguucgacgccuccaucucccaggucaacgagaagaucaaccagucccucgccuucauccgcaaguccgacgagcuccuccacaacgucaacgccggcaaguccaccaccaacaucaugaucaccaccaucaucaucgucaucaucgucauccuccucucccucaucgccgucggccuccuccucuacugcaaggcccgcugaggacuaguguccaccugucccuccugggcugcuggauugucucguuuuccugccaaauaaacaggaucagcgcuuuacagaucuaaaaaaaaaaaaaaaaaaaaaaaaaaaaaaaaaaaaaaaaaaaaaaaaaaaaaaaaaaaaaaaaugcaucccccccccccccccccccccccccccccccaaaggcucuuuucagagccaccagaauu

SEQ ID NO: 2803 - RNA, 1814 nt, Artificial Sequence
  mRNA product Design b-2 comprising derived and/or modified sequence from HRSV(A2)__F-del_DSCav1_mut2 (opt3)
gggagagccucugcuggaguccggggaguggcguuggcugcuagagcgaagcuuaccauggagcugcucauccuuaaggccaacgcuauuaccacaauacugacugcagugacguucugcuuugccagcggccagaauaucaccgaagaguucuaccaauccacauguucugcggucucaaaaggguauuugggagcuuuaagaacugguugguacaccaguguuauuacaaucgaacugagcaacauuaaggagaauaaaugcaacggcaccgacgccaaggugaaacuaaucaagcaggaacucgauaaguauaaaaaugcaguaacugaccugcagcuucugaugcaguccacacccgccaccgggucuggaucggcuauauguucaggcguggcagucugcaagguguugcaccucgagggugagguuaacaaaaucaagagcgcccugcugaguacgaauaaagcuguggucucccucucuaacggggugagcguauuaacuuuuaagguucuggaucuuaagaauuacauugacaaacaauugcugccuauccuaaacaagcaguccuguucaauuccaaauaucgaaaccgugauagaguuccagcagaaaaacaauaggcuccuggaaauuacacgggaguuuagugucaacgccggagugacuaccccggugagcacauauaugcuuaccaauucugagcuguugucccucaucaacgauaugcccauuacgaacgaccaaaagaaacugaugucaaauaacguccagaucguucgccagcagagcuacaguaucaugugcauuauaaaggaagagguguuagcguauguagugcaacugccucucuacggcgucaucgauacuccauguuggaaacuucauacaucuccccugugcaccacuaauacaaaggaaggcuccaacauuuguuugacccgaacggaccgugggugguacugcgauaaugcaggaagcgugucguucuuuccucaggccgagaccuguaagguucagucuaacagaguguucugcgacacaaugaacucccuaacucugccaucagaagucaaucucugcaauguggauaucuuuaaccccaaauaugacuguaagauaaugaccaguaaaacagauguaagcuccucuguuauuacuagccugggugcuaucgugucaugcuacggcaagaccaaauguacagccaguaauaagaacagggggaucauuaagaccuucuccaauggaugcgacuaugucagcaacaaaggcguggacacugucucuguggguaauacgcuuuacuguguuaacaagcaagaggggcagucacuguaugugaaaggagagccuaucauuaacuuuuacgauccauugguauucccgagugacgaauuugaugcaagcauaucccaggucaaugagaagaucaaccagucucucgcuuucauucggaaaucggacgaacuguuacacaaugugaacgccggcaagagcacaaccaauaucaugaucacuaccauuauaaucguuauuaucgugauucugcuaucccucaucgcggucggccugcuuuuguauugcaaggcccgcugaggacuaguguccaccugucccuccugggcugcuggauugucucguuuuccugccaaauaaacaggaucagcgcuuuacagaucuaaaaaaaaaaaaaaaaaaaaaaaaaaaaaaaaaaaaaaaaaaaaaaaaaaaaaaaaaaaaaaaaugcaucccccccccccccccccccccccccccccccaaaggcucuuuucagagccaccagaauu

SEQ ID NO: 2804 - RNA, 1814 nt, Artificial Sequence
  mRNA product Design b-2 comprising derived and/or modified sequence from HRSV(A2)__F-del_DSCav1_mut2 (opt4)
gggagagccucugcuggaguccggggaguggcguuggcugcuagagcgaagcuuaccauggagcugcugauccugaaggccaacgccaucaccaccauccugaccgccgugaccuucugcuucgccagcggccagaacaucaccgaggaguucuaccagagcaccugcagcgccgugagcaagggcuaccugggcgcccugagaaccggcugguacaccagcgugaucaccaucgagcugagcaacaucaaggagaacaagugcaacggcaccgacgccaaggugaagcugaucaagcaggagcuggacaaguacaagaacgccgugaccgaccugcagcugcugaugcagagcacccccgccaccggcagcggcagcgccaucugcagcggcguggccgugugcaaggugcugcaccuggagggcgaggugaacaagaucaagagcgcccugcugagcaccaacaaggccguggugagccugagcaacggcgugagcgugcugaccuucaaggugcuggaccugaagaacuacaucgacaagcagcugcugcccauccugaacaagcagagcugcagcauccccaacaucgagaccgugaucgaguuccagcagaagaacaacagacugcuggagaucaccagagaguucagcgugaacgccggcgugaccacccccgugagcaccuacaugcugaccaacagcgagcugcugagccugaucaacgacaugcccaucaccaacgaccagaagaagcugaugagcaacaacgugcagaucgugagacagcagagcuacagcaucaugugcaucaucaaggaggaggugcuggccuacguggugcagcugccccuguacggcgugaucgacacccccugcuggaagcugcacaccagcccccugugcaccaccaacaccaaggagggcagcaacaucugccugaccagaaccgacagaggcugguacugcgacaacgccggcagcgugagcuucuucccccaggccgagaccugcaaggugcagagcaacagaguguucugcgacaccaugaacagccugacccugcccagcgaggugaaccugugcaacguggacaucuucaaccccaaguacgacugcaagaucaugaccagcaagaccgacgugagcagcagcgugaucaccagccugggcgccaucgugagcugcuacggcaagaccaagugcaccgccagcaacaagaacagaggcaucaucaagaccuucagcaacggcugcgacuacgugagcaacaagggcguggacaccgugagcgugggcaacacccuguacugcgugaacaagcaggagggccagagccuguacgugaagggcgagcccaucaucaacuucuacgacccccugguguuccccagcgacgaguucgacgccagcaucagccaggugaacgagaagaucaaccagagccuggccuucaucagaaagagcgacgagcugcugcacaacgugaacgccggcaagagcaccaccaacaucaugaucaccaccaucaucaucgugaucaucgugauccugcugagccugaucgccgugggccugcugcuguacugcaaggccagaugaggacuaguguccaccugucccuccugggcugcuggauugucucguuuuccugccaaauaaacaggaucagcgcuuuacagaucuaaaaaaaaaaaaaaaaaaaaaaaaaaaaaaaaaaaaaaaaaaaaaaaaaaaaaaaaaaaaaaaaugcaucccccccccccccccccccccccccccccccaaaggcucuuuucagagccaccagaauu

SEQ ID NO: 2805 - RNA, 1814 nt, Artificial Sequence
  mRNA product Design b-2 comprising derived and/or modified sequence from HRSV(A2)__F-del_DSCav1_mut2 (opt5)
gggagagccucugcuggaguccggggaguggcguuggcugcuagagcgaagcuuaccauggagcugcucauccugaaggccaacgcuauuaccacaauccuuacggccgugaccuucugcuuugcgagcggccagaauauuacagaagaguucuaccaauccaccuguucugcugucagcaaaggguaucugggagcccucagaacaggcugguacaccuccguuaucacaauugaacugucuaacaucaaggagaauaaaugcaacgggaccgacgccaaggugaaacuuaucaagcaggaacuggauaaguauaaaaaugcugugacggaccuccagcugcugaugcagagcacccccgccacaggauccggcucugcuauuuguagcggggucgccgugugcaagguucuccaccuggagggagaggugaacaaaaucaaguccgcgcuucugagcaccaauaaagccgucgugucucucuccaacggcguuagcgugcugacauuuaagguccuugaucugaagaauuacauugacaaacaacuccugccuauccugaacaagcagucuuguuccauuccgaauaucgaaaccgugauugaguuccagcagaaaaacaaucggcuccuggaaaucacgcgcgaguuuagcgugaacgcuggcgucacaacccccguuucuacauauaugcuuaccaauuccgagcugcucagccugaucaacgauaugccuauuaccaacgaccaaaagaaacuuauguccaauaacgugcagaucgugagacagcagucuuacagcauuaugugcaucauuaaggaagagguccuggccuaugugguucaacucccccuguacggggugaucgauacaccuuguuggaaacugcauacgagcccccucugcaccacaaauaccaaggaaggauccaacaucugucugacacggaccgaccgcggcugguacugcgauaaugcugggucugucuccuucuuuccucaggccgagacguguaaggugcagagcaacagaguuuucugcgacacaaugaacucucuuacccugccgagcgaagugaaucucugcaaugucgauauuuuuaaccccaaauaugacuguaagaucaugaccuccaaaacagaugugucuagcuccgucauuaccagccugggagcgaucgugucuugcuacggcaagacaaaauguacggccuccaauaagaaccgggggauuaucaagaccuucagcaauggaugcgacuauguuucuaacaaaggcguggacacagucuccgugggcaauacccuuuacuguguuaacaagcaagaggggcagagccuguaugugaaaggagagccuaucauuaacuuuuacgauccccucgucuucccuuccgacgaauuugaugcuucuaucagccaggugaaugagaagauuaaccagucccuggccuucauccgcaaaucugacgaacugcuccacaaugugaacgcuggcaagagcacaaccaauauuaugaucacgaccauuaucaucguuauuaucgucauucugcuuucccugaucgccguggggcuccugcuguauugcaaggccagaugaggacuaguguccaccugucccuccugggcugcuggauugucucguuuuccugccaaauaaacaggaucagcgcuuuacagaucuaaaaaaaaaaaaaaaaaaaaaaaaaaaaaaaaaaaaaaaaaaaaaaaaaaaaaaaaaaaaaaaaugcaucccccccccccccccccccccccccccccccaaaggcucuuuucagagccaccagaauu

SEQ ID NO: 2806 - RNA, 1814 nt, Artificial Sequence
  mRNA product Design b-2 comprising derived and/or modified sequence from HRSV(A2)__F-del_DSCav1_mut2 (opt6)
gggagagccucugcuggaguccggggaguggcguuggcugcuagagcgaagcuuaccauggaacuccuaauacuuaaagccaaugcaauaaccacaauacuaacagcaguaacauucugcuuugcaucaggacaaaacauaacagaagaauuuuaccaaucaacauguucagcaguaagcaaaggauaccuaggagccuuacgcacagguugguacacuuccguaauaacaauagaacucucaaauauaaaagaaaacaaaugcaacggaaccgaugcaaaaguaaaacuaauaaaacaagaauuagacaaauacaaaaacgcaguaacagaccuacaauuacuuaugcaaucaacacccgcaacaggauccggcucagcaaucuguucaggaguagcaguaugcaaaguucuccaccuagaaggcgaaguaaacaaaauaaaaucagcccuauuaucuaccaauaaagcaguaguaucacuaucaaauggaguaucuguccuaaccuucaaaguacuugaccuaaaaaauuacaucgacaaacaauuacuaccaauacuuaacaaacaaucauguucaauaccaaacauugaaacaguaauagaauuucaacaaaaaaauaacagauuauuagaaauaacccgcgaauuuucaguuaacgcaggaguaacaacaccaguauccacauacauguuaacaaauucagaacucuuaucacuuauaaacgacaugcccauaacaaacgaccaaaaaaaacucaugucuaacaauguucaaauaguucgacaacaaucauacuccauaaugugcauaauaaaagaagaaguucuagcauauguuguacaacucccacucuaugguguuauagacacaccaugcuggaaacuacauacaagccccuuaugcacuacaaacacaaaagaaggcucuaauauaugucuaacccgcacagacagaggcugguauugcgauaacgcagguucaguaucauucuuuccacaagcagaaacuugcaaaguccaauccaauagagucuucugcgacacuaugaacucacucacacucccaucugaagucaauuuauguaacgucgauaucuucaacccaaaauacgacugcaaaauaaugaccucaaaaacagacguaagcucaucagucauaacuucucuaggcgcaaucgucucauguuacggcaaaacaaaauguaccgcaucaaacaaaaaucgagguauaauaaaaaccuuuucuaacggcugcgacuacguaucaaacaaaggaguagauacuguaagugucggaaacacauuauacugcgucaacaaacaagaaggacaaucccuauauguuaaaggcgaaccuaucauuaauuucuacgacccacucgucuuuccauccgacgaauuugacgcaucaauuucccaaguaaaugaaaaaauaaaccaaucccuugcauucauaagaaaaucagaugaacuauuacacaacguaaacgcaggcaaaucaacaacaaauauaaugaucacaacaauaauaaucguaauaauaguaauccuacucucacuaauagcaguaggcuuacuauuauauugcaaagccagauaaggacuaguguccaccugucccuccugggcugcuggauugucucguuuuccugccaaauaaacaggaucagcgcuuuacagaucuaaaaaaaaaaaaaaaaaaaaaaaaaaaaaaaaaaaaaaaaaaaaaaaaaaaaaaaaaaaaaaaaugcaucccccccccccccccccccccccccccccccaaaggcucuuuucagagccaccagaauu

SEQ ID NO: 2807 - RNA, 1814 nt, Artificial Sequence
  mRNA product Design b-2 comprising derived and/or modified sequence from HRSV(A2)__F-del_DSCav1_mut2 (opt11)
gggagagccucugcuggaguccggggaguggcguuggcugcuagagcgaagcuuaccauggaacuucuuauccuaaaagcgaacgccauaaccacaauccuaacagcagucaccuucuguuucgccucaggacaaaacaucaccgaggaauuuuaccaauccacauguagcgcugucucaaaaggcuaccucggcgcccuccgaaccggcugguacacauccguaauaacgaucgaacucuccaacauaaaagaaaauaaaugcaacggcaccgacgccaaagucaaacuuaucaaacaagaacuagacaaauacaaaaacgccgucaccgaccuccagcuccucaugcaauccaccccagcaacaggcuccggaagcgcaaucugcucaggcgucgccguaugcaaaguacuccaccucgaaggagaagucaacaaaaucaaauccgcccuccuauccacaaacaaagcaguugucucacucuccaacgggguaagcguacugaccuucaaaguccuagaccucaaaaacuacaucgauaaacaacuccuuccaauccucaacaaacaaucaugcucuauccccaacaucgaaaccguaaucgaauuucaacaaaaaaacaaccgccuacuugaaaucacacgcgaauuuagcgucaacgcaggaguaacaacacccguguccacauauaugcucacgaacagcgaacuacuaucccugauuaacgacaugcccaucaccaacgaccaaaaaaaacuaaugagcaacaacguacaaaucguccgccaacaaagcuacucuauaaugugcaucaucaaggaagaaguccuagccuacgucguccaauuaccacucuacggcgucaucgacacacccugcuggaaacuccauacauccccccucugcaccaccaacaccaaagaaggguccaacauaugccucacucgcacagaccgcggcugguacugcgacaacgcuggcagcgucagcuucuucccccaggccgaaaccugcaaaguccaauccaacagagucuucugcgacaccaugaacucgcucacccuccccuccgaggucaaccucugcaacgucgacauauucaaccccaaauacgacugcaaaaucaugaccuccaaaaccgacgucagcucaucagucaucacaucccucggggccaucgucuccugcuacggcaaaaccaagugcaccgccucaaacaaaaaccgcggcauuaucaaaacauucuccaacggcugcgacuacgucuccaacaaaggcgucgacacagucuccgucgguaacacccucuacugcguaaauaaacaagaaggccaaucccucuacgucaaaggcgaacccaucaucaacuucuacgacccucucgucuuccccuccgacgaauuugacgccucaaucagccaaguuaacgaaaaaaucaaccaaucacucgccuucauccgcaaauccgacgaacuccuccacaacguuaacgccggcaaaucuaccacgaacaucaugaucaccaccauaaucaucguaauuaucguaauacuccuaucccucauagcaguaggccuccuacucuacugcaaagcccguuaaggacuaguguccaccugucccuccugggcugcuggauugucucguuuuccugccaaauaaacaggaucagcgcuuuacagaucuaaaaaaaaaaaaaaaaaaaaaaaaaaaaaaaaaaaaaaaaaaaaaaaaaaaaaaaaaaaaaaaaugcaucccccccccccccccccccccccccccccccaaaggcucuuuucagagccaccagaauu

SEQ ID NO: 2808 - RNA, 1834 nt, Artificial Sequence
  mRNA product Design b-3 comprising derived and/or modified sequence from HRSV(A2)__F-del_DSCav1_mut2 (opt1)
gggagagucccgcagucggcguccagcggcucugcuuguucgugugugugucguugcaggccuuauucaagcuuaccauggagcugcucauccugaaggccaacgccaucaccaccauccugacggcggugaccuucugcuucgccagcggccagaacaucaccgaggaguucuaccaguccacgugcagcgccgucuccaagggguaccucggcgcccugcggaccggcugguacaccuccgugaucaccaucgagcugagcaacaucaaggagaacaagugcaacgggaccgacgccaaggugaagcucaucaagcaggagcuggacaaguacaagaacgcggucacggaccugcagcuccugaugcaguccaccccggcaaccggcuccggcuccgccaucugcagcggcgucgccgugugcaaggugcugcaccucgagggggaggucaacaagaucaagagcgcccugcuguccaccaacaaggccguggugagccucuccaacggcgucagcgugcugaccuucaaggugcuggaccucaagaacuacaucgacaagcagcugcugcccauccugaacaagcagagcugcuccauccccaacaucgagacggugaucgaguuccagcagaagaacaaccggcuccuggagaucacccgcgaguucagcgugaacgccggggucaccacccccguguccacguacaugcugaccaacagcgagcuccugucccugaucaacgacaugccgaucaccaacgaccagaagaagcucaugagcaacaacgugcagaucguccggcagcaguccuacagcaucaugugcaucaucaaggaggaggugcuggcguacgugguccagcugccccucuacggcgugaucgacacccccugcuggaagcugcacacgagcccccugugcaccaccaacaccaaggagggguccaacaucugccucacgcgcaccgaccggggcugguacugcgacaacgccggcagcgucuccuucuucccgcaggccgagaccugcaaggugcagagcaaccgcguguucugcgacaccaugaacucccugacgcugcccagcgagguaaaccucugcaacgucgacaucuucaaccccaaguacgacugcaagaucaugaccuccaagaccgacgugagcuccagcgugaucaccucccugggggccaucgucagcugcuacggcaagacgaagugcaccgccagcaacaagaaccgggggaucaucaagaccuucuccaacggcugcgacuacgugagcaacaagggcguggacaccguguccgucgggaacacccuguacugcgugaacaagcaggagggccagagccucuacgugaagggggagcccaucaucaacuucuacgacccgcuggucuuccccuccgacgaguucgacgcgagcaucucccaggugaacgagaagaucaaccagagccuggccuucauccgcaaguccgacgagcugcuccacaacgugaacgccggcaagagcacgaccaacaucaugaucaccaccaucaucaucgucaucaucgugauccugcugucccucaucgccguggggcugcugcucuacugcaaggcccggugaggacuaguguccaccugucccuccugggcugcuggauugucucguuuuccugccaaauaaacaggaucagcgcuuuacagaucuaaaaaaaaaaaaaaaaaaaaaaaaaaaaaaaaaaaaaaaaaaaaaaaaaaaaaaaaaaaaaaaaugcaucccccccccccccccccccccccccccccccaaaggcucuuuucagagccaccagaauu

SEQ ID NO: 2809 - RNA, 1834 nt, Artificial Sequence
  mRNA product Design b-3 comprising derived and/or modified sequence from HRSV(A2)__F-del_DSCav1_mut2 (opt1)
gggagagucccgcagucggcguccagcggcucugcuuguucgugugugugucguugcaggccuuauucaagcuuaccauggagcugcucauccugaaggccaacgccaucaccaccauccugacggcggugaccuucugcuucgccagcggccagaacaucaccgaggaguucuaccaguccacgugcagcgccgucuccaagggguaccucggcgcccugcgcaccgggugguacaccagcgugaucaccaucgagcuguccaacaucaaggagaacaagugcaacggcaccgacgccaaggugaagcucaucaagcaggagcuggacaaguacaagaacgcggucacggaccugcagcuccugaugcagagcacccccgccaccggguccggcagcgccaucugcuccggcguggccgugugcaagguccugcaccucgagggggaggugaacaagaucaagagcgcgcugcuguccaccaacaaggccguggucagccucuccaacggcgugagcgugcugacguucaagguccuggaccucaagaacuacaucgacaagcagcugcugccgauccucaacaagcaguccugcagcauccccaacaucgagaccgugaucgaguuccagcagaagaacaaccggcugcuggagaucacccgcgaguucuccgugaacgccggggucaccacgcccgugagcaccuacaugcucaccaacuccgagcugcugagccucaucaacgacaugcccaucaccaacgaccagaagaagcugaugagcaacaacgugcagaucguccggcagcaguccuacagcaucaugugcaucaucaaggaggaggugcuggccuacgugguccagcucccgcuguacggcgugaucgacacgcccugcuggaagcugcacaccagcccccucugcaccaccaacacgaaggagggguccaacaucugccugacccgcaccgaccggggcugguacugcgacaacgccggcuccgugagcuucuucccccaggcggagaccugcaagguccaguccaaccgcguguucugcgacacgaugaacagccugacccucccguccgaggucaaccugugcaacguggacaucuucaaccccaaguacgacugcaagaucaugaccagcaagaccgacguguccagcuccgucaucacgagccugggggccaucguguccugcuacggcaagaccaagugcaccgccagcaacaagaaccgggggaucaucaagaccuucuccaacggcugcgacuacgugagcaacaagggcgucgacacgguguccguggggaacacccucuacugcgucaacaagcaggagggccagagccuguacgugaagggggagcccaucaucaacuucuacgacccccugguguucccgagcgacgaguucgacgccuccaucagccaggucaacgagaagaucaaccagucccucgccuucauccgcaagagcgacgagcugcugcacaacgugaacgcgggcaaguccaccaccaacaucaugaucaccacgaucaucaucgugaucaucgucauccuccugagccugaucgccguggggcuccugcuguacugcaaggcccggugaggacuaguguccaccugucccuccugggcugcuggauugucucguuuuccugccaaauaaacaggaucagcgcuuuacagaucuaaaaaaaaaaaaaaaaaaaaaaaaaaaaaaaaaaaaaaaaaaaaaaaaaaaaaaaaaaaaaaaaugcaucccccccccccccccccccccccccccccccaaaggcucuuuucagagccaccagaauu

SEQ ID NO: 2810 - RNA, 1834 nt, Artificial Sequence
  mRNA product Design b-3 comprising derived and/or modified sequence from HRSV(A2)__F-del_DSCav1_mut2 (opt2)
gggagagucccgcagucggcguccagcggcucugcuuguucgugugugugucguugcaggccuuauucaagcuuaccauggagcuccucauccucaaggccaacgccaucaccaccauccucaccgccgucaccuucugcuucgccuccggccagaacaucaccgaggaguucuaccaguccaccugcuccgccgucuccaagggcuaccucggcgcccuccgcaccggcugguacaccuccgucaucaccaucgagcucuccaacaucaaggagaacaagugcaacggcaccgacgccaaggucaagcucaucaagcaggagcucgacaaguacaagaacgccgucaccgaccuccagcuccucaugcaguccacccccgccaccggcuccggcuccgccaucugcuccggcgucgccgucugcaagguccuccaccucgagggcgaggucaacaagaucaaguccgcccuccucuccaccaacaaggccgucgucucccucuccaacggcgucuccguccucaccuucaagguccucgaccucaagaacuacaucgacaagcagcuccuccccauccucaacaagcaguccugcuccauccccaacaucgagaccgucaucgaguuccagcagaagaacaaccgccuccucgagaucacccgcgaguucuccgucaacgccggcgucaccacccccgucuccaccuacaugcucaccaacuccgagcuccucucccucaucaacgacaugcccaucaccaacgaccagaagaagcucauguccaacaacguccagaucguccgccagcaguccuacuccaucaugugcaucaucaaggaggagguccucgccuacgucguccagcucccccucuacggcgucaucgacacccccugcuggaagcuccacaccuccccccucugcaccaccaacaccaaggagggcuccaacaucugccucacccgcaccgaccgcggcugguacugcgacaacgccggcuccgucuccuucuucccccaggccgagaccugcaagguccaguccaaccgcgucuucugcgacaccaugaacucccucacccuccccuccgaggucaaccucugcaacgucgacaucuucaaccccaaguacgacugcaagaucaugaccuccaagaccgacgucuccuccuccgucaucaccucccucggcgccaucgucuccugcuacggcaagaccaagugcaccgccuccaacaagaaccgcggcaucaucaagaccuucuccaacggcugcgacuacgucuccaacaagggcgucgacaccgucuccgucggcaacacccucuacugcgucaacaagcaggagggccagucccucuacgucaagggcgagcccaucaucaacuucuacgacccccucgucuuccccuccgacgaguucgacgccuccaucucccaggucaacgagaagaucaaccagucccucgccuucauccgcaaguccgacgagcuccuccacaacgucaacgccggcaaguccaccaccaacaucaugaucaccaccaucaucaucgucaucaucgucauccuccucucccucaucgccgucggccuccuccucuacugcaaggcccgcugaggacuaguguccaccugucccuccugggcugcuggauugucucguuuuccugccaaauaaacaggaucagcgcuuuacagaucuaaaaaaaaaaaaaaaaaaaaaaaaaaaaaaaaaaaaaaaaaaaaaaaaaaaaaaaaaaaaaaaaugcaucccccccccccccccccccccccccccccccaaaggcucuuuucagagccaccagaauu

SEQ ID NO: 2811 - RNA, 1834 nt, Artificial Sequence
  mRNA product Design b-3 comprising derived and/or modified sequence from HRSV(A2)__F-del_DSCav1_mut2 (opt3)
gggagagucccgcagucggcguccagcggcucugcuuguucgugugugugucguugcaggccuuauucaagcuuaccauggagcugcucauccuuaaggccaacgcuauuaccacaauacugacugcagugacguucugcuuugccagcggccagaauaucaccgaagaguucuaccaauccacauguucugcggucucaaaaggguauuugggagcuuuaagaacugguugguacaccaguguuauuacaaucgaacugagcaacauuaaggagaauaaaugcaacggcaccgacgccaaggugaaacuaaucaagcaggaacucgauaaguauaaaaaugcaguaacugaccugcagcuucugaugcaguccacacccgccaccgggucuggaucggcuauauguucaggcguggcagucugcaagguguugcaccucgagggugagguuaacaaaaucaagagcgcccugcugaguacgaauaaagcuguggucucccucucuaacggggugagcguauuaacuuuuaagguucuggaucuuaagaauuacauugacaaacaauugcugccuauccuaaacaagcaguccuguucaauuccaaauaucgaaaccgugauagaguuccagcagaaaaacaauaggcuccuggaaauuacacgggaguuuagugucaacgccggagugacuaccccggugagcacauauaugcuuaccaauucugagcuguugucccucaucaacgauaugcccauuacgaacgaccaaaagaaacugaugucaaauaacguccagaucguucgccagcagagcuacaguaucaugugcauuauaaaggaagagguguuagcguauguagugcaacugccucucuacggcgucaucgauacuccauguuggaaacuucauacaucuccccugugcaccacuaauacaaaggaaggcuccaacauuuguuugacccgaacggaccgugggugguacugcgauaaugcaggaagcgugucguucuuuccucaggccgagaccuguaagguucagucuaacagaguguucugcgacacaaugaacucccuaacucugccaucagaagucaaucucugcaauguggauaucuuuaaccccaaauaugacuguaagauaaugaccaguaaaacagauguaagcuccucuguuauuacuagccugggugcuaucgugucaugcuacggcaagaccaaauguacagccaguaauaagaacagggggaucauuaagaccuucuccaauggaugcgacuaugucagcaacaaaggcguggacacugucucuguggguaauacgcuuuacuguguuaacaagcaagaggggcagucacuguaugugaaaggagagccuaucauuaacuuuuacgauccauugguauucccgagugacgaauuugaugcaagcauaucccaggucaaugagaagaucaaccagucucucgcuuucauucggaaaucggacgaacuguuacacaaugugaacgccggcaagagcacaaccaauaucaugaucacuaccauuauaaucguuauuaucgugauucugcuaucccucaucgcggucggccugcuuuuguauugcaaggcccgcugaggacuaguguccaccugucccuccugggcugcuggauugucucguuuuccugccaaauaaacaggaucagcgcuuuacagaucuaaaaaaaaaaaaaaaaaaaaaaaaaaaaaaaaaaaaaaaaaaaaaaaaaaaaaaaaaaaaaaaaugcaucccccccccccccccccccccccccccccccaaaggcucuuuucagagccaccagaauu

SEQ ID NO: 2812 - RNA, 1834 nt, Artificial Sequence
  mRNA product Design b-3 comprising derived and/or modified sequence from HRSV(A2)__F-del_DSCav1_mut2 (opt4)
gggagagucccgcagucggcguccagcggcucugcuuguucgugugugugucguugcaggccuuauucaagcuuaccauggagcugcugauccugaaggccaacgccaucaccaccauccugaccgccgugaccuucugcuucgccagcggccagaacaucaccgaggaguucuaccagagcaccugcagcgccgugagcaagggcuaccugggcgcccugagaaccggcugguacaccagcgugaucaccaucgagcugagcaacaucaaggagaacaagugcaacggcaccgacgccaaggugaagcugaucaagcaggagcuggacaaguacaagaacgccgugaccgaccugcagcugcugaugcagagcacccccgccaccggcagcggcagcgccaucugcagcggcguggccgugugcaaggugcugcaccuggagggcgaggugaacaagaucaagagcgcccugcugagcaccaacaaggccguggugagccugagcaacggcgugagcgugcugaccuucaaggugcuggaccugaagaacuacaucgacaagcagcugcugcccauccugaacaagcagagcugcagcauccccaacaucgagaccgugaucgaguuccagcagaagaacaacagacugcuggagaucaccagagaguucagcgugaacgccggcgugaccacccccgugagcaccuacaugcugaccaacagcgagcugcugagccugaucaacgacaugcccaucaccaacgaccagaagaagcugaugagcaacaacgugcagaucgugagacagcagagcuacagcaucaugugcaucaucaaggaggaggugcuggccuacguggugcagcugccccuguacggcgugaucgacacccccugcuggaagcugcacaccagcccccugugcaccaccaacaccaaggagggcagcaacaucugccugaccagaaccgacagaggcugguacugcgacaacgccggcagcgugagcuucuucccccaggccgagaccugcaaggugcagagcaacagaguguucugcgacaccaugaacagccugacccugcccagcgaggugaaccugugcaacguggacaucuucaaccccaaguacgacugcaagaucaugaccagcaagaccgacgugagcagcagcgugaucaccagccugggcgccaucgugagcugcuacggcaagaccaagugcaccgccagcaacaagaacagaggcaucaucaagaccuucagcaacggcugcgacuacgugagcaacaagggcguggacaccgugagcgugggcaacacccuguacugcgugaacaagcaggagggccagagccuguacgugaagggcgagcccaucaucaacuucuacgacccccugguguuccccagcgacgaguucgacgccagcaucagccaggugaacgagaagaucaaccagagccuggccuucaucagaaagagcgacgagcugcugcacaacgugaacgccggcaagagcaccaccaacaucaugaucaccaccaucaucaucgugaucaucgugauccugcugagccugaucgccgugggccugcugcuguacugcaaggccagaugaggacuaguguccaccugucccuccugggcugcuggauugucucguuuuccugccaaauaaacaggaucagcgcuuuacagaucuaaaaaaaaaaaaaaaaaaaaaaaaaaaaaaaaaaaaaaaaaaaaaaaaaaaaaaaaaaaaaaaaugcaucccccccccccccccccccccccccccccccaaaggcucuuuucagagccaccagaauu

SEQ ID NO: 2813 - RNA, 1834 nt, Artificial Sequence
  mRNA product Design b-3 comprising derived and/or modified sequence from HRSV(A2)__F-del_DSCav1_mut2 (opt5)
gggagagucccgcagucggcguccagcggcucugcuuguucgugugugugucguugcaggccuuauucaagcuuaccauggagcugcucauccugaaggccaacgcuauuaccacaauccuuacggccgugaccuucugcuuugcgagcggccagaauauuacagaagaguucuaccaauccaccuguucugcugucagcaaaggguaucugggagcccucagaacaggcugguacaccuccguuaucacaauugaacugucuaacaucaaggagaauaaaugcaacgggaccgacgccaaggugaaacuuaucaagcaggaacuggauaaguauaaaaaugcugugacggaccuccagcugcugaugcagagcacccccgccacaggauccggcucugcuauuuguagcggggucgccgugugcaagguucuccaccuggagggagaggugaacaaaaucaaguccgcgcuucugagcaccaauaaagccgucgugucucucuccaacggcguuagcgugcugacauuuaagguccuugaucugaagaauuacauugacaaacaacuccugccuauccugaacaagcagucuuguuccauuccgaauaucgaaaccgugauugaguuccagcagaaaaacaaucggcuccuggaaaucacgcgcgaguuuagcgugaacgcuggcgucacaacccccguuucuacauauaugcuuaccaauuccgagcugcucagccugaucaacgauaugccuauuaccaacgaccaaaagaaacuuauguccaauaacgugcagaucgugagacagcagucuuacagcauuaugugcaucauuaaggaagagguccuggccuaugugguucaacucccccuguacggggugaucgauacaccuuguuggaaacugcauacgagcccccucugcaccacaaauaccaaggaaggauccaacaucugucugacacggaccgaccgcggcugguacugcgauaaugcugggucugucuccuucuuuccucaggccgagacguguaaggugcagagcaacagaguuuucugcgacacaaugaacucucuuacccugccgagcgaagugaaucucugcaaugucgauauuuuuaaccccaaauaugacuguaagaucaugaccuccaaaacagaugugucuagcuccgucauuaccagccugggagcgaucgugucuugcuacggcaagacaaaauguacggccuccaauaagaaccgggggauuaucaagaccuucagcaauggaugcgacuauguuucuaacaaaggcguggacacagucuccgugggcaauacccuuuacuguguuaacaagcaagaggggcagagccuguaugugaaaggagagccuaucauuaacuuuuacgauccccucgucuucccuuccgacgaauuugaugcuucuaucagccaggugaaugagaagauuaaccagucccuggccuucauccgcaaaucugacgaacugcuccacaaugugaacgcuggcaagagcacaaccaauauuaugaucacgaccauuaucaucguuauuaucgucauucugcuuucccugaucgccguggggcuccugcuguauugcaaggccagaugaggacuaguguccaccugucccuccugggcugcuggauugucucguuuuccugccaaauaaacaggaucagcgcuuuacagaucuaaaaaaaaaaaaaaaaaaaaaaaaaaaaaaaaaaaaaaaaaaaaaaaaaaaaaaaaaaaaaaaaugcaucccccccccccccccccccccccccccccccaaaggcucuuuucagagccaccagaauu

SEQ ID NO: 2814 - RNA, 1834 nt, Artificial Sequence
  mRNA product Design b-3 comprising derived and/or modified sequence from HRSV(A2)__F-del_DSCav1_mut2 (opt6)
gggagagucccgcagucggcguccagcggcucugcuuguucgugugugugucguugcaggccuuauucaagcuuaccauggaacuccuaauacuuaaagccaaugcaauaaccacaauacuaacagcaguaacauucugcuuugcaucaggacaaaacauaacagaagaauuuuaccaaucaacauguucagcaguaagcaaaggauaccuaggagccuuacgcacagguugguacacuuccguaauaacaauagaacucucaaauauaaaagaaaacaaaugcaacggaaccgaugcaaaaguaaaacuaauaaaacaagaauuagacaaauacaaaaacgcaguaacagaccuacaauuacuuaugcaaucaacacccgcaacaggauccggcucagcaaucuguucaggaguagcaguaugcaaaguucuccaccuagaaggcgaaguaaacaaaauaaaaucagcccuauuaucuaccaauaaagcaguaguaucacuaucaaauggaguaucuguccuaaccuucaaaguacuugaccuaaaaaauuacaucgacaaacaauuacuaccaauacuuaacaaacaaucauguucaauaccaaacauugaaacaguaauagaauuucaacaaaaaaauaacagauuauuagaaauaacccgcgaauuuucaguuaacgcaggaguaacaacaccaguauccacauacauguuaacaaauucagaacucuuaucacuuauaaacgacaugcccauaacaaacgaccaaaaaaaacucaugucuaacaauguucaaauaguucgacaacaaucauacuccauaaugugcauaauaaaagaagaaguucuagcauauguuguacaacucccacucuaugguguuauagacacaccaugcuggaaacuacauacaagccccuuaugcacuacaaacacaaaagaaggcucuaauauaugucuaacccgcacagacagaggcugguauugcgauaacgcagguucaguaucauucuuuccacaagcagaaacuugcaaaguccaauccaauagagucuucugcgacacuaugaacucacucacacucccaucugaagucaauuuauguaacgucgauaucuucaacccaaaauacgacugcaaaauaaugaccucaaaaacagacguaagcucaucagucauaacuucucuaggcgcaaucgucucauguuacggcaaaacaaaauguaccgcaucaaacaaaaaucgagguauaauaaaaaccuuuucuaacggcugcgacuacguaucaaacaaaggaguagauacuguaagugucggaaacacauuauacugcgucaacaaacaagaaggacaaucccuauauguuaaaggcgaaccuaucauuaauuucuacgacccacucgucuuuccauccgacgaauuugacgcaucaauuucccaaguaaaugaaaaaauaaaccaaucccuugcauucauaagaaaaucagaugaacuauuacacaacguaaacgcaggcaaaucaacaacaaauauaaugaucacaacaauaauaaucguaauaauaguaauccuacucucacuaauagcaguaggcuuacuauuauauugcaaagccagauaaggacuaguguccaccugucccuccugggcugcuggauugucucguuuuccugccaaauaaacaggaucagcgcuuuacagaucuaaaaaaaaaaaaaaaaaaaaaaaaaaaaaaaaaaaaaaaaaaaaaaaaaaaaaaaaaaaaaaaaugcaucccccccccccccccccccccccccccccccaaaggcucuuuucagagccaccagaauu

SEQ ID NO: 2815 - RNA, 1834 nt, Artificial Sequence
  mRNA product Design b-3 comprising derived and/or modified sequence from HRSV(A2)__F-del_DSCav1_mut2 (opt11)
gggagagucccgcagucggcguccagcggcucugcuuguucgugugugugucguugcaggccuuauucaagcuuaccauggaacuucuuauccuaaaagcgaacgccauaaccacaauccuaacagcagucaccuucuguuucgccucaggacaaaacaucaccgaggaauuuuaccaauccacauguagcgcugucucaaaaggcuaccucggcgcccuccgaaccggcugguacacauccguaauaacgaucgaacucuccaacauaaaagaaaauaaaugcaacggcaccgacgccaaagucaaacuuaucaaacaagaacuagacaaauacaaaaacgccgucaccgaccuccagcuccucaugcaauccaccccagcaacaggcuccggaagcgcaaucugcucaggcgucgccguaugcaaaguacuccaccucgaaggagaagucaacaaaaucaaauccgcccuccuauccacaaacaaagcaguugucucacucuccaacgggguaagcguacugaccuucaaaguccuagaccucaaaaacuacaucgauaaacaacuccuuccaauccucaacaaacaaucaugcucuauccccaacaucgaaaccguaaucgaauuucaacaaaaaaacaaccgccuacuugaaaucacacgcgaauuuagcgucaacgcaggaguaacaacacccguguccacauauaugcucacgaacagcgaacuacuaucccugauuaacgacaugcccaucaccaacgaccaaaaaaaacuaaugagcaacaacguacaaaucguccgccaacaaagcuacucuauaaugugcaucaucaaggaagaaguccuagccuacgucguccaauuaccacucuacggcgucaucgacacacccugcuggaaacuccauacauccccccucugcaccaccaacaccaaagaaggguccaacauaugccucacucgcacagaccgcggcugguacugcgacaacgcuggcagcgucagcuucuucccccaggccgaaaccugcaaaguccaauccaacagagucuucugcgacaccaugaacucgcucacccuccccuccgaggucaaccucugcaacgucgacauauucaaccccaaauacgacugcaaaaucaugaccuccaaaaccgacgucagcucaucagucaucacaucccucggggccaucgucuccugcuacggcaaaaccaagugcaccgccucaaacaaaaaccgcggcauuaucaaaacauucuccaacggcugcgacuacgucuccaacaaaggcgucgacacagucuccgucgguaacacccucuacugcguaaauaaacaagaaggccaaucccucuacgucaaaggcgaacccaucaucaacuucuacgacccucucgucuuccccuccgacgaauuugacgccucaaucagccaaguuaacgaaaaaaucaaccaaucacucgccuucauccgcaaauccgacgaacuccuccacaacguuaacgccggcaaaucuaccacgaacaucaugaucaccaccauaaucaucguaauuaucguaauacuccuaucccucauagcaguaggccuccuacucuacugcaaagcccguuaaggacuaguguccaccugucccuccugggcugcuggauugucucguuuuccugccaaauaaacaggaucagcgcuuuacagaucuaaaaaaaaaaaaaaaaaaaaaaaaaaaaaaaaaaaaaaaaaaaaaaaaaaaaaaaaaaaaaaaaugcaucccccccccccccccccccccccccccccccaaaggcucuuuucagagccaccagaauu

SEQ ID NO: 2816 - RNA, 1885 nt, Artificial Sequence
  mRNA product Design b-4 comprising derived and/or modified sequence from HRSV(A2)__F-del_DSCav1_mut2 (opt1)
gggagagucccgcagucggcguccagcggcucugcuuguucgugugugugucguugcaggccuuauucaagcuuaccauggagcugcucauccugaaggccaacgccaucaccaccauccugacggcggugaccuucugcuucgccagcggccagaacaucaccgaggaguucuaccaguccacgugcagcgccgucuccaagggguaccucggcgcccugcggaccggcugguacaccuccgugaucaccaucgagcugagcaacaucaaggagaacaagugcaacgggaccgacgccaaggugaagcucaucaagcaggagcuggacaaguacaagaacgcggucacggaccugcagcuccugaugcaguccaccccggcaaccggcuccggcuccgccaucugcagcggcgucgccgugugcaaggugcugcaccucgagggggaggucaacaagaucaagagcgcccugcuguccaccaacaaggccguggugagccucuccaacggcgucagcgugcugaccuucaaggugcuggaccucaagaacuacaucgacaagcagcugcugcccauccugaacaagcagagcugcuccauccccaacaucgagacggugaucgaguuccagcagaagaacaaccggcuccuggagaucacccgcgaguucagcgugaacgccggggucaccacccccguguccacguacaugcugaccaacagcgagcuccugucccugaucaacgacaugccgaucaccaacgaccagaagaagcucaugagcaacaacgugcagaucguccggcagcaguccuacagcaucaugugcaucaucaaggaggaggugcuggcguacgugguccagcugccccucuacggcgugaucgacacccccugcuggaagcugcacacgagcccccugugcaccaccaacaccaaggagggguccaacaucugccucacgcgcaccgaccggggcugguacugcgacaacgccggcagcgucuccuucuucccgcaggccgagaccugcaaggugcagagcaaccgcguguucugcgacaccaugaacucccugacgcugcccagcgagguaaaccucugcaacgucgacaucuucaaccccaaguacgacugcaagaucaugaccuccaagaccgacgugagcuccagcgugaucaccucccugggggccaucgucagcugcuacggcaagacgaagugcaccgccagcaacaagaaccgggggaucaucaagaccuucuccaacggcugcgacuacgugagcaacaagggcguggacaccguguccgucgggaacacccuguacugcgugaacaagcaggagggccagagccucuacgugaagggggagcccaucaucaacuucuacgacccgcuggucuuccccuccgacgaguucgacgcgagcaucucccaggugaacgagaagaucaaccagagccuggccuucauccgcaaguccgacgagcugcuccacaacgugaacgccggcaagagcacgaccaacaucaugaucaccaccaucaucaucgucaucaucgugauccugcugucccucaucgccguggggcugcugcucuacugcaaggcccggugaggacuaguaauaaggaaacuguaugaaugucugugggcaggaagugaagagauccuucuguaaagguuuuuggaauuaugucugcugaauaauaaacuuuuuugaaauaauaaaucugguagaaaaaugagaucuaaaaaaaaaaaaaaaaaaaaaaaaaaaaaaaaaaaaaaaaaaaaaaaaaaaaaaaaaaaaaaaaugcaucccccccccccccccccccccccccccccccaaaggcucuuuucagagccaccagaauu

SEQ ID NO: 2817 - RNA, 1885 nt, Artificial Sequence
  mRNA product Design b-4 comprising derived and/or modified sequence from HRSV(A2)__F-del_DSCav1_mut2 (opt1)
gggagagucccgcagucggcguccagcggcucugcuuguucgugugugugucguugcaggccuuauucaagcuuaccauggagcugcucauccugaaggccaacgccaucaccaccauccugacggcggugaccuucugcuucgccagcggccagaacaucaccgaggaguucuaccaguccacgugcagcgccgucuccaagggguaccucggcgcccugcgcaccgggugguacaccagcgugaucaccaucgagcuguccaacaucaaggagaacaagugcaacggcaccgacgccaaggugaagcucaucaagcaggagcuggacaaguacaagaacgcggucacggaccugcagcuccugaugcagagcacccccgccaccggguccggcagcgccaucugcuccggcguggccgugugcaagguccugcaccucgagggggaggugaacaagaucaagagcgcgcugcuguccaccaacaaggccguggucagccucuccaacggcgugagcgugcugacguucaagguccuggaccucaagaacuacaucgacaagcagcugcugccgauccucaacaagcaguccugcagcauccccaacaucgagaccgugaucgaguuccagcagaagaacaaccggcugcuggagaucacccgcgaguucuccgugaacgccggggucaccacgcccgugagcaccuacaugcucaccaacuccgagcugcugagccucaucaacgacaugcccaucaccaacgaccagaagaagcugaugagcaacaacgugcagaucguccggcagcaguccuacagcaucaugugcaucaucaaggaggaggugcuggccuacgugguccagcucccgcuguacggcgugaucgacacgcccugcuggaagcugcacaccagcccccucugcaccaccaacacgaaggagggguccaacaucugccugacccgcaccgaccggggcugguacugcgacaacgccggcuccgugagcuucuucccccaggcggagaccugcaagguccaguccaaccgcguguucugcgacacgaugaacagccugacccucccguccgaggucaaccugugcaacguggacaucuucaaccccaaguacgacugcaagaucaugaccagcaagaccgacguguccagcuccgucaucacgagccugggggccaucguguccugcuacggcaagaccaagugcaccgccagcaacaagaaccgggggaucaucaagaccuucuccaacggcugcgacuacgugagcaacaagggcgucgacacgguguccguggggaacacccucuacugcgucaacaagcaggagggccagagccuguacgugaagggggagcccaucaucaacuucuacgacccccugguguucccgagcgacgaguucgacgccuccaucagccaggucaacgagaagaucaaccagucccucgccuucauccgcaagagcgacgagcugcugcacaacgugaacgcgggcaaguccaccaccaacaucaugaucaccacgaucaucaucgugaucaucgucauccuccugagccugaucgccguggggcuccugcuguacugcaaggcccggugaggacuaguaauaaggaaacuguaugaaugucugugggcaggaagugaagagauccuucuguaaagguuuuuggaauuaugucugcugaauaauaaacuuuuuugaaauaauaaaucugguagaaaaaugagaucuaaaaaaaaaaaaaaaaaaaaaaaaaaaaaaaaaaaaaaaaaaaaaaaaaaaaaaaaaaaaaaaaugcaucccccccccccccccccccccccccccccccaaaggcucuuuucagagccaccagaauu

SEQ ID NO: 2818 - RNA, 1885 nt, Artificial Sequence
  mRNA product Design b-4 comprising derived and/or modified sequence from HRSV(A2)__F-del_DSCav1_mut2 (opt2)
gggagagucccgcagucggcguccagcggcucugcuuguucgugugugugucguugcaggccuuauucaagcuuaccauggagcuccucauccucaaggccaacgccaucaccaccauccucaccgccgucaccuucugcuucgccuccggccagaacaucaccgaggaguucuaccaguccaccugcuccgccgucuccaagggcuaccucggcgcccuccgcaccggcugguacaccuccgucaucaccaucgagcucuccaacaucaaggagaacaagugcaacggcaccgacgccaaggucaagcucaucaagcaggagcucgacaaguacaagaacgccgucaccgaccuccagcuccucaugcaguccacccccgccaccggcuccggcuccgccaucugcuccggcgucgccgucugcaagguccuccaccucgagggcgaggucaacaagaucaaguccgcccuccucuccaccaacaaggccgucgucucccucuccaacggcgucuccguccucaccuucaagguccucgaccucaagaacuacaucgacaagcagcuccuccccauccucaacaagcaguccugcuccauccccaacaucgagaccgucaucgaguuccagcagaagaacaaccgccuccucgagaucacccgcgaguucuccgucaacgccggcgucaccacccccgucuccaccuacaugcucaccaacuccgagcuccucucccucaucaacgacaugcccaucaccaacgaccagaagaagcucauguccaacaacguccagaucguccgccagcaguccuacuccaucaugugcaucaucaaggaggagguccucgccuacgucguccagcucccccucuacggcgucaucgacacccccugcuggaagcuccacaccuccccccucugcaccaccaacaccaaggagggcuccaacaucugccucacccgcaccgaccgcggcugguacugcgacaacgccggcuccgucuccuucuucccccaggccgagaccugcaagguccaguccaaccgcgucuucugcgacaccaugaacucccucacccuccccuccgaggucaaccucugcaacgucgacaucuucaaccccaaguacgacugcaagaucaugaccuccaagaccgacgucuccuccuccgucaucaccucccucggcgccaucgucuccugcuacggcaagaccaagugcaccgccuccaacaagaaccgcggcaucaucaagaccuucuccaacggcugcgacuacgucuccaacaagggcgucgacaccgucuccgucggcaacacccucuacugcgucaacaagcaggagggccagucccucuacgucaagggcgagcccaucaucaacuucuacgacccccucgucuuccccuccgacgaguucgacgccuccaucucccaggucaacgagaagaucaaccagucccucgccuucauccgcaaguccgacgagcuccuccacaacgucaacgccggcaaguccaccaccaacaucaugaucaccaccaucaucaucgucaucaucgucauccuccucucccucaucgccgucggccuccuccucuacugcaaggcccgcugaggacuaguaauaaggaaacuguaugaaugucugugggcaggaagugaagagauccuucuguaaagguuuuuggaauuaugucugcugaauaauaaacuuuuuugaaauaauaaaucugguagaaaaaugagaucuaaaaaaaaaaaaaaaaaaaaaaaaaaaaaaaaaaaaaaaaaaaaaaaaaaaaaaaaaaaaaaaaugcaucccccccccccccccccccccccccccccccaaaggcucuuuucagagccaccagaauu

SEQ ID NO: 2819 - RNA, 1885 nt, Artificial Sequence
  mRNA product Design b-4 comprising derived and/or modified sequence from HRSV(A2)__F-del_DSCav1_mut2 (opt3)
gggagagucccgcagucggcguccagcggcucugcuuguucgugugugugucguugcaggccuuauucaagcuuaccauggagcugcucauccuuaaggccaacgcuauuaccacaauacugacugcagugacguucugcuuugccagcggccagaauaucaccgaagaguucuaccaauccacauguucugcggucucaaaaggguauuugggagcuuuaagaacugguugguacaccaguguuauuacaaucgaacugagcaacauuaaggagaauaaaugcaacggcaccgacgccaaggugaaacuaaucaagcaggaacucgauaaguauaaaaaugcaguaacugaccugcagcuucugaugcaguccacacccgccaccgggucuggaucggcuauauguucaggcguggcagucugcaagguguugcaccucgagggugagguuaacaaaaucaagagcgcccugcugaguacgaauaaagcuguggucucccucucuaacggggugagcguauuaacuuuuaagguucuggaucuuaagaauuacauugacaaacaauugcugccuauccuaaacaagcaguccuguucaauuccaaauaucgaaaccgugauagaguuccagcagaaaaacaauaggcuccuggaaauuacacgggaguuuagugucaacgccggagugacuaccccggugagcacauauaugcuuaccaauucugagcuguugucccucaucaacgauaugcccauuacgaacgaccaaaagaaacugaugucaaauaacguccagaucguucgccagcagagcuacaguaucaugugcauuauaaaggaagagguguuagcguauguagugcaacugccucucuacggcgucaucgauacuccauguuggaaacuucauacaucuccccugugcaccacuaauacaaaggaaggcuccaacauuuguuugacccgaacggaccgugggugguacugcgauaaugcaggaagcgugucguucuuuccucaggccgagaccuguaagguucagucuaacagaguguucugcgacacaaugaacucccuaacucugccaucagaagucaaucucugcaauguggauaucuuuaaccccaaauaugacuguaagauaaugaccaguaaaacagauguaagcuccucuguuauuacuagccugggugcuaucgugucaugcuacggcaagaccaaauguacagccaguaauaagaacagggggaucauuaagaccuucuccaauggaugcgacuaugucagcaacaaaggcguggacacugucucuguggguaauacgcuuuacuguguuaacaagcaagaggggcagucacuguaugugaaaggagagccuaucauuaacuuuuacgauccauugguauucccgagugacgaauuugaugcaagcauaucccaggucaaugagaagaucaaccagucucucgcuuucauucggaaaucggacgaacuguuacacaaugugaacgccggcaagagcacaaccaauaucaugaucacuaccauuauaaucguuauuaucgugauucugcuaucccucaucgcggucggccugcuuuuguauugcaaggcccgcugaggacuaguaauaaggaaacuguaugaaugucugugggcaggaagugaagagauccuucuguaaagguuuuuggaauuaugucugcugaauaauaaacuuuuuugaaauaauaaaucugguagaaaaaugagaucuaaaaaaaaaaaaaaaaaaaaaaaaaaaaaaaaaaaaaaaaaaaaaaaaaaaaaaaaaaaaaaaaugcaucccccccccccccccccccccccccccccccaaaggcucuuuucagagccaccagaauu

SEQ ID NO: 2820 - RNA, 1885 nt, Artificial Sequence
  mRNA product Design b-4 comprising derived and/or modified sequence from HRSV(A2)__F-del_DSCav1_mut2 (opt4)
gggagagucccgcagucggcguccagcggcucugcuuguucgugugugugucguugcaggccuuauucaagcuuaccauggagcugcugauccugaaggccaacgccaucaccaccauccugaccgccgugaccuucugcuucgccagcggccagaacaucaccgaggaguucuaccagagcaccugcagcgccgugagcaagggcuaccugggcgcccugagaaccggcugguacaccagcgugaucaccaucgagcugagcaacaucaaggagaacaagugcaacggcaccgacgccaaggugaagcugaucaagcaggagcuggacaaguacaagaacgccgugaccgaccugcagcugcugaugcagagcacccccgccaccggcagcggcagcgccaucugcagcggcguggccgugugcaaggugcugcaccuggagggcgaggugaacaagaucaagagcgcccugcugagcaccaacaaggccguggugagccugagcaacggcgugagcgugcugaccuucaaggugcuggaccugaagaacuacaucgacaagcagcugcugcccauccugaacaagcagagcugcagcauccccaacaucgagaccgugaucgaguuccagcagaagaacaacagacugcuggagaucaccagagaguucagcgugaacgccggcgugaccacccccgugagcaccuacaugcugaccaacagcgagcugcugagccugaucaacgacaugcccaucaccaacgaccagaagaagcugaugagcaacaacgugcagaucgugagacagcagagcuacagcaucaugugcaucaucaaggaggaggugcuggccuacguggugcagcugccccuguacggcgugaucgacacccccugcuggaagcugcacaccagcccccugugcaccaccaacaccaaggagggcagcaacaucugccugaccagaaccgacagaggcugguacugcgacaacgccggcagcgugagcuucuucccccaggccgagaccugcaaggugcagagcaacagaguguucugcgacaccaugaacagccugacccugcccagcgaggugaaccugugcaacguggacaucuucaaccccaaguacgacugcaagaucaugaccagcaagaccgacgugagcagcagcgugaucaccagccugggcgccaucgugagcugcuacggcaagaccaagugcaccgccagcaacaagaacagaggcaucaucaagaccuucagcaacggcugcgacuacgugagcaacaagggcguggacaccgugagcgugggcaacacccuguacugcgugaacaagcaggagggccagagccuguacgugaagggcgagcccaucaucaacuucuacgacccccugguguuccccagcgacgaguucgacgccagcaucagccaggugaacgagaagaucaaccagagccuggccuucaucagaaagagcgacgagcugcugcacaacgugaacgccggcaagagcaccaccaacaucaugaucaccaccaucaucaucgugaucaucgugauccugcugagccugaucgccgugggccugcugcuguacugcaaggccagaugaggacuaguaauaaggaaacuguaugaaugucugugggcaggaagugaagagauccuucuguaaagguuuuuggaauuaugucugcugaauaauaaacuuuuuugaaauaauaaaucugguagaaaaaugagaucuaaaaaaaaaaaaaaaaaaaaaaaaaaaaaaaaaaaaaaaaaaaaaaaaaaaaaaaaaaaaaaaaugcaucccccccccccccccccccccccccccccccaaaggcucuuuucagagccaccagaauu

SEQ ID NO: 2821 - RNA, 1885 nt, Artificial Sequence
  mRNA product Design b-4 comprising derived and/or modified sequence from HRSV(A2)__F-del_DSCav1_mut2 (opt5)
gggagagucccgcagucggcguccagcggcucugcuuguucgugugugugucguugcaggccuuauucaagcuuaccauggagcugcucauccugaaggccaacgcuauuaccacaauccuuacggccgugaccuucugcuuugcgagcggccagaauauuacagaagaguucuaccaauccaccuguucugcugucagcaaaggguaucugggagcccucagaacaggcugguacaccuccguuaucacaauugaacugucuaacaucaaggagaauaaaugcaacgggaccgacgccaaggugaaacuuaucaagcaggaacuggauaaguauaaaaaugcugugacggaccuccagcugcugaugcagagcacccccgccacaggauccggcucugcuauuuguagcggggucgccgugugcaagguucuccaccuggagggagaggugaacaaaaucaaguccgcgcuucugagcaccaauaaagccgucgugucucucuccaacggcguuagcgugcugacauuuaagguccuugaucugaagaauuacauugacaaacaacuccugccuauccugaacaagcagucuuguuccauuccgaauaucgaaaccgugauugaguuccagcagaaaaacaaucggcuccuggaaaucacgcgcgaguuuagcgugaacgcuggcgucacaacccccguuucuacauauaugcuuaccaauuccgagcugcucagccugaucaacgauaugccuauuaccaacgaccaaaagaaacuuauguccaauaacgugcagaucgugagacagcagucuuacagcauuaugugcaucauuaaggaagagguccuggccuaugugguucaacucccccuguacggggugaucgauacaccuuguuggaaacugcauacgagcccccucugcaccacaaauaccaaggaaggauccaacaucugucugacacggaccgaccgcggcugguacugcgauaaugcugggucugucuccuucuuuccucaggccgagacguguaaggugcagagcaacagaguuuucugcgacacaaugaacucucuuacccugccgagcgaagugaaucucugcaaugucgauauuuuuaaccccaaauaugacuguaagaucaugaccuccaaaacagaugugucuagcuccgucauuaccagccugggagcgaucgugucuugcuacggcaagacaaaauguacggccuccaauaagaaccgggggauuaucaagaccuucagcaauggaugcgacuauguuucuaacaaaggcguggacacagucuccgugggcaauacccuuuacuguguuaacaagcaagaggggcagagccuguaugugaaaggagagccuaucauuaacuuuuacgauccccucgucuucccuuccgacgaauuugaugcuucuaucagccaggugaaugagaagauuaaccagucccuggccuucauccgcaaaucugacgaacugcuccacaaugugaacgcuggcaagagcacaaccaauauuaugaucacgaccauuaucaucguuauuaucgucauucugcuuucccugaucgccguggggcuccugcuguauugcaaggccagaugaggacuaguaauaaggaaacuguaugaaugucugugggcaggaagugaagagauccuucuguaaagguuuuuggaauuaugucugcugaauaauaaacuuuuuugaaauaauaaaucugguagaaaaaugagaucuaaaaaaaaaaaaaaaaaaaaaaaaaaaaaaaaaaaaaaaaaaaaaaaaaaaaaaaaaaaaaaaaugcaucccccccccccccccccccccccccccccccaaaggcucuuuucagagccaccagaauu

SEQ ID NO: 2822 - RNA, 1885 nt, Artificial Sequence
  mRNA product Design b-4 comprising derived and/or modified sequence from HRSV(A2)__F-del_DSCav1_mut2 (opt6)
gggagagucccgcagucggcguccagcggcucugcuuguucgugugugugucguugcaggccuuauucaagcuuaccauggaacuccuaauacuuaaagccaaugcaauaaccacaauacuaacagcaguaacauucugcuuugcaucaggacaaaacauaacagaagaauuuuaccaaucaacauguucagcaguaagcaaaggauaccuaggagccuuacgcacagguugguacacuuccguaauaacaauagaacucucaaauauaaaagaaaacaaaugcaacggaaccgaugcaaaaguaaaacuaauaaaacaagaauuagacaaauacaaaaacgcaguaacagaccuacaauuacuuaugcaaucaacacccgcaacaggauccggcucagcaaucuguucaggaguagcaguaugcaaaguucuccaccuagaaggcgaaguaaacaaaauaaaaucagcccuauuaucuaccaauaaagcaguaguaucacuaucaaauggaguaucuguccuaaccuucaaaguacuugaccuaaaaaauuacaucgacaaacaauuacuaccaauacuuaacaaacaaucauguucaauaccaaacauugaaacaguaauagaauuucaacaaaaaaauaacagauuauuagaaauaacccgcgaauuuucaguuaacgcaggaguaacaacaccaguauccacauacauguuaacaaauucagaacucuuaucacuuauaaacgacaugcccauaacaaacgaccaaaaaaaacucaugucuaacaauguucaaauaguucgacaacaaucauacuccauaaugugcauaauaaaagaagaaguucuagcauauguuguacaacucccacucuaugguguuauagacacaccaugcuggaaacuacauacaagccccuuaugcacuacaaacacaaaagaaggcucuaauauaugucuaacccgcacagacagaggcugguauugcgauaacgcagguucaguaucauucuuuccacaagcagaaacuugcaaaguccaauccaauagagucuucugcgacacuaugaacucacucacacucccaucugaagucaauuuauguaacgucgauaucuucaacccaaaauacgacugcaaaauaaugaccucaaaaacagacguaagcucaucagucauaacuucucuaggcgcaaucgucucauguuacggcaaaacaaaauguaccgcaucaaacaaaaaucgagguauaauaaaaaccuuuucuaacggcugcgacuacguaucaaacaaaggaguagauacuguaagugucggaaacacauuauacugcgucaacaaacaagaaggacaaucccuauauguuaaaggcgaaccuaucauuaauuucuacgacccacucgucuuuccauccgacgaauuugacgcaucaauuucccaaguaaaugaaaaaauaaaccaaucccuugcauucauaagaaaaucagaugaacuauuacacaacguaaacgcaggcaaaucaacaacaaauauaaugaucacaacaauaauaaucguaauaauaguaauccuacucucacuaauagcaguaggcuuacuauuauauugcaaagccagauaaggacuaguaauaaggaaacuguaugaaugucugugggcaggaagugaagagauccuucuguaaagguuuuuggaauuaugucugcugaauaauaaacuuuuuugaaauaauaaaucugguagaaaaaugagaucuaaaaaaaaaaaaaaaaaaaaaaaaaaaaaaaaaaaaaaaaaaaaaaaaaaaaaaaaaaaaaaaaugcaucccccccccccccccccccccccccccccccaaaggcucuuuucagagccaccagaauu

SEQ ID NO: 2823 - RNA, 1885 nt, Artificial Sequence
  mRNA product Design b-4 comprising derived and/or modified sequence from HRSV(A2)__F-del_DSCav1_mut2 (opt11)
gggagagucccgcagucggcguccagcggcucugcuuguucgugugugugucguugcaggccuuauucaagcuuaccauggaacuucuuauccuaaaagcgaacgccauaaccacaauccuaacagcagucaccuucuguuucgccucaggacaaaacaucaccgaggaauuuuaccaauccacauguagcgcugucucaaaaggcuaccucggcgcccuccgaaccggcugguacacauccguaauaacgaucgaacucuccaacauaaaagaaaauaaaugcaacggcaccgacgccaaagucaaacuuaucaaacaagaacuagacaaauacaaaaacgccgucaccgaccuccagcuccucaugcaauccaccccagcaacaggcuccggaagcgcaaucugcucaggcgucgccguaugcaaaguacuccaccucgaaggagaagucaacaaaaucaaauccgcccuccuauccacaaacaaagcaguugucucacucuccaacgggguaagcguacugaccuucaaaguccuagaccucaaaaacuacaucgauaaacaacuccuuccaauccucaacaaacaaucaugcucuauccccaacaucgaaaccguaaucgaauuucaacaaaaaaacaaccgccuacuugaaaucacacgcgaauuuagcgucaacgcaggaguaacaacacccguguccacauauaugcucacgaacagcgaacuacuaucccugauuaacgacaugcccaucaccaacgaccaaaaaaaacuaaugagcaacaacguacaaaucguccgccaacaaagcuacucuauaaugugcaucaucaaggaagaaguccuagccuacgucguccaauuaccacucuacggcgucaucgacacacccugcuggaaacuccauacauccccccucugcaccaccaacaccaaagaaggguccaacauaugccucacucgcacagaccgcggcugguacugcgacaacgcuggcagcgucagcuucuucccccaggccgaaaccugcaaaguccaauccaacagagucuucugcgacaccaugaacucgcucacccuccccuccgaggucaaccucugcaacgucgacauauucaaccccaaauacgacugcaaaaucaugaccuccaaaaccgacgucagcucaucagucaucacaucccucggggccaucgucuccugcuacggcaaaaccaagugcaccgccucaaacaaaaaccgcggcauuaucaaaacauucuccaacggcugcgacuacgucuccaacaaaggcgucgacacagucuccgucgguaacacccucuacugcguaaauaaacaagaaggccaaucccucuacgucaaaggcgaacccaucaucaacuucuacgacccucucgucuuccccuccgacgaauuugacgccucaaucagccaaguuaacgaaaaaaucaaccaaucacucgccuucauccgcaaauccgacgaacuccuccacaacguuaacgccggcaaaucuaccacgaacaucaugaucaccaccauaaucaucguaauuaucguaauacuccuaucccucauagcaguaggccuccuacucuacugcaaagcccguuaaggacuaguaauaaggaaacuguaugaaugucugugggcaggaagugaagagauccuucuguaaagguuuuuggaauuaugucugcugaauaauaaacuuuuuugaaauaauaaaucugguagaaaaaugagaucuaaaaaaaaaaaaaaaaaaaaaaaaaaaaaaaaaaaaaaaaaaaaaaaaaaaaaaaaaaaaaaaaugcaucccccccccccccccccccccccccccccccaaaggcucuuuucagagccaccagaauu

SEQ ID NO: 2824 - RNA, 1947 nt, Artificial Sequence
  mRNA product Design b-5 comprising derived and/or modified sequence from HRSV(A2)__F-del_DSCav1_mut2 (opt1)
gggagacuccugucgggcggaaguaggaggaguagaguuuaaaaacaguacucuuuuuccgguucgggacguaguugaagcaacgacaagccggauaaccgcucuugagacaggaagcuuaccauggagcugcucauccugaaggccaacgccaucaccaccauccugacggcggugaccuucugcuucgccagcggccagaacaucaccgaggaguucuaccaguccacgugcagcgccgucuccaagggguaccucggcgcccugcggaccggcugguacaccuccgugaucaccaucgagcugagcaacaucaaggagaacaagugcaacgggaccgacgccaaggugaagcucaucaagcaggagcuggacaaguacaagaacgcggucacggaccugcagcuccugaugcaguccaccccggcaaccggcuccggcuccgccaucugcagcggcgucgccgugugcaaggugcugcaccucgagggggaggucaacaagaucaagagcgcccugcuguccaccaacaaggccguggugagccucuccaacggcgucagcgugcugaccuucaaggugcuggaccucaagaacuacaucgacaagcagcugcugcccauccugaacaagcagagcugcuccauccccaacaucgagacggugaucgaguuccagcagaagaacaaccggcuccuggagaucacccgcgaguucagcgugaacgccggggucaccacccccguguccacguacaugcugaccaacagcgagcuccugucccugaucaacgacaugccgaucaccaacgaccagaagaagcucaugagcaacaacgugcagaucguccggcagcaguccuacagcaucaugugcaucaucaaggaggaggugcuggcguacgugguccagcugccccucuacggcgugaucgacacccccugcuggaagcugcacacgagcccccugugcaccaccaacaccaaggagggguccaacaucugccucacgcgcaccgaccggggcugguacugcgacaacgccggcagcgucuccuucuucccgcaggccgagaccugcaaggugcagagcaaccgcguguucugcgacaccaugaacucccugacgcugcccagcgagguaaaccucugcaacgucgacaucuucaaccccaaguacgacugcaagaucaugaccuccaagaccgacgugagcuccagcgugaucaccucccugggggccaucgucagcugcuacggcaagacgaagugcaccgccagcaacaagaaccgggggaucaucaagaccuucuccaacggcugcgacuacgugagcaacaagggcguggacaccguguccgucgggaacacccuguacugcgugaacaagcaggagggccagagccucuacgugaagggggagcccaucaucaacuucuacgacccgcuggucuuccccuccgacgaguucgacgcgagcaucucccaggugaacgagaagaucaaccagagccuggccuucauccgcaaguccgacgagcugcuccacaacgugaacgccggcaagagcacgaccaacaucaugaucaccaccaucaucaucgucaucaucgugauccugcugucccucaucgccguggggcugcugcucuacugcaaggcccggugaggacuaguacuggcugcaucucccuuuccucuguccuccauccuucucccaggauggugaagggggaccugguacccagugauccccaccccaggauccuaaaucaugacuuaccugcuaauaaaaacucauuggaaaagugagaagaucuaaaaaaaaaaaaaaaaaaaaaaaaaaaaaaaaaaaaaaaaaaaaaaaaaaaaaaaaaaaaaaaaugcaucccccccccccccccccccccccccccccccaaaggcucuuuucagagccaccagaauu

SEQ ID NO: 2825 - RNA, 1947 nt, Artificial Sequence
  mRNA product Design b-5 comprising derived and/or modified sequence from HRSV(A2)__F-del_DSCav1_mut2 (opt1)
gggagacuccugucgggcggaaguaggaggaguagaguuuaaaaacaguacucuuuuuccgguucgggacguaguugaagcaacgacaagccggauaaccgcucuugagacaggaagcuuaccauggagcugcucauccugaaggccaacgccaucaccaccauccugacggcggugaccuucugcuucgccagcggccagaacaucaccgaggaguucuaccaguccacgugcagcgccgucuccaagggguaccucggcgcccugcgcaccgggugguacaccagcgugaucaccaucgagcuguccaacaucaaggagaacaagugcaacggcaccgacgccaaggugaagcucaucaagcaggagcuggacaaguacaagaacgcggucacggaccugcagcuccugaugcagagcacccccgccaccggguccggcagcgccaucugcuccggcguggccgugugcaagguccugcaccucgagggggaggugaacaagaucaagagcgcgcugcuguccaccaacaaggccguggucagccucuccaacggcgugagcgugcugacguucaagguccuggaccucaagaacuacaucgacaagcagcugcugccgauccucaacaagcaguccugcagcauccccaacaucgagaccgugaucgaguuccagcagaagaacaaccggcugcuggagaucacccgcgaguucuccgugaacgccggggucaccacgcccgugagcaccuacaugcucaccaacuccgagcugcugagccucaucaacgacaugcccaucaccaacgaccagaagaagcugaugagcaacaacgugcagaucguccggcagcaguccuacagcaucaugugcaucaucaaggaggaggugcuggccuacgugguccagcucccgcuguacggcgugaucgacacgcccugcuggaagcugcacaccagcccccucugcaccaccaacacgaaggagggguccaacaucugccugacccgcaccgaccggggcugguacugcgacaacgccggcuccgugagcuucuucccccaggcggagaccugcaagguccaguccaaccgcguguucugcgacacgaugaacagccugacccucccguccgaggucaaccugugcaacguggacaucuucaaccccaaguacgacugcaagaucaugaccagcaagaccgacguguccagcuccgucaucacgagccugggggccaucguguccugcuacggcaagaccaagugcaccgccagcaacaagaaccgggggaucaucaagaccuucuccaacggcugcgacuacgugagcaacaagggcgucgacacgguguccguggggaacacccucuacugcgucaacaagcaggagggccagagccuguacgugaagggggagcccaucaucaacuucuacgacccccugguguucccgagcgacgaguucgacgccuccaucagccaggucaacgagaagaucaaccagucccucgccuucauccgcaagagcgacgagcugcugcacaacgugaacgcgggcaaguccaccaccaacaucaugaucaccacgaucaucaucgugaucaucgucauccuccugagccugaucgccguggggcuccugcuguacugcaaggcccggugaggacuaguacuggcugcaucucccuuuccucuguccuccauccuucucccaggauggugaagggggaccugguacccagugauccccaccccaggauccuaaaucaugacuuaccugcuaauaaaaacucauuggaaaagugagaagaucuaaaaaaaaaaaaaaaaaaaaaaaaaaaaaaaaaaaaaaaaaaaaaaaaaaaaaaaaaaaaaaaaugcaucccccccccccccccccccccccccccccccaaaggcucuuuucagagccaccagaauu

SEQ ID NO: 2826 - RNA, 1947 nt, Artificial Sequence
  mRNA product Design b-5 comprising derived and/or modified sequence from HRSV(A2)__F-del_DSCav1_mut2 (opt2)
gggagacuccugucgggcggaaguaggaggaguagaguuuaaaaacaguacucuuuuuccgguucgggacguaguugaagcaacgacaagccggauaaccgcucuugagacaggaagcuuaccauggagcuccucauccucaaggccaacgccaucaccaccauccucaccgccgucaccuucugcuucgccuccggccagaacaucaccgaggaguucuaccaguccaccugcuccgccgucuccaagggcuaccucggcgcccuccgcaccggcugguacaccuccgucaucaccaucgagcucuccaacaucaaggagaacaagugcaacggcaccgacgccaaggucaagcucaucaagcaggagcucgacaaguacaagaacgccgucaccgaccuccagcuccucaugcaguccacccccgccaccggcuccggcuccgccaucugcuccggcgucgccgucugcaagguccuccaccucgagggcgaggucaacaagaucaaguccgcccuccucuccaccaacaaggccgucgucucccucuccaacggcgucuccguccucaccuucaagguccucgaccucaagaacuacaucgacaagcagcuccuccccauccucaacaagcaguccugcuccauccccaacaucgagaccgucaucgaguuccagcagaagaacaaccgccuccucgagaucacccgcgaguucuccgucaacgccggcgucaccacccccgucuccaccuacaugcucaccaacuccgagcuccucucccucaucaacgacaugcccaucaccaacgaccagaagaagcucauguccaacaacguccagaucguccgccagcaguccuacuccaucaugugcaucaucaaggaggagguccucgccuacgucguccagcucccccucuacggcgucaucgacacccccugcuggaagcuccacaccuccccccucugcaccaccaacaccaaggagggcuccaacaucugccucacccgcaccgaccgcggcugguacugcgacaacgccggcuccgucuccuucuucccccaggccgagaccugcaagguccaguccaaccgcgucuucugcgacaccaugaacucccucacccuccccuccgaggucaaccucugcaacgucgacaucuucaaccccaaguacgacugcaagaucaugaccuccaagaccgacgucuccuccuccgucaucaccucccucggcgccaucgucuccugcuacggcaagaccaagugcaccgccuccaacaagaaccgcggcaucaucaagaccuucuccaacggcugcgacuacgucuccaacaagggcgucgacaccgucuccgucggcaacacccucuacugcgucaacaagcaggagggccagucccucuacgucaagggcgagcccaucaucaacuucuacgacccccucgucuuccccuccgacgaguucgacgccuccaucucccaggucaacgagaagaucaaccagucccucgccuucauccgcaaguccgacgagcuccuccacaacgucaacgccggcaaguccaccaccaacaucaugaucaccaccaucaucaucgucaucaucgucauccuccucucccucaucgccgucggccuccuccucuacugcaaggcccgcugaggacuaguacuggcugcaucucccuuuccucuguccuccauccuucucccaggauggugaagggggaccugguacccagugauccccaccccaggauccuaaaucaugacuuaccugcuaauaaaaacucauuggaaaagugagaagaucuaaaaaaaaaaaaaaaaaaaaaaaaaaaaaaaaaaaaaaaaaaaaaaaaaaaaaaaaaaaaaaaaugcaucccccccccccccccccccccccccccccccaaaggcucuuuucagagccaccagaauu

SEQ ID NO: 2827 - RNA, 1947 nt, Artificial Sequence
  mRNA product Design b-5 comprising derived and/or modified sequence from HRSV(A2)__F-del_DSCav1_mut2 (opt3)
gggagacuccugucgggcggaaguaggaggaguagaguuuaaaaacaguacucuuuuuccgguucgggacguaguugaagcaacgacaagccggauaaccgcucuugagacaggaagcuuaccauggagcugcucauccuuaaggccaacgcuauuaccacaauacugacugcagugacguucugcuuugccagcggccagaauaucaccgaagaguucuaccaauccacauguucugcggucucaaaaggguauuugggagcuuuaagaacugguugguacaccaguguuauuacaaucgaacugagcaacauuaaggagaauaaaugcaacggcaccgacgccaaggugaaacuaaucaagcaggaacucgauaaguauaaaaaugcaguaacugaccugcagcuucugaugcaguccacacccgccaccgggucuggaucggcuauauguucaggcguggcagucugcaagguguugcaccucgagggugagguuaacaaaaucaagagcgcccugcugaguacgaauaaagcuguggucucccucucuaacggggugagcguauuaacuuuuaagguucuggaucuuaagaauuacauugacaaacaauugcugccuauccuaaacaagcaguccuguucaauuccaaauaucgaaaccgugauagaguuccagcagaaaaacaauaggcuccuggaaauuacacgggaguuuagugucaacgccggagugacuaccccggugagcacauauaugcuuaccaauucugagcuguugucccucaucaacgauaugcccauuacgaacgaccaaaagaaacugaugucaaauaacguccagaucguucgccagcagagcuacaguaucaugugcauuauaaaggaagagguguuagcguauguagugcaacugccucucuacggcgucaucgauacuccauguuggaaacuucauacaucuccccugugcaccacuaauacaaaggaaggcuccaacauuuguuugacccgaacggaccgugggugguacugcgauaaugcaggaagcgugucguucuuuccucaggccgagaccuguaagguucagucuaacagaguguucugcgacacaaugaacucccuaacucugccaucagaagucaaucucugcaauguggauaucuuuaaccccaaauaugacuguaagauaaugaccaguaaaacagauguaagcuccucuguuauuacuagccugggugcuaucgugucaugcuacggcaagaccaaauguacagccaguaauaagaacagggggaucauuaagaccuucuccaauggaugcgacuaugucagcaacaaaggcguggacacugucucuguggguaauacgcuuuacuguguuaacaagcaagaggggcagucacuguaugugaaaggagagccuaucauuaacuuuuacgauccauugguauucccgagugacgaauuugaugcaagcauaucccaggucaaugagaagaucaaccagucucucgcuuucauucggaaaucggacgaacuguuacacaaugugaacgccggcaagagcacaaccaauaucaugaucacuaccauuauaaucguuauuaucgugauucugcuaucccucaucgcggucggccugcuuuuguauugcaaggcccgcugaggacuaguacuggcugcaucucccuuuccucuguccuccauccuucucccaggauggugaagggggaccugguacccagugauccccaccccaggauccuaaaucaugacuuaccugcuaauaaaaacucauuggaaaagugagaagaucuaaaaaaaaaaaaaaaaaaaaaaaaaaaaaaaaaaaaaaaaaaaaaaaaaaaaaaaaaaaaaaaaugcaucccccccccccccccccccccccccccccccaaaggcucuuuucagagccaccagaauu

SEQ ID NO: 2828 - RNA, 1947 nt, Artificial Sequence
  mRNA product Design b-5 comprising derived and/or modified sequence from HRSV(A2)__F-del_DSCav1_mut2 (opt4)
gggagacuccugucgggcggaaguaggaggaguagaguuuaaaaacaguacucuuuuuccgguucgggacguaguugaagcaacgacaagccggauaaccgcucuugagacaggaagcuuaccauggagcugcugauccugaaggccaacgccaucaccaccauccugaccgccgugaccuucugcuucgccagcggccagaacaucaccgaggaguucuaccagagcaccugcagcgccgugagcaagggcuaccugggcgcccugagaaccggcugguacaccagcgugaucaccaucgagcugagcaacaucaaggagaacaagugcaacggcaccgacgccaaggugaagcugaucaagcaggagcuggacaaguacaagaacgccgugaccgaccugcagcugcugaugcagagcacccccgccaccggcagcggcagcgccaucugcagcggcguggccgugugcaaggugcugcaccuggagggcgaggugaacaagaucaagagcgcccugcugagcaccaacaaggccguggugagccugagcaacggcgugagcgugcugaccuucaaggugcuggaccugaagaacuacaucgacaagcagcugcugcccauccugaacaagcagagcugcagcauccccaacaucgagaccgugaucgaguuccagcagaagaacaacagacugcuggagaucaccagagaguucagcgugaacgccggcgugaccacccccgugagcaccuacaugcugaccaacagcgagcugcugagccugaucaacgacaugcccaucaccaacgaccagaagaagcugaugagcaacaacgugcagaucgugagacagcagagcuacagcaucaugugcaucaucaaggaggaggugcuggccuacguggugcagcugccccuguacggcgugaucgacacccccugcuggaagcugcacaccagcccccugugcaccaccaacaccaaggagggcagcaacaucugccugaccagaaccgacagaggcugguacugcgacaacgccggcagcgugagcuucuucccccaggccgagaccugcaaggugcagagcaacagaguguucugcgacaccaugaacagccugacccugcccagcgaggugaaccugugcaacguggacaucuucaaccccaaguacgacugcaagaucaugaccagcaagaccgacgugagcagcagcgugaucaccagccugggcgccaucgugagcugcuacggcaagaccaagugcaccgccagcaacaagaacagaggcaucaucaagaccuucagcaacggcugcgacuacgugagcaacaagggcguggacaccgugagcgugggcaacacccuguacugcgugaacaagcaggagggccagagccuguacgugaagggcgagcccaucaucaacuucuacgacccccugguguuccccagcgacgaguucgacgccagcaucagccaggugaacgagaagaucaaccagagccuggccuucaucagaaagagcgacgagcugcugcacaacgugaacgccggcaagagcaccaccaacaucaugaucaccaccaucaucaucgugaucaucgugauccugcugagccugaucgccgugggccugcugcuguacugcaaggccagaugaggacuaguacuggcugcaucucccuuuccucuguccuccauccuucucccaggauggugaagggggaccugguacccagugauccccaccccaggauccuaaaucaugacuuaccugcuaauaaaaacucauuggaaaagugagaagaucuaaaaaaaaaaaaaaaaaaaaaaaaaaaaaaaaaaaaaaaaaaaaaaaaaaaaaaaaaaaaaaaaugcaucccccccccccccccccccccccccccccccaaaggcucuuuucagagccaccagaauu

SEQ ID NO: 2829 - RNA, 1947 nt, Artificial Sequence
  mRNA product Design b-5 comprising derived and/or modified sequence from HRSV(A2)__F-del_DSCav1_mut2 (opt5)
gggagacuccugucgggcggaaguaggaggaguagaguuuaaaaacaguacucuuuuuccgguucgggacguaguugaagcaacgacaagccggauaaccgcucuugagacaggaagcuuaccauggagcugcucauccugaaggccaacgcuauuaccacaauccuuacggccgugaccuucugcuuugcgagcggccagaauauuacagaagaguucuaccaauccaccuguucugcugucagcaaaggguaucugggagcccucagaacaggcugguacaccuccguuaucacaauugaacugucuaacaucaaggagaauaaaugcaacgggaccgacgccaaggugaaacuuaucaagcaggaacuggauaaguauaaaaaugcugugacggaccuccagcugcugaugcagagcacccccgccacaggauccggcucugcuauuuguagcggggucgccgugugcaagguucuccaccuggagggagaggugaacaaaaucaaguccgcgcuucugagcaccaauaaagccgucgugucucucuccaacggcguuagcgugcugacauuuaagguccuugaucugaagaauuacauugacaaacaacuccugccuauccugaacaagcagucuuguuccauuccgaauaucgaaaccgugauugaguuccagcagaaaaacaaucggcuccuggaaaucacgcgcgaguuuagcgugaacgcuggcgucacaacccccguuucuacauauaugcuuaccaauuccgagcugcucagccugaucaacgauaugccuauuaccaacgaccaaaagaaacuuauguccaauaacgugcagaucgugagacagcagucuuacagcauuaugugcaucauuaaggaagagguccuggccuaugugguucaacucccccuguacggggugaucgauacaccuuguuggaaacugcauacgagcccccucugcaccacaaauaccaaggaaggauccaacaucugucugacacggaccgaccgcggcugguacugcgauaaugcugggucugucuccuucuuuccucaggccgagacguguaaggugcagagcaacagaguuuucugcgacacaaugaacucucuuacccugccgagcgaagugaaucucugcaaugucgauauuuuuaaccccaaauaugacuguaagaucaugaccuccaaaacagaugugucuagcuccgucauuaccagccugggagcgaucgugucuugcuacggcaagacaaaauguacggccuccaauaagaaccgggggauuaucaagaccuucagcaauggaugcgacuauguuucuaacaaaggcguggacacagucuccgugggcaauacccuuuacuguguuaacaagcaagaggggcagagccuguaugugaaaggagagccuaucauuaacuuuuacgauccccucgucuucccuuccgacgaauuugaugcuucuaucagccaggugaaugagaagauuaaccagucccuggccuucauccgcaaaucugacgaacugcuccacaaugugaacgcuggcaagagcacaaccaauauuaugaucacgaccauuaucaucguuauuaucgucauucugcuuucccugaucgccguggggcuccugcuguauugcaaggccagaugaggacuaguacuggcugcaucucccuuuccucuguccuccauccuucucccaggauggugaagggggaccugguacccagugauccccaccccaggauccuaaaucaugacuuaccugcuaauaaaaacucauuggaaaagugagaagaucuaaaaaaaaaaaaaaaaaaaaaaaaaaaaaaaaaaaaaaaaaaaaaaaaaaaaaaaaaaaaaaaaugcaucccccccccccccccccccccccccccccccaaaggcucuuuucagagccaccagaauu

SEQ ID NO: 2830 - RNA, 1947 nt, Artificial Sequence
  mRNA product Design b-5 comprising derived and/or modified sequence from HRSV(A2)__F-del_DSCav1_mut2 (opt6)
gggagacuccugucgggcggaaguaggaggaguagaguuuaaaaacaguacucuuuuuccgguucgggacguaguugaagcaacgacaagccggauaaccgcucuugagacaggaagcuuaccauggaacuccuaauacuuaaagccaaugcaauaaccacaauacuaacagcaguaacauucugcuuugcaucaggacaaaacauaacagaagaauuuuaccaaucaacauguucagcaguaagcaaaggauaccuaggagccuuacgcacagguugguacacuuccguaauaacaauagaacucucaaauauaaaagaaaacaaaugcaacggaaccgaugcaaaaguaaaacuaauaaaacaagaauuagacaaauacaaaaacgcaguaacagaccuacaauuacuuaugcaaucaacacccgcaacaggauccggcucagcaaucuguucaggaguagcaguaugcaaaguucuccaccuagaaggcgaaguaaacaaaauaaaaucagcccuauuaucuaccaauaaagcaguaguaucacuaucaaauggaguaucuguccuaaccuucaaaguacuugaccuaaaaaauuacaucgacaaacaauuacuaccaauacuuaacaaacaaucauguucaauaccaaacauugaaacaguaauagaauuucaacaaaaaaauaacagauuauuagaaauaacccgcgaauuuucaguuaacgcaggaguaacaacaccaguauccacauacauguuaacaaauucagaacucuuaucacuuauaaacgacaugcccauaacaaacgaccaaaaaaaacucaugucuaacaauguucaaauaguucgacaacaaucauacuccauaaugugcauaauaaaagaagaaguucuagcauauguuguacaacucccacucuaugguguuauagacacaccaugcuggaaacuacauacaagccccuuaugcacuacaaacacaaaagaaggcucuaauauaugucuaacccgcacagacagaggcugguauugcgauaacgcagguucaguaucauucuuuccacaagcagaaacuugcaaaguccaauccaauagagucuucugcgacacuaugaacucacucacacucccaucugaagucaauuuauguaacgucgauaucuucaacccaaaauacgacugcaaaauaaugaccucaaaaacagacguaagcucaucagucauaacuucucuaggcgcaaucgucucauguuacggcaaaacaaaauguaccgcaucaaacaaaaaucgagguauaauaaaaaccuuuucuaacggcugcgacuacguaucaaacaaaggaguagauacuguaagugucggaaacacauuauacugcgucaacaaacaagaaggacaaucccuauauguuaaaggcgaaccuaucauuaauuucuacgacccacucgucuuuccauccgacgaauuugacgcaucaauuucccaaguaaaugaaaaaauaaaccaaucccuugcauucauaagaaaaucagaugaacuauuacacaacguaaacgcaggcaaaucaacaacaaauauaaugaucacaacaauaauaaucguaauaauaguaauccuacucucacuaauagcaguaggcuuacuauuauauugcaaagccagauaaggacuaguacuggcugcaucucccuuuccucuguccuccauccuucucccaggauggugaagggggaccugguacccagugauccccaccccaggauccuaaaucaugacuuaccugcuaauaaaaacucauuggaaaagugagaagaucuaaaaaaaaaaaaaaaaaaaaaaaaaaaaaaaaaaaaaaaaaaaaaaaaaaaaaaaaaaaaaaaaugcaucccccccccccccccccccccccccccccccaaaggcucuuuucagagccaccagaauu

SEQ ID NO: 2831 - RNA, 1947 nt, Artificial Sequence
  mRNA product Design b-5 comprising derived and/or modified sequence from HRSV(A2)__F-del_DSCav1_mut2 (opt11)
gggagacuccugucgggcggaaguaggaggaguagaguuuaaaaacaguacucuuuuuccgguucgggacguaguugaagcaacgacaagccggauaaccgcucuugagacaggaagcuuaccauggaacuucuuauccuaaaagcgaacgccauaaccacaauccuaacagcagucaccuucuguuucgccucaggacaaaacaucaccgaggaauuuuaccaauccacauguagcgcugucucaaaaggcuaccucggcgcccuccgaaccggcugguacacauccguaauaacgaucgaacucuccaacauaaaagaaaauaaaugcaacggcaccgacgccaaagucaaacuuaucaaacaagaacuagacaaauacaaaaacgccgucaccgaccuccagcuccucaugcaauccaccccagcaacaggcuccggaagcgcaaucugcucaggcgucgccguaugcaaaguacuccaccucgaaggagaagucaacaaaaucaaauccgcccuccuauccacaaacaaagcaguugucucacucuccaacgggguaagcguacugaccuucaaaguccuagaccucaaaaacuacaucgauaaacaacuccuuccaauccucaacaaacaaucaugcucuauccccaacaucgaaaccguaaucgaauuucaacaaaaaaacaaccgccuacuugaaaucacacgcgaauuuagcgucaacgcaggaguaacaacacccguguccacauauaugcucacgaacagcgaacuacuaucccugauuaacgacaugcccaucaccaacgaccaaaaaaaacuaaugagcaacaacguacaaaucguccgccaacaaagcuacucuauaaugugcaucaucaaggaagaaguccuagccuacgucguccaauuaccacucuacggcgucaucgacacacccugcuggaaacuccauacauccccccucugcaccaccaacaccaaagaaggguccaacauaugccucacucgcacagaccgcggcugguacugcgacaacgcuggcagcgucagcuucuucccccaggccgaaaccugcaaaguccaauccaacagagucuucugcgacaccaugaacucgcucacccuccccuccgaggucaaccucugcaacgucgacauauucaaccccaaauacgacugcaaaaucaugaccuccaaaaccgacgucagcucaucagucaucacaucccucggggccaucgucuccugcuacggcaaaaccaagugcaccgccucaaacaaaaaccgcggcauuaucaaaacauucuccaacggcugcgacuacgucuccaacaaaggcgucgacacagucuccgucgguaacacccucuacugcguaaauaaacaagaaggccaaucccucuacgucaaaggcgaacccaucaucaacuucuacgacccucucgucuuccccuccgacgaauuugacgccucaaucagccaaguuaacgaaaaaaucaaccaaucacucgccuucauccgcaaauccgacgaacuccuccacaacguuaacgccggcaaaucuaccacgaacaucaugaucaccaccauaaucaucguaauuaucguaauacuccuaucccucauagcaguaggccuccuacucuacugcaaagcccguuaaggacuaguacuggcugcaucucccuuuccucuguccuccauccuucucccaggauggugaagggggaccugguacccagugauccccaccccaggauccuaaaucaugacuuaccugcuaauaaaaacucauuggaaaagugagaagaucuaaaaaaaaaaaaaaaaaaaaaaaaaaaaaaaaaaaaaaaaaaaaaaaaaaaaaaaaaaaaaaaaugcaucccccccccccccccccccccccccccccccaaaggcucuuuucagagccaccagaauu

SEQ ID NO: 2832 - RNA, 1853 nt, Artificial Sequence
  mRNA product Design c-1 comprising derived and/or modified sequence from HRSV(A2)__F-del_DSCav1_mut2 (opt1)
gggagaguccgcucagccagguugcagaagcggcuuagcguguguccuaaucuucucucugcguguagguaggccugugccgcaaacaagcuuaccauggagcugcucauccugaaggccaacgccaucaccaccauccugacggcggugaccuucugcuucgccagcggccagaacaucaccgaggaguucuaccaguccacgugcagcgccgucuccaagggguaccucggcgcccugcggaccggcugguacaccuccgugaucaccaucgagcugagcaacaucaaggagaacaagugcaacgggaccgacgccaaggugaagcucaucaagcaggagcuggacaaguacaagaacgcggucacggaccugcagcuccugaugcaguccaccccggcaaccggcuccggcuccgccaucugcagcggcgucgccgugugcaaggugcugcaccucgagggggaggucaacaagaucaagagcgcccugcuguccaccaacaaggccguggugagccucuccaacggcgucagcgugcugaccuucaaggugcuggaccucaagaacuacaucgacaagcagcugcugcccauccugaacaagcagagcugcuccauccccaacaucgagacggugaucgaguuccagcagaagaacaaccggcuccuggagaucacccgcgaguucagcgugaacgccggggucaccacccccguguccacguacaugcugaccaacagcgagcuccugucccugaucaacgacaugccgaucaccaacgaccagaagaagcucaugagcaacaacgugcagaucguccggcagcaguccuacagcaucaugugcaucaucaaggaggaggugcuggcguacgugguccagcugccccucuacggcgugaucgacacccccugcuggaagcugcacacgagcccccugugcaccaccaacaccaaggagggguccaacaucugccucacgcgcaccgaccggggcugguacugcgacaacgccggcagcgucuccuucuucccgcaggccgagaccugcaaggugcagagcaaccgcguguucugcgacaccaugaacucccugacgcugcccagcgagguaaaccucugcaacgucgacaucuucaaccccaaguacgacugcaagaucaugaccuccaagaccgacgugagcuccagcgugaucaccucccugggggccaucgucagcugcuacggcaagacgaagugcaccgccagcaacaagaaccgggggaucaucaagaccuucuccaacggcugcgacuacgugagcaacaagggcguggacaccguguccgucgggaacacccuguacugcgugaacaagcaggagggccagagccucuacgugaagggggagcccaucaucaacuucuacgacccgcuggucuuccccuccgacgaguucgacgcgagcaucucccaggugaacgagaagaucaaccagagccuggccuucauccgcaaguccgacgagcugcuccacaacgugaacgccggcaagagcacgaccaacaucaugaucaccaccaucaucaucgucaucaucgugauccugcugucccucaucgccguggggcugcugcucuacugcaaggcccggugaggacuaguguccaccugucccuccugggcugcuggauugucucguuuuccugccaaauaaacaggaucagcgcuuuacagaucuaaaaaaaaaaaaaaaaaaaaaaaaaaaaaaaaaaaaaaaaaaaaaaaaaaaaaaaaaaaaaaaaugcaucccccccccccccccccccccccccccccccaaaggcucuuuucagagccaccagaauu

SEQ ID NO: 2833 - RNA, 1853 nt, Artificial Sequence
  mRNA product Design c-1 comprising derived and/or modified sequence from HRSV(A2)__F-del_DSCav1_mut2 (opt1)
gggagaguccgcucagccagguugcagaagcggcuuagcguguguccuaaucuucucucugcguguagguaggccugugccgcaaacaagcuuaccauggagcugcucauccugaaggccaacgccaucaccaccauccugacggcggugaccuucugcuucgccagcggccagaacaucaccgaggaguucuaccaguccacgugcagcgccgucuccaagggguaccucggcgcccugcgcaccgggugguacaccagcgugaucaccaucgagcuguccaacaucaaggagaacaagugcaacggcaccgacgccaaggugaagcucaucaagcaggagcuggacaaguacaagaacgcggucacggaccugcagcuccugaugcagagcacccccgccaccggguccggcagcgccaucugcuccggcguggccgugugcaagguccugcaccucgagggggaggugaacaagaucaagagcgcgcugcuguccaccaacaaggccguggucagccucuccaacggcgugagcgugcugacguucaagguccuggaccucaagaacuacaucgacaagcagcugcugccgauccucaacaagcaguccugcagcauccccaacaucgagaccgugaucgaguuccagcagaagaacaaccggcugcuggagaucacccgcgaguucuccgugaacgccggggucaccacgcccgugagcaccuacaugcucaccaacuccgagcugcugagccucaucaacgacaugcccaucaccaacgaccagaagaagcugaugagcaacaacgugcagaucguccggcagcaguccuacagcaucaugugcaucaucaaggaggaggugcuggccuacgugguccagcucccgcuguacggcgugaucgacacgcccugcuggaagcugcacaccagcccccucugcaccaccaacacgaaggagggguccaacaucugccugacccgcaccgaccggggcugguacugcgacaacgccggcuccgugagcuucuucccccaggcggagaccugcaagguccaguccaaccgcguguucugcgacacgaugaacagccugacccucccguccgaggucaaccugugcaacguggacaucuucaaccccaaguacgacugcaagaucaugaccagcaagaccgacguguccagcuccgucaucacgagccugggggccaucguguccugcuacggcaagaccaagugcaccgccagcaacaagaaccgggggaucaucaagaccuucuccaacggcugcgacuacgugagcaacaagggcgucgacacgguguccguggggaacacccucuacugcgucaacaagcaggagggccagagccuguacgugaagggggagcccaucaucaacuucuacgacccccugguguucccgagcgacgaguucgacgccuccaucagccaggucaacgagaagaucaaccagucccucgccuucauccgcaagagcgacgagcugcugcacaacgugaacgcgggcaaguccaccaccaacaucaugaucaccacgaucaucaucgugaucaucgucauccuccugagccugaucgccguggggcuccugcuguacugcaaggcccggugaggacuaguguccaccugucccuccugggcugcuggauugucucguuuuccugccaaauaaacaggaucagcgcuuuacagaucuaaaaaaaaaaaaaaaaaaaaaaaaaaaaaaaaaaaaaaaaaaaaaaaaaaaaaaaaaaaaaaaaugcaucccccccccccccccccccccccccccccccaaaggcucuuuucagagccaccagaauu

SEQ ID NO: 2834 - RNA, 1853 nt, Artificial Sequence
  mRNA product Design c-1 comprising derived and/or modified sequence from HRSV(A2)__F-del_DSCav1_mut2 (opt2)
gggagaguccgcucagccagguugcagaagcggcuuagcguguguccuaaucuucucucugcguguagguaggccugugccgcaaacaagcuuaccauggagcuccucauccucaaggccaacgccaucaccaccauccucaccgccgucaccuucugcuucgccuccggccagaacaucaccgaggaguucuaccaguccaccugcuccgccgucuccaagggcuaccucggcgcccuccgcaccggcugguacaccuccgucaucaccaucgagcucuccaacaucaaggagaacaagugcaacggcaccgacgccaaggucaagcucaucaagcaggagcucgacaaguacaagaacgccgucaccgaccuccagcuccucaugcaguccacccccgccaccggcuccggcuccgccaucugcuccggcgucgccgucugcaagguccuccaccucgagggcgaggucaacaagaucaaguccgcccuccucuccaccaacaaggccgucgucucccucuccaacggcgucuccguccucaccuucaagguccucgaccucaagaacuacaucgacaagcagcuccuccccauccucaacaagcaguccugcuccauccccaacaucgagaccgucaucgaguuccagcagaagaacaaccgccuccucgagaucacccgcgaguucuccgucaacgccggcgucaccacccccgucuccaccuacaugcucaccaacuccgagcuccucucccucaucaacgacaugcccaucaccaacgaccagaagaagcucauguccaacaacguccagaucguccgccagcaguccuacuccaucaugugcaucaucaaggaggagguccucgccuacgucguccagcucccccucuacggcgucaucgacacccccugcuggaagcuccacaccuccccccucugcaccaccaacaccaaggagggcuccaacaucugccucacccgcaccgaccgcggcugguacugcgacaacgccggcuccgucuccuucuucccccaggccgagaccugcaagguccaguccaaccgcgucuucugcgacaccaugaacucccucacccuccccuccgaggucaaccucugcaacgucgacaucuucaaccccaaguacgacugcaagaucaugaccuccaagaccgacgucuccuccuccgucaucaccucccucggcgccaucgucuccugcuacggcaagaccaagugcaccgccuccaacaagaaccgcggcaucaucaagaccuucuccaacggcugcgacuacgucuccaacaagggcgucgacaccgucuccgucggcaacacccucuacugcgucaacaagcaggagggccagucccucuacgucaagggcgagcccaucaucaacuucuacgacccccucgucuuccccuccgacgaguucgacgccuccaucucccaggucaacgagaagaucaaccagucccucgccuucauccgcaaguccgacgagcuccuccacaacgucaacgccggcaaguccaccaccaacaucaugaucaccaccaucaucaucgucaucaucgucauccuccucucccucaucgccgucggccuccuccucuacugcaaggcccgcugaggacuaguguccaccugucccuccugggcugcuggauugucucguuuuccugccaaauaaacaggaucagcgcuuuacagaucuaaaaaaaaaaaaaaaaaaaaaaaaaaaaaaaaaaaaaaaaaaaaaaaaaaaaaaaaaaaaaaaaugcaucccccccccccccccccccccccccccccccaaaggcucuuuucagagccaccagaauu

SEQ ID NO: 2835 - RNA, 1853 nt, Artificial Sequence
  mRNA product Design c-1 comprising derived and/or modified sequence from HRSV(A2)__F-del_DSCav1_mut2 (opt3)
gggagaguccgcucagccagguugcagaagcggcuuagcguguguccuaaucuucucucugcguguagguaggccugugccgcaaacaagcuuaccauggagcugcucauccuuaaggccaacgcuauuaccacaauacugacugcagugacguucugcuuugccagcggccagaauaucaccgaagaguucuaccaauccacauguucugcggucucaaaaggguauuugggagcuuuaagaacugguugguacaccaguguuauuacaaucgaacugagcaacauuaaggagaauaaaugcaacggcaccgacgccaaggugaaacuaaucaagcaggaacucgauaaguauaaaaaugcaguaacugaccugcagcuucugaugcaguccacacccgccaccgggucuggaucggcuauauguucaggcguggcagucugcaagguguugcaccucgagggugagguuaacaaaaucaagagcgcccugcugaguacgaauaaagcuguggucucccucucuaacggggugagcguauuaacuuuuaagguucuggaucuuaagaauuacauugacaaacaauugcugccuauccuaaacaagcaguccuguucaauuccaaauaucgaaaccgugauagaguuccagcagaaaaacaauaggcuccuggaaauuacacgggaguuuagugucaacgccggagugacuaccccggugagcacauauaugcuuaccaauucugagcuguugucccucaucaacgauaugcccauuacgaacgaccaaaagaaacugaugucaaauaacguccagaucguucgccagcagagcuacaguaucaugugcauuauaaaggaagagguguuagcguauguagugcaacugccucucuacggcgucaucgauacuccauguuggaaacuucauacaucuccccugugcaccacuaauacaaaggaaggcuccaacauuuguuugacccgaacggaccgugggugguacugcgauaaugcaggaagcgugucguucuuuccucaggccgagaccuguaagguucagucuaacagaguguucugcgacacaaugaacucccuaacucugccaucagaagucaaucucugcaauguggauaucuuuaaccccaaauaugacuguaagauaaugaccaguaaaacagauguaagcuccucuguuauuacuagccugggugcuaucgugucaugcuacggcaagaccaaauguacagccaguaauaagaacagggggaucauuaagaccuucuccaauggaugcgacuaugucagcaacaaaggcguggacacugucucuguggguaauacgcuuuacuguguuaacaagcaagaggggcagucacuguaugugaaaggagagccuaucauuaacuuuuacgauccauugguauucccgagugacgaauuugaugcaagcauaucccaggucaaugagaagaucaaccagucucucgcuuucauucggaaaucggacgaacuguuacacaaugugaacgccggcaagagcacaaccaauaucaugaucacuaccauuauaaucguuauuaucgugauucugcuaucccucaucgcggucggccugcuuuuguauugcaaggcccgcugaggacuaguguccaccugucccuccugggcugcuggauugucucguuuuccugccaaauaaacaggaucagcgcuuuacagaucuaaaaaaaaaaaaaaaaaaaaaaaaaaaaaaaaaaaaaaaaaaaaaaaaaaaaaaaaaaaaaaaaugcaucccccccccccccccccccccccccccccccaaaggcucuuuucagagccaccagaauu

SEQ ID NO: 2836 - RNA, 1853 nt, Artificial Sequence
  mRNA product Design c-1 comprising derived and/or modified sequence from HRSV(A2)__F-del_DSCav1_mut2 (opt4)
gggagaguccgcucagccagguugcagaagcggcuuagcguguguccuaaucuucucucugcguguagguaggccugugccgcaaacaagcuuaccauggagcugcugauccugaaggccaacgccaucaccaccauccugaccgccgugaccuucugcuucgccagcggccagaacaucaccgaggaguucuaccagagcaccugcagcgccgugagcaagggcuaccugggcgcccugagaaccggcugguacaccagcgugaucaccaucgagcugagcaacaucaaggagaacaagugcaacggcaccgacgccaaggugaagcugaucaagcaggagcuggacaaguacaagaacgccgugaccgaccugcagcugcugaugcagagcacccccgccaccggcagcggcagcgccaucugcagcggcguggccgugugcaaggugcugcaccuggagggcgaggugaacaagaucaagagcgcccugcugagcaccaacaaggccguggugagccugagcaacggcgugagcgugcugaccuucaaggugcuggaccugaagaacuacaucgacaagcagcugcugcccauccugaacaagcagagcugcagcauccccaacaucgagaccgugaucgaguuccagcagaagaacaacagacugcuggagaucaccagagaguucagcgugaacgccggcgugaccacccccgugagcaccuacaugcugaccaacagcgagcugcugagccugaucaacgacaugcccaucaccaacgaccagaagaagcugaugagcaacaacgugcagaucgugagacagcagagcuacagcaucaugugcaucaucaaggaggaggugcuggccuacguggugcagcugccccuguacggcgugaucgacacccccugcuggaagcugcacaccagcccccugugcaccaccaacaccaaggagggcagcaacaucugccugaccagaaccgacagaggcugguacugcgacaacgccggcagcgugagcuucuucccccaggccgagaccugcaaggugcagagcaacagaguguucugcgacaccaugaacagccugacccugcccagcgaggugaaccugugcaacguggacaucuucaaccccaaguacgacugcaagaucaugaccagcaagaccgacgugagcagcagcgugaucaccagccugggcgccaucgugagcugcuacggcaagaccaagugcaccgccagcaacaagaacagaggcaucaucaagaccuucagcaacggcugcgacuacgugagcaacaagggcguggacaccgugagcgugggcaacacccuguacugcgugaacaagcaggagggccagagccuguacgugaagggcgagcccaucaucaacuucuacgacccccugguguuccccagcgacgaguucgacgccagcaucagccaggugaacgagaagaucaaccagagccuggccuucaucagaaagagcgacgagcugcugcacaacgugaacgccggcaagagcaccaccaacaucaugaucaccaccaucaucaucgugaucaucgugauccugcugagccugaucgccgugggccugcugcuguacugcaaggccagaugaggacuaguguccaccugucccuccugggcugcuggauugucucguuuuccugccaaauaaacaggaucagcgcuuuacagaucuaaaaaaaaaaaaaaaaaaaaaaaaaaaaaaaaaaaaaaaaaaaaaaaaaaaaaaaaaaaaaaaaugcaucccccccccccccccccccccccccccccccaaaggcucuuuucagagccaccagaauu

SEQ ID NO: 2837 - RNA, 1853 nt, Artificial Sequence
  mRNA product Design c-1 comprising derived and/or modified sequence from HRSV(A2)__F-del_DSCav1_mut2 (opt5)
gggagaguccgcucagccagguugcagaagcggcuuagcguguguccuaaucuucucucugcguguagguaggccugugccgcaaacaagcuuaccauggagcugcucauccugaaggccaacgcuauuaccacaauccuuacggccgugaccuucugcuuugcgagcggccagaauauuacagaagaguucuaccaauccaccuguucugcugucagcaaaggguaucugggagcccucagaacaggcugguacaccuccguuaucacaauugaacugucuaacaucaaggagaauaaaugcaacgggaccgacgccaaggugaaacuuaucaagcaggaacuggauaaguauaaaaaugcugugacggaccuccagcugcugaugcagagcacccccgccacaggauccggcucugcuauuuguagcggggucgccgugugcaagguucuccaccuggagggagaggugaacaaaaucaaguccgcgcuucugagcaccaauaaagccgucgugucucucuccaacggcguuagcgugcugacauuuaagguccuugaucugaagaauuacauugacaaacaacuccugccuauccugaacaagcagucuuguuccauuccgaauaucgaaaccgugauugaguuccagcagaaaaacaaucggcuccuggaaaucacgcgcgaguuuagcgugaacgcuggcgucacaacccccguuucuacauauaugcuuaccaauuccgagcugcucagccugaucaacgauaugccuauuaccaacgaccaaaagaaacuuauguccaauaacgugcagaucgugagacagcagucuuacagcauuaugugcaucauuaaggaagagguccuggccuaugugguucaacucccccuguacggggugaucgauacaccuuguuggaaacugcauacgagcccccucugcaccacaaauaccaaggaaggauccaacaucugucugacacggaccgaccgcggcugguacugcgauaaugcugggucugucuccuucuuuccucaggccgagacguguaaggugcagagcaacagaguuuucugcgacacaaugaacucucuuacccugccgagcgaagugaaucucugcaaugucgauauuuuuaaccccaaauaugacuguaagaucaugaccuccaaaacagaugugucuagcuccgucauuaccagccugggagcgaucgugucuugcuacggcaagacaaaauguacggccuccaauaagaaccgggggauuaucaagaccuucagcaauggaugcgacuauguuucuaacaaaggcguggacacagucuccgugggcaauacccuuuacuguguuaacaagcaagaggggcagagccuguaugugaaaggagagccuaucauuaacuuuuacgauccccucgucuucccuuccgacgaauuugaugcuucuaucagccaggugaaugagaagauuaaccagucccuggccuucauccgcaaaucugacgaacugcuccacaaugugaacgcuggcaagagcacaaccaauauuaugaucacgaccauuaucaucguuauuaucgucauucugcuuucccugaucgccguggggcuccugcuguauugcaaggccagaugaggacuaguguccaccugucccuccugggcugcuggauugucucguuuuccugccaaauaaacaggaucagcgcuuuacagaucuaaaaaaaaaaaaaaaaaaaaaaaaaaaaaaaaaaaaaaaaaaaaaaaaaaaaaaaaaaaaaaaaugcaucccccccccccccccccccccccccccccccaaaggcucuuuucagagccaccagaauu

SEQ ID NO: 2838 - RNA, 1853 nt, Artificial Sequence
  mRNA product Design c-1 comprising derived and/or modified sequence from HRSV(A2)__F-del_DSCav1_mut2 (opt6)
gggagaguccgcucagccagguugcagaagcggcuuagcguguguccuaaucuucucucugcguguagguaggccugugccgcaaacaagcuuaccauggaacuccuaauacuuaaagccaaugcaauaaccacaauacuaacagcaguaacauucugcuuugcaucaggacaaaacauaacagaagaauuuuaccaaucaacauguucagcaguaagcaaaggauaccuaggagccuuacgcacagguugguacacuuccguaauaacaauagaacucucaaauauaaaagaaaacaaaugcaacggaaccgaugcaaaaguaaaacuaauaaaacaagaauuagacaaauacaaaaacgcaguaacagaccuacaauuacuuaugcaaucaacacccgcaacaggauccggcucagcaaucuguucaggaguagcaguaugcaaaguucuccaccuagaaggcgaaguaaacaaaauaaaaucagcccuauuaucuaccaauaaagcaguaguaucacuaucaaauggaguaucuguccuaaccuucaaaguacuugaccuaaaaaauuacaucgacaaacaauuacuaccaauacuuaacaaacaaucauguucaauaccaaacauugaaacaguaauagaauuucaacaaaaaaauaacagauuauuagaaauaacccgcgaauuuucaguuaacgcaggaguaacaacaccaguauccacauacauguuaacaaauucagaacucuuaucacuuauaaacgacaugcccauaacaaacgaccaaaaaaaacucaugucuaacaauguucaaauaguucgacaacaaucauacuccauaaugugcauaauaaaagaagaaguucuagcauauguuguacaacucccacucuaugguguuauagacacaccaugcuggaaacuacauacaagccccuuaugcacuacaaacacaaaagaaggcucuaauauaugucuaacccgcacagacagaggcugguauugcgauaacgcagguucaguaucauucuuuccacaagcagaaacuugcaaaguccaauccaauagagucuucugcgacacuaugaacucacucacacucccaucugaagucaauuuauguaacgucgauaucuucaacccaaaauacgacugcaaaauaaugaccucaaaaacagacguaagcucaucagucauaacuucucuaggcgcaaucgucucauguuacggcaaaacaaaauguaccgcaucaaacaaaaaucgagguauaauaaaaaccuuuucuaacggcugcgacuacguaucaaacaaaggaguagauacuguaagugucggaaacacauuauacugcgucaacaaacaagaaggacaaucccuauauguuaaaggcgaaccuaucauuaauuucuacgacccacucgucuuuccauccgacgaauuugacgcaucaauuucccaaguaaaugaaaaaauaaaccaaucccuugcauucauaagaaaaucagaugaacuauuacacaacguaaacgcaggcaaaucaacaacaaauauaaugaucacaacaauaauaaucguaauaauaguaauccuacucucacuaauagcaguaggcuuacuauuauauugcaaagccagauaaggacuaguguccaccugucccuccugggcugcuggauugucucguuuuccugccaaauaaacaggaucagcgcuuuacagaucuaaaaaaaaaaaaaaaaaaaaaaaaaaaaaaaaaaaaaaaaaaaaaaaaaaaaaaaaaaaaaaaaugcaucccccccccccccccccccccccccccccccaaaggcucuuuucagagccaccagaauu

SEQ ID NO: 2839 - RNA, 1853 nt, Artificial Sequence
  mRNA product Design c-1 comprising derived and/or modified sequence from HRSV(A2)__F-del_DSCav1_mut2 (opt11)
gggagaguccgcucagccagguugcagaagcggcuuagcguguguccuaaucuucucucugcguguagguaggccugugccgcaaacaagcuuaccauggaacuucuuauccuaaaagcgaacgccauaaccacaauccuaacagcagucaccuucuguuucgccucaggacaaaacaucaccgaggaauuuuaccaauccacauguagcgcugucucaaaaggcuaccucggcgcccuccgaaccggcugguacacauccguaauaacgaucgaacucuccaacauaaaagaaaauaaaugcaacggcaccgacgccaaagucaaacuuaucaaacaagaacuagacaaauacaaaaacgccgucaccgaccuccagcuccucaugcaauccaccccagcaacaggcuccggaagcgcaaucugcucaggcgucgccguaugcaaaguacuccaccucgaaggagaagucaacaaaaucaaauccgcccuccuauccacaaacaaagcaguugucucacucuccaacgggguaagcguacugaccuucaaaguccuagaccucaaaaacuacaucgauaaacaacuccuuccaauccucaacaaacaaucaugcucuauccccaacaucgaaaccguaaucgaauuucaacaaaaaaacaaccgccuacuugaaaucacacgcgaauuuagcgucaacgcaggaguaacaacacccguguccacauauaugcucacgaacagcgaacuacuaucccugauuaacgacaugcccaucaccaacgaccaaaaaaaacuaaugagcaacaacguacaaaucguccgccaacaaagcuacucuauaaugugcaucaucaaggaagaaguccuagccuacgucguccaauuaccacucuacggcgucaucgacacacccugcuggaaacuccauacauccccccucugcaccaccaacaccaaagaaggguccaacauaugccucacucgcacagaccgcggcugguacugcgacaacgcuggcagcgucagcuucuucccccaggccgaaaccugcaaaguccaauccaacagagucuucugcgacaccaugaacucgcucacccuccccuccgaggucaaccucugcaacgucgacauauucaaccccaaauacgacugcaaaaucaugaccuccaaaaccgacgucagcucaucagucaucacaucccucggggccaucgucuccugcuacggcaaaaccaagugcaccgccucaaacaaaaaccgcggcauuaucaaaacauucuccaacggcugcgacuacgucuccaacaaaggcgucgacacagucuccgucgguaacacccucuacugcguaaauaaacaagaaggccaaucccucuacgucaaaggcgaacccaucaucaacuucuacgacccucucgucuuccccuccgacgaauuugacgccucaaucagccaaguuaacgaaaaaaucaaccaaucacucgccuucauccgcaaauccgacgaacuccuccacaacguuaacgccggcaaaucuaccacgaacaucaugaucaccaccauaaucaucguaauuaucguaauacuccuaucccucauagcaguaggccuccuacucuacugcaaagcccguuaaggacuaguguccaccugucccuccugggcugcuggauugucucguuuuccugccaaauaaacaggaucagcgcuuuacagaucuaaaaaaaaaaaaaaaaaaaaaaaaaaaaaaaaaaaaaaaaaaaaaaaaaaaaaaaaaaaaaaaaugcaucccccccccccccccccccccccccccccccaaaggcucuuuucagagccaccagaauu

SEQ ID NO: 2840 - RNA, 1943 nt, Artificial Sequence
  mRNA product Design c-2 comprising derived and/or modified sequence from HRSV(A2)__F-del_DSCav1_mut2 (opt1)
gggagacuccugucgggcggaaguaggaggaguagaguuuaaaaacaguacucuuuuuccgguucgggacguaguugaagcaacgacaagccggauaaccgcucuugagacaggaagcuuaccauggagcugcucauccugaaggccaacgccaucaccaccauccugacggcggugaccuucugcuucgccagcggccagaacaucaccgaggaguucuaccaguccacgugcagcgccgucuccaagggguaccucggcgcccugcggaccggcugguacaccuccgugaucaccaucgagcugagcaacaucaaggagaacaagugcaacgggaccgacgccaaggugaagcucaucaagcaggagcuggacaaguacaagaacgcggucacggaccugcagcuccugaugcaguccaccccggcaaccggcuccggcuccgccaucugcagcggcgucgccgugugcaaggugcugcaccucgagggggaggucaacaagaucaagagcgcccugcuguccaccaacaaggccguggugagccucuccaacggcgucagcgugcugaccuucaaggugcuggaccucaagaacuacaucgacaagcagcugcugcccauccugaacaagcagagcugcuccauccccaacaucgagacggugaucgaguuccagcagaagaacaaccggcuccuggagaucacccgcgaguucagcgugaacgccggggucaccacccccguguccacguacaugcugaccaacagcgagcuccugucccugaucaacgacaugccgaucaccaacgaccagaagaagcucaugagcaacaacgugcagaucguccggcagcaguccuacagcaucaugugcaucaucaaggaggaggugcuggcguacgugguccagcugccccucuacggcgugaucgacacccccugcuggaagcugcacacgagcccccugugcaccaccaacaccaaggagggguccaacaucugccucacgcgcaccgaccggggcugguacugcgacaacgccggcagcgucuccuucuucccgcaggccgagaccugcaaggugcagagcaaccgcguguucugcgacaccaugaacucccugacgcugcccagcgagguaaaccucugcaacgucgacaucuucaaccccaaguacgacugcaagaucaugaccuccaagaccgacgugagcuccagcgugaucaccucccugggggccaucgucagcugcuacggcaagacgaagugcaccgccagcaacaagaaccgggggaucaucaagaccuucuccaacggcugcgacuacgugagcaacaagggcguggacaccguguccgucgggaacacccuguacugcgugaacaagcaggagggccagagccucuacgugaagggggagcccaucaucaacuucuacgacccgcuggucuuccccuccgacgaguucgacgcgagcaucucccaggugaacgagaagaucaaccagagccuggccuucauccgcaaguccgacgagcugcuccacaacgugaacgccggcaagagcacgaccaacaucaugaucaccaccaucaucaucgucaucaucgugauccugcugucccucaucgccguggggcugcugcucuacugcaaggcccggugaggacuaguggaagcauuuuccuggcugauuaaaagaaauuacucagcuauggucaucuguuccuguuagaaggcuaugcagcauauuauauacuaugcgcauguuaugaaaugcauaauaaaaaauuuuaaaaaaucuaaaagaucuaaaaaaaaaaaaaaaaaaaaaaaaaaaaaaaaaaaaaaaaaaaaaaaaaaaaaaaaaaaaaaaaugcaucccccccccccccccccccccccccccccccaaaggcucuuuucagagccaccagaauu

SEQ ID NO: 2841 - RNA, 1943 nt, Artificial Sequence
  mRNA product Design c-2 comprising derived and/or modified sequence from HRSV(A2)__F-del_DSCav1_mut2 (opt1)
gggagacuccugucgggcggaaguaggaggaguagaguuuaaaaacaguacucuuuuuccgguucgggacguaguugaagcaacgacaagccggauaaccgcucuugagacaggaagcuuaccauggagcugcucauccugaaggccaacgccaucaccaccauccugacggcggugaccuucugcuucgccagcggccagaacaucaccgaggaguucuaccaguccacgugcagcgccgucuccaagggguaccucggcgcccugcgcaccgggugguacaccagcgugaucaccaucgagcuguccaacaucaaggagaacaagugcaacggcaccgacgccaaggugaagcucaucaagcaggagcuggacaaguacaagaacgcggucacggaccugcagcuccugaugcagagcacccccgccaccggguccggcagcgccaucugcuccggcguggccgugugcaagguccugcaccucgagggggaggugaacaagaucaagagcgcgcugcuguccaccaacaaggccguggucagccucuccaacggcgugagcgugcugacguucaagguccuggaccucaagaacuacaucgacaagcagcugcugccgauccucaacaagcaguccugcagcauccccaacaucgagaccgugaucgaguuccagcagaagaacaaccggcugcuggagaucacccgcgaguucuccgugaacgccggggucaccacgcccgugagcaccuacaugcucaccaacuccgagcugcugagccucaucaacgacaugcccaucaccaacgaccagaagaagcugaugagcaacaacgugcagaucguccggcagcaguccuacagcaucaugugcaucaucaaggaggaggugcuggccuacgugguccagcucccgcuguacggcgugaucgacacgcccugcuggaagcugcacaccagcccccucugcaccaccaacacgaaggagggguccaacaucugccugacccgcaccgaccggggcugguacugcgacaacgccggcuccgugagcuucuucccccaggcggagaccugcaagguccaguccaaccgcguguucugcgacacgaugaacagccugacccucccguccgaggucaaccugugcaacguggacaucuucaaccccaaguacgacugcaagaucaugaccagcaagaccgacguguccagcuccgucaucacgagccugggggccaucguguccugcuacggcaagaccaagugcaccgccagcaacaagaaccgggggaucaucaagaccuucuccaacggcugcgacuacgugagcaacaagggcgucgacacgguguccguggggaacacccucuacugcgucaacaagcaggagggccagagccuguacgugaagggggagcccaucaucaacuucuacgacccccugguguucccgagcgacgaguucgacgccuccaucagccaggucaacgagaagaucaaccagucccucgccuucauccgcaagagcgacgagcugcugcacaacgugaacgcgggcaaguccaccaccaacaucaugaucaccacgaucaucaucgugaucaucgucauccuccugagccugaucgccguggggcuccugcuguacugcaaggcccggugaggacuaguggaagcauuuuccuggcugauuaaaagaaauuacucagcuauggucaucuguuccuguuagaaggcuaugcagcauauuauauacuaugcgcauguuaugaaaugcauaauaaaaaauuuuaaaaaaucuaaaagaucuaaaaaaaaaaaaaaaaaaaaaaaaaaaaaaaaaaaaaaaaaaaaaaaaaaaaaaaaaaaaaaaaugcaucccccccccccccccccccccccccccccccaaaggcucuuuucagagccaccagaauu

SEQ ID NO: 2842 - RNA, 1943 nt, Artificial Sequence
  mRNA product Design c-2 comprising derived and/or modified sequence from HRSV(A2)__F-del_DSCav1_mut2 (opt2)
gggagacuccugucgggcggaaguaggaggaguagaguuuaaaaacaguacucuuuuuccgguucgggacguaguugaagcaacgacaagccggauaaccgcucuugagacaggaagcuuaccauggagcuccucauccucaaggccaacgccaucaccaccauccucaccgccgucaccuucugcuucgccuccggccagaacaucaccgaggaguucuaccaguccaccugcuccgccgucuccaagggcuaccucggcgcccuccgcaccggcugguacaccuccgucaucaccaucgagcucuccaacaucaaggagaacaagugcaacggcaccgacgccaaggucaagcucaucaagcaggagcucgacaaguacaagaacgccgucaccgaccuccagcuccucaugcaguccacccccgccaccggcuccggcuccgccaucugcuccggcgucgccgucugcaagguccuccaccucgagggcgaggucaacaagaucaaguccgcccuccucuccaccaacaaggccgucgucucccucuccaacggcgucuccguccucaccuucaagguccucgaccucaagaacuacaucgacaagcagcuccuccccauccucaacaagcaguccugcuccauccccaacaucgagaccgucaucgaguuccagcagaagaacaaccgccuccucgagaucacccgcgaguucuccgucaacgccggcgucaccacccccgucuccaccuacaugcucaccaacuccgagcuccucucccucaucaacgacaugcccaucaccaacgaccagaagaagcucauguccaacaacguccagaucguccgccagcaguccuacuccaucaugugcaucaucaaggaggagguccucgccuacgucguccagcucccccucuacggcgucaucgacacccccugcuggaagcuccacaccuccccccucugcaccaccaacaccaaggagggcuccaacaucugccucacccgcaccgaccgcggcugguacugcgacaacgccggcuccgucuccuucuucccccaggccgagaccugcaagguccaguccaaccgcgucuucugcgacaccaugaacucccucacccuccccuccgaggucaaccucugcaacgucgacaucuucaaccccaaguacgacugcaagaucaugaccuccaagaccgacgucuccuccuccgucaucaccucccucggcgccaucgucuccugcuacggcaagaccaagugcaccgccuccaacaagaaccgcggcaucaucaagaccuucuccaacggcugcgacuacgucuccaacaagggcgucgacaccgucuccgucggcaacacccucuacugcgucaacaagcaggagggccagucccucuacgucaagggcgagcccaucaucaacuucuacgacccccucgucuuccccuccgacgaguucgacgccuccaucucccaggucaacgagaagaucaaccagucccucgccuucauccgcaaguccgacgagcuccuccacaacgucaacgccggcaaguccaccaccaacaucaugaucaccaccaucaucaucgucaucaucgucauccuccucucccucaucgccgucggccuccuccucuacugcaaggcccgcugaggacuaguggaagcauuuuccuggcugauuaaaagaaauuacucagcuauggucaucuguuccuguuagaaggcuaugcagcauauuauauacuaugcgcauguuaugaaaugcauaauaaaaaauuuuaaaaaaucuaaaagaucuaaaaaaaaaaaaaaaaaaaaaaaaaaaaaaaaaaaaaaaaaaaaaaaaaaaaaaaaaaaaaaaaugcaucccccccccccccccccccccccccccccccaaaggcucuuuucagagccaccagaauu

SEQ ID NO: 2843 - RNA, 1943 nt, Artificial Sequence
  mRNA product Design c-2 comprising derived and/or modified sequence from HRSV(A2)__F-del_DSCav1_mut2 (opt3)
gggagacuccugucgggcggaaguaggaggaguagaguuuaaaaacaguacucuuuuuccgguucgggacguaguugaagcaacgacaagccggauaaccgcucuugagacaggaagcuuaccauggagcugcucauccuuaaggccaacgcuauuaccacaauacugacugcagugacguucugcuuugccagcggccagaauaucaccgaagaguucuaccaauccacauguucugcggucucaaaaggguauuugggagcuuuaagaacugguugguacaccaguguuauuacaaucgaacugagcaacauuaaggagaauaaaugcaacggcaccgacgccaaggugaaacuaaucaagcaggaacucgauaaguauaaaaaugcaguaacugaccugcagcuucugaugcaguccacacccgccaccgggucuggaucggcuauauguucaggcguggcagucugcaagguguugcaccucgagggugagguuaacaaaaucaagagcgcccugcugaguacgaauaaagcuguggucucccucucuaacggggugagcguauuaacuuuuaagguucuggaucuuaagaauuacauugacaaacaauugcugccuauccuaaacaagcaguccuguucaauuccaaauaucgaaaccgugauagaguuccagcagaaaaacaauaggcuccuggaaauuacacgggaguuuagugucaacgccggagugacuaccccggugagcacauauaugcuuaccaauucugagcuguugucccucaucaacgauaugcccauuacgaacgaccaaaagaaacugaugucaaauaacguccagaucguucgccagcagagcuacaguaucaugugcauuauaaaggaagagguguuagcguauguagugcaacugccucucuacggcgucaucgauacuccauguuggaaacuucauacaucuccccugugcaccacuaauacaaaggaaggcuccaacauuuguuugacccgaacggaccgugggugguacugcgauaaugcaggaagcgugucguucuuuccucaggccgagaccuguaagguucagucuaacagaguguucugcgacacaaugaacucccuaacucugccaucagaagucaaucucugcaauguggauaucuuuaaccccaaauaugacuguaagauaaugaccaguaaaacagauguaagcuccucuguuauuacuagccugggugcuaucgugucaugcuacggcaagaccaaauguacagccaguaauaagaacagggggaucauuaagaccuucuccaauggaugcgacuaugucagcaacaaaggcguggacacugucucuguggguaauacgcuuuacuguguuaacaagcaagaggggcagucacuguaugugaaaggagagccuaucauuaacuuuuacgauccauugguauucccgagugacgaauuugaugcaagcauaucccaggucaaugagaagaucaaccagucucucgcuuucauucggaaaucggacgaacuguuacacaaugugaacgccggcaagagcacaaccaauaucaugaucacuaccauuauaaucguuauuaucgugauucugcuaucccucaucgcggucggccugcuuuuguauugcaaggcccgcugaggacuaguggaagcauuuuccuggcugauuaaaagaaauuacucagcuauggucaucuguuccuguuagaaggcuaugcagcauauuauauacuaugcgcauguuaugaaaugcauaauaaaaaauuuuaaaaaaucuaaaagaucuaaaaaaaaaaaaaaaaaaaaaaaaaaaaaaaaaaaaaaaaaaaaaaaaaaaaaaaaaaaaaaaaugcaucccccccccccccccccccccccccccccccaaaggcucuuuucagagccaccagaauu

SEQ ID NO: 2844 - RNA, 1943 nt, Artificial Sequence
  mRNA product Design c-2 comprising derived and/or modified sequence from HRSV(A2)__F-del_DSCav1_mut2 (opt4)
gggagacuccugucgggcggaaguaggaggaguagaguuuaaaaacaguacucuuuuuccgguucgggacguaguugaagcaacgacaagccggauaaccgcucuugagacaggaagcuuaccauggagcugcugauccugaaggccaacgccaucaccaccauccugaccgccgugaccuucugcuucgccagcggccagaacaucaccgaggaguucuaccagagcaccugcagcgccgugagcaagggcuaccugggcgcccugagaaccggcugguacaccagcgugaucaccaucgagcugagcaacaucaaggagaacaagugcaacggcaccgacgccaaggugaagcugaucaagcaggagcuggacaaguacaagaacgccgugaccgaccugcagcugcugaugcagagcacccccgccaccggcagcggcagcgccaucugcagcggcguggccgugugcaaggugcugcaccuggagggcgaggugaacaagaucaagagcgcccugcugagcaccaacaaggccguggugagccugagcaacggcgugagcgugcugaccuucaaggugcuggaccugaagaacuacaucgacaagcagcugcugcccauccugaacaagcagagcugcagcauccccaacaucgagaccgugaucgaguuccagcagaagaacaacagacugcuggagaucaccagagaguucagcgugaacgccggcgugaccacccccgugagcaccuacaugcugaccaacagcgagcugcugagccugaucaacgacaugcccaucaccaacgaccagaagaagcugaugagcaacaacgugcagaucgugagacagcagagcuacagcaucaugugcaucaucaaggaggaggugcuggccuacguggugcagcugccccuguacggcgugaucgacacccccugcuggaagcugcacaccagcccccugugcaccaccaacaccaaggagggcagcaacaucugccugaccagaaccgacagaggcugguacugcgacaacgccggcagcgugagcuucuucccccaggccgagaccugcaaggugcagagcaacagaguguucugcgacaccaugaacagccugacccugcccagcgaggugaaccugugcaacguggacaucuucaaccccaaguacgacugcaagaucaugaccagcaagaccgacgugagcagcagcgugaucaccagccugggcgccaucgugagcugcuacggcaagaccaagugcaccgccagcaacaagaacagaggcaucaucaagaccuucagcaacggcugcgacuacgugagcaacaagggcguggacaccgugagcgugggcaacacccuguacugcgugaacaagcaggagggccagagccuguacgugaagggcgagcccaucaucaacuucuacgacccccugguguuccccagcgacgaguucgacgccagcaucagccaggugaacgagaagaucaaccagagccuggccuucaucagaaagagcgacgagcugcugcacaacgugaacgccggcaagagcaccaccaacaucaugaucaccaccaucaucaucgugaucaucgugauccugcugagccugaucgccgugggccugcugcuguacugcaaggccagaugaggacuaguggaagcauuuuccuggcugauuaaaagaaauuacucagcuauggucaucuguuccuguuagaaggcuaugcagcauauuauauacuaugcgcauguuaugaaaugcauaauaaaaaauuuuaaaaaaucuaaaagaucuaaaaaaaaaaaaaaaaaaaaaaaaaaaaaaaaaaaaaaaaaaaaaaaaaaaaaaaaaaaaaaaaugcaucccccccccccccccccccccccccccccccaaaggcucuuuucagagccaccagaauu

SEQ ID NO: 2845 - RNA, 1943 nt, Artificial Sequence
  mRNA product Design c-2 comprising derived and/or modified sequence from HRSV(A2)__F-del_DSCav1_mut2 (opt5)
gggagacuccugucgggcggaaguaggaggaguagaguuuaaaaacaguacucuuuuuccgguucgggacguaguugaagcaacgacaagccggauaaccgcucuugagacaggaagcuuaccauggagcugcucauccugaaggccaacgcuauuaccacaauccuuacggccgugaccuucugcuuugcgagcggccagaauauuacagaagaguucuaccaauccaccuguucugcugucagcaaaggguaucugggagcccucagaacaggcugguacaccuccguuaucacaauugaacugucuaacaucaaggagaauaaaugcaacgggaccgacgccaaggugaaacuuaucaagcaggaacuggauaaguauaaaaaugcugugacggaccuccagcugcugaugcagagcacccccgccacaggauccggcucugcuauuuguagcggggucgccgugugcaagguucuccaccuggagggagaggugaacaaaaucaaguccgcgcuucugagcaccaauaaagccgucgugucucucuccaacggcguuagcgugcugacauuuaagguccuugaucugaagaauuacauugacaaacaacuccugccuauccugaacaagcagucuuguuccauuccgaauaucgaaaccgugauugaguuccagcagaaaaacaaucggcuccuggaaaucacgcgcgaguuuagcgugaacgcuggcgucacaacccccguuucuacauauaugcuuaccaauuccgagcugcucagccugaucaacgauaugccuauuaccaacgaccaaaagaaacuuauguccaauaacgugcagaucgugagacagcagucuuacagcauuaugugcaucauuaaggaagagguccuggccuaugugguucaacucccccuguacggggugaucgauacaccuuguuggaaacugcauacgagcccccucugcaccacaaauaccaaggaaggauccaacaucugucugacacggaccgaccgcggcugguacugcgauaaugcugggucugucuccuucuuuccucaggccgagacguguaaggugcagagcaacagaguuuucugcgacacaaugaacucucuuacccugccgagcgaagugaaucucugcaaugucgauauuuuuaaccccaaauaugacuguaagaucaugaccuccaaaacagaugugucuagcuccgucauuaccagccugggagcgaucgugucuugcuacggcaagacaaaauguacggccuccaauaagaaccgggggauuaucaagaccuucagcaauggaugcgacuauguuucuaacaaaggcguggacacagucuccgugggcaauacccuuuacuguguuaacaagcaagaggggcagagccuguaugugaaaggagagccuaucauuaacuuuuacgauccccucgucuucccuuccgacgaauuugaugcuucuaucagccaggugaaugagaagauuaaccagucccuggccuucauccgcaaaucugacgaacugcuccacaaugugaacgcuggcaagagcacaaccaauauuaugaucacgaccauuaucaucguuauuaucgucauucugcuuucccugaucgccguggggcuccugcuguauugcaaggccagaugaggacuaguggaagcauuuuccuggcugauuaaaagaaauuacucagcuauggucaucuguuccuguuagaaggcuaugcagcauauuauauacuaugcgcauguuaugaaaugcauaauaaaaaauuuuaaaaaaucuaaaagaucuaaaaaaaaaaaaaaaaaaaaaaaaaaaaaaaaaaaaaaaaaaaaaaaaaaaaaaaaaaaaaaaaugcaucccccccccccccccccccccccccccccccaaaggcucuuuucagagccaccagaauu

SEQ ID NO: 2846 - RNA, 1943 nt, Artificial Sequence
  mRNA product Design c-2 comprising derived and/or modified sequence from HRSV(A2)__F-del_DSCav1_mut2 (opt6)
gggagacuccugucgggcggaaguaggaggaguagaguuuaaaaacaguacucuuuuuccgguucgggacguaguugaagcaacgacaagccggauaaccgcucuugagacaggaagcuuaccauggaacuccuaauacuuaaagccaaugcaauaaccacaauacuaacagcaguaacauucugcuuugcaucaggacaaaacauaacagaagaauuuuaccaaucaacauguucagcaguaagcaaaggauaccuaggagccuuacgcacagguugguacacuuccguaauaacaauagaacucucaaauauaaaagaaaacaaaugcaacggaaccgaugcaaaaguaaaacuaauaaaacaagaauuagacaaauacaaaaacgcaguaacagaccuacaauuacuuaugcaaucaacacccgcaacaggauccggcucagcaaucuguucaggaguagcaguaugcaaaguucuccaccuagaaggcgaaguaaacaaaauaaaaucagcccuauuaucuaccaauaaagcaguaguaucacuaucaaauggaguaucuguccuaaccuucaaaguacuugaccuaaaaaauuacaucgacaaacaauuacuaccaauacuuaacaaacaaucauguucaauaccaaacauugaaacaguaauagaauuucaacaaaaaaauaacagauuauuagaaauaacccgcgaauuuucaguuaacgcaggaguaacaacaccaguauccacauacauguuaacaaauucagaacucuuaucacuuauaaacgacaugcccauaacaaacgaccaaaaaaaacucaugucuaacaauguucaaauaguucgacaacaaucauacuccauaaugugcauaauaaaagaagaaguucuagcauauguuguacaacucccacucuaugguguuauagacacaccaugcuggaaacuacauacaagccccuuaugcacuacaaacacaaaagaaggcucuaauauaugucuaacccgcacagacagaggcugguauugcgauaacgcagguucaguaucauucuuuccacaagcagaaacuugcaaaguccaauccaauagagucuucugcgacacuaugaacucacucacacucccaucugaagucaauuuauguaacgucgauaucuucaacccaaaauacgacugcaaaauaaugaccucaaaaacagacguaagcucaucagucauaacuucucuaggcgcaaucgucucauguuacggcaaaacaaaauguaccgcaucaaacaaaaaucgagguauaauaaaaaccuuuucuaacggcugcgacuacguaucaaacaaaggaguagauacuguaagugucggaaacacauuauacugcgucaacaaacaagaaggacaaucccuauauguuaaaggcgaaccuaucauuaauuucuacgacccacucgucuuuccauccgacgaauuugacgcaucaauuucccaaguaaaugaaaaaauaaaccaaucccuugcauucauaagaaaaucagaugaacuauuacacaacguaaacgcaggcaaaucaacaacaaauauaaugaucacaacaauaauaaucguaauaauaguaauccuacucucacuaauagcaguaggcuuacuauuauauugcaaagccagauaaggacuaguggaagcauuuuccuggcugauuaaaagaaauuacucagcuauggucaucuguuccuguuagaaggcuaugcagcauauuauauacuaugcgcauguuaugaaaugcauaauaaaaaauuuuaaaaaaucuaaaagaucuaaaaaaaaaaaaaaaaaaaaaaaaaaaaaaaaaaaaaaaaaaaaaaaaaaaaaaaaaaaaaaaaugcaucccccccccccccccccccccccccccccccaaaggcucuuuucagagccaccagaauu

SEQ ID NO: 2847 - RNA, 1943 nt, Artificial Sequence
  mRNA product Design c-2 comprising derived and/or modified sequence from HRSV(A2)__F-del_DSCav1_mut2 (opt11)
gggagacuccugucgggcggaaguaggaggaguagaguuuaaaaacaguacucuuuuuccgguucgggacguaguugaagcaacgacaagccggauaaccgcucuugagacaggaagcuuaccauggaacuucuuauccuaaaagcgaacgccauaaccacaauccuaacagcagucaccuucuguuucgccucaggacaaaacaucaccgaggaauuuuaccaauccacauguagcgcugucucaaaaggcuaccucggcgcccuccgaaccggcugguacacauccguaauaacgaucgaacucuccaacauaaaagaaaauaaaugcaacggcaccgacgccaaagucaaacuuaucaaacaagaacuagacaaauacaaaaacgccgucaccgaccuccagcuccucaugcaauccaccccagcaacaggcuccggaagcgcaaucugcucaggcgucgccguaugcaaaguacuccaccucgaaggagaagucaacaaaaucaaauccgcccuccuauccacaaacaaagcaguugucucacucuccaacgggguaagcguacugaccuucaaaguccuagaccucaaaaacuacaucgauaaacaacuccuuccaauccucaacaaacaaucaugcucuauccccaacaucgaaaccguaaucgaauuucaacaaaaaaacaaccgccuacuugaaaucacacgcgaauuuagcgucaacgcaggaguaacaacacccguguccacauauaugcucacgaacagcgaacuacuaucccugauuaacgacaugcccaucaccaacgaccaaaaaaaacuaaugagcaacaacguacaaaucguccgccaacaaagcuacucuauaaugugcaucaucaaggaagaaguccuagccuacgucguccaauuaccacucuacggcgucaucgacacacccugcuggaaacuccauacauccccccucugcaccaccaacaccaaagaaggguccaacauaugccucacucgcacagaccgcggcugguacugcgacaacgcuggcagcgucagcuucuucccccaggccgaaaccugcaaaguccaauccaacagagucuucugcgacaccaugaacucgcucacccuccccuccgaggucaaccucugcaacgucgacauauucaaccccaaauacgacugcaaaaucaugaccuccaaaaccgacgucagcucaucagucaucacaucccucggggccaucgucuccugcuacggcaaaaccaagugcaccgccucaaacaaaaaccgcggcauuaucaaaacauucuccaacggcugcgacuacgucuccaacaaaggcgucgacacagucuccgucgguaacacccucuacugcguaaauaaacaagaaggccaaucccucuacgucaaaggcgaacccaucaucaacuucuacgacccucucgucuuccccuccgacgaauuugacgccucaaucagccaaguuaacgaaaaaaucaaccaaucacucgccuucauccgcaaauccgacgaacuccuccacaacguuaacgccggcaaaucuaccacgaacaucaugaucaccaccauaaucaucguaauuaucguaauacuccuaucccucauagcaguaggccuccuacucuacugcaaagcccguuaaggacuaguggaagcauuuuccuggcugauuaaaagaaauuacucagcuauggucaucuguuccuguuagaaggcuaugcagcauauuauauacuaugcgcauguuaugaaaugcauaauaaaaaauuuuaaaaaaucuaaaagaucuaaaaaaaaaaaaaaaaaaaaaaaaaaaaaaaaaaaaaaaaaaaaaaaaaaaaaaaaaaaaaaaaugcaucccccccccccccccccccccccccccccccaaaggcucuuuucagagccaccagaauu

SEQ ID NO: 2848 - RNA, 1920 nt, Artificial Sequence
  mRNA product Design c-3 comprising derived and/or modified sequence from HRSV(A2)__F-del_DSCav1_mut2 (opt1)
gggagaguccgcucagccagguugcagaagcggcuuagcguguguccuaaucuucucucugcguguagguaggccugugccgcaaacaagcuuaccauggagcugcucauccugaaggccaacgccaucaccaccauccugacggcggugaccuucugcuucgccagcggccagaacaucaccgaggaguucuaccaguccacgugcagcgccgucuccaagggguaccucggcgcccugcggaccggcugguacaccuccgugaucaccaucgagcugagcaacaucaaggagaacaagugcaacgggaccgacgccaaggugaagcucaucaagcaggagcuggacaaguacaagaacgcggucacggaccugcagcuccugaugcaguccaccccggcaaccggcuccggcuccgccaucugcagcggcgucgccgugugcaaggugcugcaccucgagggggaggucaacaagaucaagagcgcccugcuguccaccaacaaggccguggugagccucuccaacggcgucagcgugcugaccuucaaggugcuggaccucaagaacuacaucgacaagcagcugcugcccauccugaacaagcagagcugcuccauccccaacaucgagacggugaucgaguuccagcagaagaacaaccggcuccuggagaucacccgcgaguucagcgugaacgccggggucaccacccccguguccacguacaugcugaccaacagcgagcuccugucccugaucaacgacaugccgaucaccaacgaccagaagaagcucaugagcaacaacgugcagaucguccggcagcaguccuacagcaucaugugcaucaucaaggaggaggugcuggcguacgugguccagcugccccucuacggcgugaucgacacccccugcuggaagcugcacacgagcccccugugcaccaccaacaccaaggagggguccaacaucugccucacgcgcaccgaccggggcugguacugcgacaacgccggcagcgucuccuucuucccgcaggccgagaccugcaaggugcagagcaaccgcguguucugcgacaccaugaacucccugacgcugcccagcgagguaaaccucugcaacgucgacaucuucaaccccaaguacgacugcaagaucaugaccuccaagaccgacgugagcuccagcgugaucaccucccugggggccaucgucagcugcuacggcaagacgaagugcaccgccagcaacaagaaccgggggaucaucaagaccuucuccaacggcugcgacuacgugagcaacaagggcguggacaccguguccgucgggaacacccuguacugcgugaacaagcaggagggccagagccucuacgugaagggggagcccaucaucaacuucuacgacccgcuggucuuccccuccgacgaguucgacgcgagcaucucccaggugaacgagaagaucaaccagagccuggccuucauccgcaaguccgacgagcugcuccacaacgugaacgccggcaagagcacgaccaacaucaugaucaccaccaucaucaucgucaucaucgugauccugcugucccucaucgccguggggcugcugcucuacugcaaggcccggugaggacuaguacuggcugcaucucccuuuccucuguccuccauccuucucccaggauggugaagggggaccugguacccagugauccccaccccaggauccuaaaucaugacuuaccugcuaauaaaaacucauuggaaaagugagaagaucuaaaaaaaaaaaaaaaaaaaaaaaaaaaaaaaaaaaaaaaaaaaaaaaaaaaaaaaaaaaaaaaaugcaucccccccccccccccccccccccccccccccaaaggcucuuuucagagccaccagaauu

SEQ ID NO: 2849 - RNA, 1920 nt, Artificial Sequence
  mRNA product Design c-3 comprising derived and/or modified sequence from HRSV(A2)__F-del_DSCav1_mut2 (opt1)
gggagaguccgcucagccagguugcagaagcggcuuagcguguguccuaaucuucucucugcguguagguaggccugugccgcaaacaagcuuaccauggagcugcucauccugaaggccaacgccaucaccaccauccugacggcggugaccuucugcuucgccagcggccagaacaucaccgaggaguucuaccaguccacgugcagcgccgucuccaagggguaccucggcgcccugcgcaccgggugguacaccagcgugaucaccaucgagcuguccaacaucaaggagaacaagugcaacggcaccgacgccaaggugaagcucaucaagcaggagcuggacaaguacaagaacgcggucacggaccugcagcuccugaugcagagcacccccgccaccggguccggcagcgccaucugcuccggcguggccgugugcaagguccugcaccucgagggggaggugaacaagaucaagagcgcgcugcuguccaccaacaaggccguggucagccucuccaacggcgugagcgugcugacguucaagguccuggaccucaagaacuacaucgacaagcagcugcugccgauccucaacaagcaguccugcagcauccccaacaucgagaccgugaucgaguuccagcagaagaacaaccggcugcuggagaucacccgcgaguucuccgugaacgccggggucaccacgcccgugagcaccuacaugcucaccaacuccgagcugcugagccucaucaacgacaugcccaucaccaacgaccagaagaagcugaugagcaacaacgugcagaucguccggcagcaguccuacagcaucaugugcaucaucaaggaggaggugcuggccuacgugguccagcucccgcuguacggcgugaucgacacgcccugcuggaagcugcacaccagcccccucugcaccaccaacacgaaggagggguccaacaucugccugacccgcaccgaccggggcugguacugcgacaacgccggcuccgugagcuucuucccccaggcggagaccugcaagguccaguccaaccgcguguucugcgacacgaugaacagccugacccucccguccgaggucaaccugugcaacguggacaucuucaaccccaaguacgacugcaagaucaugaccagcaagaccgacguguccagcuccgucaucacgagccugggggccaucguguccugcuacggcaagaccaagugcaccgccagcaacaagaaccgggggaucaucaagaccuucuccaacggcugcgacuacgugagcaacaagggcgucgacacgguguccguggggaacacccucuacugcgucaacaagcaggagggccagagccuguacgugaagggggagcccaucaucaacuucuacgacccccugguguucccgagcgacgaguucgacgccuccaucagccaggucaacgagaagaucaaccagucccucgccuucauccgcaagagcgacgagcugcugcacaacgugaacgcgggcaaguccaccaccaacaucaugaucaccacgaucaucaucgugaucaucgucauccuccugagccugaucgccguggggcuccugcuguacugcaaggcccggugaggacuaguacuggcugcaucucccuuuccucuguccuccauccuucucccaggauggugaagggggaccugguacccagugauccccaccccaggauccuaaaucaugacuuaccugcuaauaaaaacucauuggaaaagugagaagaucuaaaaaaaaaaaaaaaaaaaaaaaaaaaaaaaaaaaaaaaaaaaaaaaaaaaaaaaaaaaaaaaaugcaucccccccccccccccccccccccccccccccaaaggcucuuuucagagccaccagaauu

SEQ ID NO: 2850 - RNA, 1920 nt, Artificial Sequence
  mRNA product Design c-3 comprising derived and/or modified sequence from HRSV(A2)__F-del_DSCav1_mut2 (opt2)
gggagaguccgcucagccagguugcagaagcggcuuagcguguguccuaaucuucucucugcguguagguaggccugugccgcaaacaagcuuaccauggagcuccucauccucaaggccaacgccaucaccaccauccucaccgccgucaccuucugcuucgccuccggccagaacaucaccgaggaguucuaccaguccaccugcuccgccgucuccaagggcuaccucggcgcccuccgcaccggcugguacaccuccgucaucaccaucgagcucuccaacaucaaggagaacaagugcaacggcaccgacgccaaggucaagcucaucaagcaggagcucgacaaguacaagaacgccgucaccgaccuccagcuccucaugcaguccacccccgccaccggcuccggcuccgccaucugcuccggcgucgccgucugcaagguccuccaccucgagggcgaggucaacaagaucaaguccgcccuccucuccaccaacaaggccgucgucucccucuccaacggcgucuccguccucaccuucaagguccucgaccucaagaacuacaucgacaagcagcuccuccccauccucaacaagcaguccugcuccauccccaacaucgagaccgucaucgaguuccagcagaagaacaaccgccuccucgagaucacccgcgaguucuccgucaacgccggcgucaccacccccgucuccaccuacaugcucaccaacuccgagcuccucucccucaucaacgacaugcccaucaccaacgaccagaagaagcucauguccaacaacguccagaucguccgccagcaguccuacuccaucaugugcaucaucaaggaggagguccucgccuacgucguccagcucccccucuacggcgucaucgacacccccugcuggaagcuccacaccuccccccucugcaccaccaacaccaaggagggcuccaacaucugccucacccgcaccgaccgcggcugguacugcgacaacgccggcuccgucuccuucuucccccaggccgagaccugcaagguccaguccaaccgcgucuucugcgacaccaugaacucccucacccuccccuccgaggucaaccucugcaacgucgacaucuucaaccccaaguacgacugcaagaucaugaccuccaagaccgacgucuccuccuccgucaucaccucccucggcgccaucgucuccugcuacggcaagaccaagugcaccgccuccaacaagaaccgcggcaucaucaagaccuucuccaacggcugcgacuacgucuccaacaagggcgucgacaccgucuccgucggcaacacccucuacugcgucaacaagcaggagggccagucccucuacgucaagggcgagcccaucaucaacuucuacgacccccucgucuuccccuccgacgaguucgacgccuccaucucccaggucaacgagaagaucaaccagucccucgccuucauccgcaaguccgacgagcuccuccacaacgucaacgccggcaaguccaccaccaacaucaugaucaccaccaucaucaucgucaucaucgucauccuccucucccucaucgccgucggccuccuccucuacugcaaggcccgcugaggacuaguacuggcugcaucucccuuuccucuguccuccauccuucucccaggauggugaagggggaccugguacccagugauccccaccccaggauccuaaaucaugacuuaccugcuaauaaaaacucauuggaaaagugagaagaucuaaaaaaaaaaaaaaaaaaaaaaaaaaaaaaaaaaaaaaaaaaaaaaaaaaaaaaaaaaaaaaaaugcaucccccccccccccccccccccccccccccccaaaggcucuuuucagagccaccagaauu

SEQ ID NO: 2851 - RNA, 1920 nt, Artificial Sequence
  mRNA product Design c-3 comprising derived and/or modified sequence from HRSV(A2)__F-del_DSCav1_mut2 (opt3)
gggagaguccgcucagccagguugcagaagcggcuuagcguguguccuaaucuucucucugcguguagguaggccugugccgcaaacaagcuuaccauggagcugcucauccuuaaggccaacgcuauuaccacaauacugacugcagugacguucugcuuugccagcggccagaauaucaccgaagaguucuaccaauccacauguucugcggucucaaaaggguauuugggagcuuuaagaacugguugguacaccaguguuauuacaaucgaacugagcaacauuaaggagaauaaaugcaacggcaccgacgccaaggugaaacuaaucaagcaggaacucgauaaguauaaaaaugcaguaacugaccugcagcuucugaugcaguccacacccgccaccgggucuggaucggcuauauguucaggcguggcagucugcaagguguugcaccucgagggugagguuaacaaaaucaagagcgcccugcugaguacgaauaaagcuguggucucccucucuaacggggugagcguauuaacuuuuaagguucuggaucuuaagaauuacauugacaaacaauugcugccuauccuaaacaagcaguccuguucaauuccaaauaucgaaaccgugauagaguuccagcagaaaaacaauaggcuccuggaaauuacacgggaguuuagugucaacgccggagugacuaccccggugagcacauauaugcuuaccaauucugagcuguugucccucaucaacgauaugcccauuacgaacgaccaaaagaaacugaugucaaauaacguccagaucguucgccagcagagcuacaguaucaugugcauuauaaaggaagagguguuagcguauguagugcaacugccucucuacggcgucaucgauacuccauguuggaaacuucauacaucuccccugugcaccacuaauacaaaggaaggcuccaacauuuguuugacccgaacggaccgugggugguacugcgauaaugcaggaagcgugucguucuuuccucaggccgagaccuguaagguucagucuaacagaguguucugcgacacaaugaacucccuaacucugccaucagaagucaaucucugcaauguggauaucuuuaaccccaaauaugacuguaagauaaugaccaguaaaacagauguaagcuccucuguuauuacuagccugggugcuaucgugucaugcuacggcaagaccaaauguacagccaguaauaagaacagggggaucauuaagaccuucuccaauggaugcgacuaugucagcaacaaaggcguggacacugucucuguggguaauacgcuuuacuguguuaacaagcaagaggggcagucacuguaugugaaaggagagccuaucauuaacuuuuacgauccauugguauucccgagugacgaauuugaugcaagcauaucccaggucaaugagaagaucaaccagucucucgcuuucauucggaaaucggacgaacuguuacacaaugugaacgccggcaagagcacaaccaauaucaugaucacuaccauuauaaucguuauuaucgugauucugcuaucccucaucgcggucggccugcuuuuguauugcaaggcccgcugaggacuaguacuggcugcaucucccuuuccucuguccuccauccuucucccaggauggugaagggggaccugguacccagugauccccaccccaggauccuaaaucaugacuuaccugcuaauaaaaacucauuggaaaagugagaagaucuaaaaaaaaaaaaaaaaaaaaaaaaaaaaaaaaaaaaaaaaaaaaaaaaaaaaaaaaaaaaaaaaugcaucccccccccccccccccccccccccccccccaaaggcucuuuucagagccaccagaauu

SEQ ID NO: 2852 - RNA, 1920 nt, Artificial Sequence
  mRNA product Design c-3 comprising derived and/or modified sequence from HRSV(A2)__F-del_DSCav1_mut2 (opt4)
gggagaguccgcucagccagguugcagaagcggcuuagcguguguccuaaucuucucucugcguguagguaggccugugccgcaaacaagcuuaccauggagcugcugauccugaaggccaacgccaucaccaccauccugaccgccgugaccuucugcuucgccagcggccagaacaucaccgaggaguucuaccagagcaccugcagcgccgugagcaagggcuaccugggcgcccugagaaccggcugguacaccagcgugaucaccaucgagcugagcaacaucaaggagaacaagugcaacggcaccgacgccaaggugaagcugaucaagcaggagcuggacaaguacaagaacgccgugaccgaccugcagcugcugaugcagagcacccccgccaccggcagcggcagcgccaucugcagcggcguggccgugugcaaggugcugcaccuggagggcgaggugaacaagaucaagagcgcccugcugagcaccaacaaggccguggugagccugagcaacggcgugagcgugcugaccuucaaggugcuggaccugaagaacuacaucgacaagcagcugcugcccauccugaacaagcagagcugcagcauccccaacaucgagaccgugaucgaguuccagcagaagaacaacagacugcuggagaucaccagagaguucagcgugaacgccggcgugaccacccccgugagcaccuacaugcugaccaacagcgagcugcugagccugaucaacgacaugcccaucaccaacgaccagaagaagcugaugagcaacaacgugcagaucgugagacagcagagcuacagcaucaugugcaucaucaaggaggaggugcuggccuacguggugcagcugccccuguacggcgugaucgacacccccugcuggaagcugcacaccagcccccugugcaccaccaacaccaaggagggcagcaacaucugccugaccagaaccgacagaggcugguacugcgacaacgccggcagcgugagcuucuucccccaggccgagaccugcaaggugcagagcaacagaguguucugcgacaccaugaacagccugacccugcccagcgaggugaaccugugcaacguggacaucuucaaccccaaguacgacugcaagaucaugaccagcaagaccgacgugagcagcagcgugaucaccagccugggcgccaucgugagcugcuacggcaagaccaagugcaccgccagcaacaagaacagaggcaucaucaagaccuucagcaacggcugcgacuacgugagcaacaagggcguggacaccgugagcgugggcaacacccuguacugcgugaacaagcaggagggccagagccuguacgugaagggcgagcccaucaucaacuucuacgacccccugguguuccccagcgacgaguucgacgccagcaucagccaggugaacgagaagaucaaccagagccuggccuucaucagaaagagcgacgagcugcugcacaacgugaacgccggcaagagcaccaccaacaucaugaucaccaccaucaucaucgugaucaucgugauccugcugagccugaucgccgugggccugcugcuguacugcaaggccagaugaggacuaguacuggcugcaucucccuuuccucuguccuccauccuucucccaggauggugaagggggaccugguacccagugauccccaccccaggauccuaaaucaugacuuaccugcuaauaaaaacucauuggaaaagugagaagaucuaaaaaaaaaaaaaaaaaaaaaaaaaaaaaaaaaaaaaaaaaaaaaaaaaaaaaaaaaaaaaaaaugcaucccccccccccccccccccccccccccccccaaaggcucuuuucagagccaccagaauu

SEQ ID NO: 2853 - RNA, 1920 nt, Artificial Sequence
  mRNA product Design c-3 comprising derived and/or modified sequence from HRSV(A2)__F-del_DSCav1_mut2 (opt5)
gggagaguccgcucagccagguugcagaagcggcuuagcguguguccuaaucuucucucugcguguagguaggccugugccgcaaacaagcuuaccauggagcugcucauccugaaggccaacgcuauuaccacaauccuuacggccgugaccuucugcuuugcgagcggccagaauauuacagaagaguucuaccaauccaccuguucugcugucagcaaaggguaucugggagcccucagaacaggcugguacaccuccguuaucacaauugaacugucuaacaucaaggagaauaaaugcaacgggaccgacgccaaggugaaacuuaucaagcaggaacuggauaaguauaaaaaugcugugacggaccuccagcugcugaugcagagcacccccgccacaggauccggcucugcuauuuguagcggggucgccgugugcaagguucuccaccuggagggagaggugaacaaaaucaaguccgcgcuucugagcaccaauaaagccgucgugucucucuccaacggcguuagcgugcugacauuuaagguccuugaucugaagaauuacauugacaaacaacuccugccuauccugaacaagcagucuuguuccauuccgaauaucgaaaccgugauugaguuccagcagaaaaacaaucggcuccuggaaaucacgcgcgaguuuagcgugaacgcuggcgucacaacccccguuucuacauauaugcuuaccaauuccgagcugcucagccugaucaacgauaugccuauuaccaacgaccaaaagaaacuuauguccaauaacgugcagaucgugagacagcagucuuacagcauuaugugcaucauuaaggaagagguccuggccuaugugguucaacucccccuguacggggugaucgauacaccuuguuggaaacugcauacgagcccccucugcaccacaaauaccaaggaaggauccaacaucugucugacacggaccgaccgcggcugguacugcgauaaugcugggucugucuccuucuuuccucaggccgagacguguaaggugcagagcaacagaguuuucugcgacacaaugaacucucuuacccugccgagcgaagugaaucucugcaaugucgauauuuuuaaccccaaauaugacuguaagaucaugaccuccaaaacagaugugucuagcuccgucauuaccagccugggagcgaucgugucuugcuacggcaagacaaaauguacggccuccaauaagaaccgggggauuaucaagaccuucagcaauggaugcgacuauguuucuaacaaaggcguggacacagucuccgugggcaauacccuuuacuguguuaacaagcaagaggggcagagccuguaugugaaaggagagccuaucauuaacuuuuacgauccccucgucuucccuuccgacgaauuugaugcuucuaucagccaggugaaugagaagauuaaccagucccuggccuucauccgcaaaucugacgaacugcuccacaaugugaacgcuggcaagagcacaaccaauauuaugaucacgaccauuaucaucguuauuaucgucauucugcuuucccugaucgccguggggcuccugcuguauugcaaggccagaugaggacuaguacuggcugcaucucccuuuccucuguccuccauccuucucccaggauggugaagggggaccugguacccagugauccccaccccaggauccuaaaucaugacuuaccugcuaauaaaaacucauuggaaaagugagaagaucuaaaaaaaaaaaaaaaaaaaaaaaaaaaaaaaaaaaaaaaaaaaaaaaaaaaaaaaaaaaaaaaaugcaucccccccccccccccccccccccccccccccaaaggcucuuuucagagccaccagaauu

SEQ ID NO: 2854 - RNA, 1920 nt, Artificial Sequence
  mRNA product Design c-3 comprising derived and/or modified sequence from HRSV(A2)__F-del_DSCav1_mut2 (opt6)
gggagaguccgcucagccagguugcagaagcggcuuagcguguguccuaaucuucucucugcguguagguaggccugugccgcaaacaagcuuaccauggaacuccuaauacuuaaagccaaugcaauaaccacaauacuaacagcaguaacauucugcuuugcaucaggacaaaacauaacagaagaauuuuaccaaucaacauguucagcaguaagcaaaggauaccuaggagccuuacgcacagguugguacacuuccguaauaacaauagaacucucaaauauaaaagaaaacaaaugcaacggaaccgaugcaaaaguaaaacuaauaaaacaagaauuagacaaauacaaaaacgcaguaacagaccuacaauuacuuaugcaaucaacacccgcaacaggauccggcucagcaaucuguucaggaguagcaguaugcaaaguucuccaccuagaaggcgaaguaaacaaaauaaaaucagcccuauuaucuaccaauaaagcaguaguaucacuaucaaauggaguaucuguccuaaccuucaaaguacuugaccuaaaaaauuacaucgacaaacaauuacuaccaauacuuaacaaacaaucauguucaauaccaaacauugaaacaguaauagaauuucaacaaaaaaauaacagauuauuagaaauaacccgcgaauuuucaguuaacgcaggaguaacaacaccaguauccacauacauguuaacaaauucagaacucuuaucacuuauaaacgacaugcccauaacaaacgaccaaaaaaaacucaugucuaacaauguucaaauaguucgacaacaaucauacuccauaaugugcauaauaaaagaagaaguucuagcauauguuguacaacucccacucuaugguguuauagacacaccaugcuggaaacuacauacaagccccuuaugcacuacaaacacaaaagaaggcucuaauauaugucuaacccgcacagacagaggcugguauugcgauaacgcagguucaguaucauucuuuccacaagcagaaacuugcaaaguccaauccaauagagucuucugcgacacuaugaacucacucacacucccaucugaagucaauuuauguaacgucgauaucuucaacccaaaauacgacugcaaaauaaugaccucaaaaacagacguaagcucaucagucauaacuucucuaggcgcaaucgucucauguuacggcaaaacaaaauguaccgcaucaaacaaaaaucgagguauaauaaaaaccuuuucuaacggcugcgacuacguaucaaacaaaggaguagauacuguaagugucggaaacacauuauacugcgucaacaaacaagaaggacaaucccuauauguuaaaggcgaaccuaucauuaauuucuacgacccacucgucuuuccauccgacgaauuugacgcaucaauuucccaaguaaaugaaaaaauaaaccaaucccuugcauucauaagaaaaucagaugaacuauuacacaacguaaacgcaggcaaaucaacaacaaauauaaugaucacaacaauaauaaucguaauaauaguaauccuacucucacuaauagcaguaggcuuacuauuauauugcaaagccagauaaggacuaguacuggcugcaucucccuuuccucuguccuccauccuucucccaggauggugaagggggaccugguacccagugauccccaccccaggauccuaaaucaugacuuaccugcuaauaaaaacucauuggaaaagugagaagaucuaaaaaaaaaaaaaaaaaaaaaaaaaaaaaaaaaaaaaaaaaaaaaaaaaaaaaaaaaaaaaaaaugcaucccccccccccccccccccccccccccccccaaaggcucuuuucagagccaccagaauu

SEQ ID NO: 2855 - RNA, 1920 nt, Artificial Sequence
  mRNA product Design c-3 comprising derived and/or modified sequence from HRSV(A2)__F-del_DSCav1_mut2 (opt11)
gggagaguccgcucagccagguugcagaagcggcuuagcguguguccuaaucuucucucugcguguagguaggccugugccgcaaacaagcuuaccauggaacuucuuauccuaaaagcgaacgccauaaccacaauccuaacagcagucaccuucuguuucgccucaggacaaaacaucaccgaggaauuuuaccaauccacauguagcgcugucucaaaaggcuaccucggcgcccuccgaaccggcugguacacauccguaauaacgaucgaacucuccaacauaaaagaaaauaaaugcaacggcaccgacgccaaagucaaacuuaucaaacaagaacuagacaaauacaaaaacgccgucaccgaccuccagcuccucaugcaauccaccccagcaacaggcuccggaagcgcaaucugcucaggcgucgccguaugcaaaguacuccaccucgaaggagaagucaacaaaaucaaauccgcccuccuauccacaaacaaagcaguugucucacucuccaacgggguaagcguacugaccuucaaaguccuagaccucaaaaacuacaucgauaaacaacuccuuccaauccucaacaaacaaucaugcucuauccccaacaucgaaaccguaaucgaauuucaacaaaaaaacaaccgccuacuugaaaucacacgcgaauuuagcgucaacgcaggaguaacaacacccguguccacauauaugcucacgaacagcgaacuacuaucccugauuaacgacaugcccaucaccaacgaccaaaaaaaacuaaugagcaacaacguacaaaucguccgccaacaaagcuacucuauaaugugcaucaucaaggaagaaguccuagccuacgucguccaauuaccacucuacggcgucaucgacacacccugcuggaaacuccauacauccccccucugcaccaccaacaccaaagaaggguccaacauaugccucacucgcacagaccgcggcugguacugcgacaacgcuggcagcgucagcuucuucccccaggccgaaaccugcaaaguccaauccaacagagucuucugcgacaccaugaacucgcucacccuccccuccgaggucaaccucugcaacgucgacauauucaaccccaaauacgacugcaaaaucaugaccuccaaaaccgacgucagcucaucagucaucacaucccucggggccaucgucuccugcuacggcaaaaccaagugcaccgccucaaacaaaaaccgcggcauuaucaaaacauucuccaacggcugcgacuacgucuccaacaaaggcgucgacacagucuccgucgguaacacccucuacugcguaaauaaacaagaaggccaaucccucuacgucaaaggcgaacccaucaucaacuucuacgacccucucgucuuccccuccgacgaauuugacgccucaaucagccaaguuaacgaaaaaaucaaccaaucacucgccuucauccgcaaauccgacgaacuccuccacaacguuaacgccggcaaaucuaccacgaacaucaugaucaccaccauaaucaucguaauuaucguaauacuccuaucccucauagcaguaggccuccuacucuacugcaaagcccguuaaggacuaguacuggcugcaucucccuuuccucuguccuccauccuucucccaggauggugaagggggaccugguacccagugauccccaccccaggauccuaaaucaugacuuaccugcuaauaaaaacucauuggaaaagugagaagaucuaaaaaaaaaaaaaaaaaaaaaaaaaaaaaaaaaaaaaaaaaaaaaaaaaaaaaaaaaaaaaaaaugcaucccccccccccccccccccccccccccccccaaaggcucuuuucagagccaccagaauu

SEQ ID NO: 2856 - RNA, 1916 nt, Artificial Sequence
  mRNA product Design c-4 comprising derived and/or modified sequence from HRSV(A2)__F-del_DSCav1_mut2 (opt1)
gggagaguccgcucagccagguugcagaagcggcuuagcguguguccuaaucuucucucugcguguagguaggccugugccgcaaacaagcuuaccauggagcugcucauccugaaggccaacgccaucaccaccauccugacggcggugaccuucugcuucgccagcggccagaacaucaccgaggaguucuaccaguccacgugcagcgccgucuccaagggguaccucggcgcccugcggaccggcugguacaccuccgugaucaccaucgagcugagcaacaucaaggagaacaagugcaacgggaccgacgccaaggugaagcucaucaagcaggagcuggacaaguacaagaacgcggucacggaccugcagcuccugaugcaguccaccccggcaaccggcuccggcuccgccaucugcagcggcgucgccgugugcaaggugcugcaccucgagggggaggucaacaagaucaagagcgcccugcuguccaccaacaaggccguggugagccucuccaacggcgucagcgugcugaccuucaaggugcuggaccucaagaacuacaucgacaagcagcugcugcccauccugaacaagcagagcugcuccauccccaacaucgagacggugaucgaguuccagcagaagaacaaccggcuccuggagaucacccgcgaguucagcgugaacgccggggucaccacccccguguccacguacaugcugaccaacagcgagcuccugucccugaucaacgacaugccgaucaccaacgaccagaagaagcucaugagcaacaacgugcagaucguccggcagcaguccuacagcaucaugugcaucaucaaggaggaggugcuggcguacgugguccagcugccccucuacggcgugaucgacacccccugcuggaagcugcacacgagcccccugugcaccaccaacaccaaggagggguccaacaucugccucacgcgcaccgaccggggcugguacugcgacaacgccggcagcgucuccuucuucccgcaggccgagaccugcaaggugcagagcaaccgcguguucugcgacaccaugaacucccugacgcugcccagcgagguaaaccucugcaacgucgacaucuucaaccccaaguacgacugcaagaucaugaccuccaagaccgacgugagcuccagcgugaucaccucccugggggccaucgucagcugcuacggcaagacgaagugcaccgccagcaacaagaaccgggggaucaucaagaccuucuccaacggcugcgacuacgugagcaacaagggcguggacaccguguccgucgggaacacccuguacugcgugaacaagcaggagggccagagccucuacgugaagggggagcccaucaucaacuucuacgacccgcuggucuuccccuccgacgaguucgacgcgagcaucucccaggugaacgagaagaucaaccagagccuggccuucauccgcaaguccgacgagcugcuccacaacgugaacgccggcaagagcacgaccaacaucaugaucaccaccaucaucaucgucaucaucgugauccugcugucccucaucgccguggggcugcugcucuacugcaaggcccggugaggacuaguggaagcauuuuccuggcugauuaaaagaaauuacucagcuauggucaucuguuccuguuagaaggcuaugcagcauauuauauacuaugcgcauguuaugaaaugcauaauaaaaaauuuuaaaaaaucuaaaagaucuaaaaaaaaaaaaaaaaaaaaaaaaaaaaaaaaaaaaaaaaaaaaaaaaaaaaaaaaaaaaaaaaugcaucccccccccccccccccccccccccccccccaaaggcucuuuucagagccaccagaauu

SEQ ID NO: 2857 - RNA, 1916 nt, Artificial Sequence
  mRNA product Design c-4 comprising derived and/or modified sequence from HRSV(A2)__F-del_DSCav1_mut2 (opt1)
gggagaguccgcucagccagguugcagaagcggcuuagcguguguccuaaucuucucucugcguguagguaggccugugccgcaaacaagcuuaccauggagcugcucauccugaaggccaacgccaucaccaccauccugacggcggugaccuucugcuucgccagcggccagaacaucaccgaggaguucuaccaguccacgugcagcgccgucuccaagggguaccucggcgcccugcgcaccgggugguacaccagcgugaucaccaucgagcuguccaacaucaaggagaacaagugcaacggcaccgacgccaaggugaagcucaucaagcaggagcuggacaaguacaagaacgcggucacggaccugcagcuccugaugcagagcacccccgccaccggguccggcagcgccaucugcuccggcguggccgugugcaagguccugcaccucgagggggaggugaacaagaucaagagcgcgcugcuguccaccaacaaggccguggucagccucuccaacggcgugagcgugcugacguucaagguccuggaccucaagaacuacaucgacaagcagcugcugccgauccucaacaagcaguccugcagcauccccaacaucgagaccgugaucgaguuccagcagaagaacaaccggcugcuggagaucacccgcgaguucuccgugaacgccggggucaccacgcccgugagcaccuacaugcucaccaacuccgagcugcugagccucaucaacgacaugcccaucaccaacgaccagaagaagcugaugagcaacaacgugcagaucguccggcagcaguccuacagcaucaugugcaucaucaaggaggaggugcuggccuacgugguccagcucccgcuguacggcgugaucgacacgcccugcuggaagcugcacaccagcccccucugcaccaccaacacgaaggagggguccaacaucugccugacccgcaccgaccggggcugguacugcgacaacgccggcuccgugagcuucuucccccaggcggagaccugcaagguccaguccaaccgcguguucugcgacacgaugaacagccugacccucccguccgaggucaaccugugcaacguggacaucuucaaccccaaguacgacugcaagaucaugaccagcaagaccgacguguccagcuccgucaucacgagccugggggccaucguguccugcuacggcaagaccaagugcaccgccagcaacaagaaccgggggaucaucaagaccuucuccaacggcugcgacuacgugagcaacaagggcgucgacacgguguccguggggaacacccucuacugcgucaacaagcaggagggccagagccuguacgugaagggggagcccaucaucaacuucuacgacccccugguguucccgagcgacgaguucgacgccuccaucagccaggucaacgagaagaucaaccagucccucgccuucauccgcaagagcgacgagcugcugcacaacgugaacgcgggcaaguccaccaccaacaucaugaucaccacgaucaucaucgugaucaucgucauccuccugagccugaucgccguggggcuccugcuguacugcaaggcccggugaggacuaguggaagcauuuuccuggcugauuaaaagaaauuacucagcuauggucaucuguuccuguuagaaggcuaugcagcauauuauauacuaugcgcauguuaugaaaugcauaauaaaaaauuuuaaaaaaucuaaaagaucuaaaaaaaaaaaaaaaaaaaaaaaaaaaaaaaaaaaaaaaaaaaaaaaaaaaaaaaaaaaaaaaaugcaucccccccccccccccccccccccccccccccaaaggcucuuuucagagccaccagaauu

SEQ ID NO: 2858 - RNA, 1916 nt, Artificial Sequence
  mRNA product Design c-4 comprising derived and/or modified sequence from HRSV(A2)__F-del_DSCav1_mut2 (opt2)
gggagaguccgcucagccagguugcagaagcggcuuagcguguguccuaaucuucucucugcguguagguaggccugugccgcaaacaagcuuaccauggagcuccucauccucaaggccaacgccaucaccaccauccucaccgccgucaccuucugcuucgccuccggccagaacaucaccgaggaguucuaccaguccaccugcuccgccgucuccaagggcuaccucggcgcccuccgcaccggcugguacaccuccgucaucaccaucgagcucuccaacaucaaggagaacaagugcaacggcaccgacgccaaggucaagcucaucaagcaggagcucgacaaguacaagaacgccgucaccgaccuccagcuccucaugcaguccacccccgccaccggcuccggcuccgccaucugcuccggcgucgccgucugcaagguccuccaccucgagggcgaggucaacaagaucaaguccgcccuccucuccaccaacaaggccgucgucucccucuccaacggcgucuccguccucaccuucaagguccucgaccucaagaacuacaucgacaagcagcuccuccccauccucaacaagcaguccugcuccauccccaacaucgagaccgucaucgaguuccagcagaagaacaaccgccuccucgagaucacccgcgaguucuccgucaacgccggcgucaccacccccgucuccaccuacaugcucaccaacuccgagcuccucucccucaucaacgacaugcccaucaccaacgaccagaagaagcucauguccaacaacguccagaucguccgccagcaguccuacuccaucaugugcaucaucaaggaggagguccucgccuacgucguccagcucccccucuacggcgucaucgacacccccugcuggaagcuccacaccuccccccucugcaccaccaacaccaaggagggcuccaacaucugccucacccgcaccgaccgcggcugguacugcgacaacgccggcuccgucuccuucuucccccaggccgagaccugcaagguccaguccaaccgcgucuucugcgacaccaugaacucccucacccuccccuccgaggucaaccucugcaacgucgacaucuucaaccccaaguacgacugcaagaucaugaccuccaagaccgacgucuccuccuccgucaucaccucccucggcgccaucgucuccugcuacggcaagaccaagugcaccgccuccaacaagaaccgcggcaucaucaagaccuucuccaacggcugcgacuacgucuccaacaagggcgucgacaccgucuccgucggcaacacccucuacugcgucaacaagcaggagggccagucccucuacgucaagggcgagcccaucaucaacuucuacgacccccucgucuuccccuccgacgaguucgacgccuccaucucccaggucaacgagaagaucaaccagucccucgccuucauccgcaaguccgacgagcuccuccacaacgucaacgccggcaaguccaccaccaacaucaugaucaccaccaucaucaucgucaucaucgucauccuccucucccucaucgccgucggccuccuccucuacugcaaggcccgcugaggacuaguggaagcauuuuccuggcugauuaaaagaaauuacucagcuauggucaucuguuccuguuagaaggcuaugcagcauauuauauacuaugcgcauguuaugaaaugcauaauaaaaaauuuuaaaaaaucuaaaagaucuaaaaaaaaaaaaaaaaaaaaaaaaaaaaaaaaaaaaaaaaaaaaaaaaaaaaaaaaaaaaaaaaugcaucccccccccccccccccccccccccccccccaaaggcucuuuucagagccaccagaauu

SEQ ID NO: 2859 - RNA, 1916 nt, Artificial Sequence
  mRNA product Design c-4 comprising derived and/or modified sequence from HRSV(A2)__F-del_DSCav1_mut2 (opt3)
gggagaguccgcucagccagguugcagaagcggcuuagcguguguccuaaucuucucucugcguguagguaggccugugccgcaaacaagcuuaccauggagcugcucauccuuaaggccaacgcuauuaccacaauacugacugcagugacguucugcuuugccagcggccagaauaucaccgaagaguucuaccaauccacauguucugcggucucaaaaggguauuugggagcuuuaagaacugguugguacaccaguguuauuacaaucgaacugagcaacauuaaggagaauaaaugcaacggcaccgacgccaaggugaaacuaaucaagcaggaacucgauaaguauaaaaaugcaguaacugaccugcagcuucugaugcaguccacacccgccaccgggucuggaucggcuauauguucaggcguggcagucugcaagguguugcaccucgagggugagguuaacaaaaucaagagcgcccugcugaguacgaauaaagcuguggucucccucucuaacggggugagcguauuaacuuuuaagguucuggaucuuaagaauuacauugacaaacaauugcugccuauccuaaacaagcaguccuguucaauuccaaauaucgaaaccgugauagaguuccagcagaaaaacaauaggcuccuggaaauuacacgggaguuuagugucaacgccggagugacuaccccggugagcacauauaugcuuaccaauucugagcuguugucccucaucaacgauaugcccauuacgaacgaccaaaagaaacugaugucaaauaacguccagaucguucgccagcagagcuacaguaucaugugcauuauaaaggaagagguguuagcguauguagugcaacugccucucuacggcgucaucgauacuccauguuggaaacuucauacaucuccccugugcaccacuaauacaaaggaaggcuccaacauuuguuugacccgaacggaccgugggugguacugcgauaaugcaggaagcgugucguucuuuccucaggccgagaccuguaagguucagucuaacagaguguucugcgacacaaugaacucccuaacucugccaucagaagucaaucucugcaauguggauaucuuuaaccccaaauaugacuguaagauaaugaccaguaaaacagauguaagcuccucuguuauuacuagccugggugcuaucgugucaugcuacggcaagaccaaauguacagccaguaauaagaacagggggaucauuaagaccuucuccaauggaugcgacuaugucagcaacaaaggcguggacacugucucuguggguaauacgcuuuacuguguuaacaagcaagaggggcagucacuguaugugaaaggagagccuaucauuaacuuuuacgauccauugguauucccgagugacgaauuugaugcaagcauaucccaggucaaugagaagaucaaccagucucucgcuuucauucggaaaucggacgaacuguuacacaaugugaacgccggcaagagcacaaccaauaucaugaucacuaccauuauaaucguuauuaucgugauucugcuaucccucaucgcggucggccugcuuuuguauugcaaggcccgcugaggacuaguggaagcauuuuccuggcugauuaaaagaaauuacucagcuauggucaucuguuccuguuagaaggcuaugcagcauauuauauacuaugcgcauguuaugaaaugcauaauaaaaaauuuuaaaaaaucuaaaagaucuaaaaaaaaaaaaaaaaaaaaaaaaaaaaaaaaaaaaaaaaaaaaaaaaaaaaaaaaaaaaaaaaugcaucccccccccccccccccccccccccccccccaaaggcucuuuucagagccaccagaauu

SEQ ID NO: 2860 - RNA, 1916 nt, Artificial Sequence
  mRNA product Design c-4 comprising derived and/or modified sequence from HRSV(A2)__F-del_DSCav1_mut2 (opt4)
gggagaguccgcucagccagguugcagaagcggcuuagcguguguccuaaucuucucucugcguguagguaggccugugccgcaaacaagcuuaccauggagcugcugauccugaaggccaacgccaucaccaccauccugaccgccgugaccuucugcuucgccagcggccagaacaucaccgaggaguucuaccagagcaccugcagcgccgugagcaagggcuaccugggcgcccugagaaccggcugguacaccagcgugaucaccaucgagcugagcaacaucaaggagaacaagugcaacggcaccgacgccaaggugaagcugaucaagcaggagcuggacaaguacaagaacgccgugaccgaccugcagcugcugaugcagagcacccccgccaccggcagcggcagcgccaucugcagcggcguggccgugugcaaggugcugcaccuggagggcgaggugaacaagaucaagagcgcccugcugagcaccaacaaggccguggugagccugagcaacggcgugagcgugcugaccuucaaggugcuggaccugaagaacuacaucgacaagcagcugcugcccauccugaacaagcagagcugcagcauccccaacaucgagaccgugaucgaguuccagcagaagaacaacagacugcuggagaucaccagagaguucagcgugaacgccggcgugaccacccccgugagcaccuacaugcugaccaacagcgagcugcugagccugaucaacgacaugcccaucaccaacgaccagaagaagcugaugagcaacaacgugcagaucgugagacagcagagcuacagcaucaugugcaucaucaaggaggaggugcuggccuacguggugcagcugccccuguacggcgugaucgacacccccugcuggaagcugcacaccagcccccugugcaccaccaacaccaaggagggcagcaacaucugccugaccagaaccgacagaggcugguacugcgacaacgccggcagcgugagcuucuucccccaggccgagaccugcaaggugcagagcaacagaguguucugcgacaccaugaacagccugacccugcccagcgaggugaaccugugcaacguggacaucuucaaccccaaguacgacugcaagaucaugaccagcaagaccgacgugagcagcagcgugaucaccagccugggcgccaucgugagcugcuacggcaagaccaagugcaccgccagcaacaagaacagaggcaucaucaagaccuucagcaacggcugcgacuacgugagcaacaagggcguggacaccgugagcgugggcaacacccuguacugcgugaacaagcaggagggccagagccuguacgugaagggcgagcccaucaucaacuucuacgacccccugguguuccccagcgacgaguucgacgccagcaucagccaggugaacgagaagaucaaccagagccuggccuucaucagaaagagcgacgagcugcugcacaacgugaacgccggcaagagcaccaccaacaucaugaucaccaccaucaucaucgugaucaucgugauccugcugagccugaucgccgugggccugcugcuguacugcaaggccagaugaggacuaguggaagcauuuuccuggcugauuaaaagaaauuacucagcuauggucaucuguuccuguuagaaggcuaugcagcauauuauauacuaugcgcauguuaugaaaugcauaauaaaaaauuuuaaaaaaucuaaaagaucuaaaaaaaaaaaaaaaaaaaaaaaaaaaaaaaaaaaaaaaaaaaaaaaaaaaaaaaaaaaaaaaaugcaucccccccccccccccccccccccccccccccaaaggcucuuuucagagccaccagaauu

SEQ ID NO: 2861 - RNA, 1916 nt, Artificial Sequence
  mRNA product Design c-4 comprising derived and/or modified sequence from HRSV(A2)__F-del_DSCav1_mut2 (opt5)
gggagaguccgcucagccagguugcagaagcggcuuagcguguguccuaaucuucucucugcguguagguaggccugugccgcaaacaagcuuaccauggagcugcucauccugaaggccaacgcuauuaccacaauccuuacggccgugaccuucugcuuugcgagcggccagaauauuacagaagaguucuaccaauccaccuguucugcugucagcaaaggguaucugggagcccucagaacaggcugguacaccuccguuaucacaauugaacugucuaacaucaaggagaauaaaugcaacgggaccgacgccaaggugaaacuuaucaagcaggaacuggauaaguauaaaaaugcugugacggaccuccagcugcugaugcagagcacccccgccacaggauccggcucugcuauuuguagcggggucgccgugugcaagguucuccaccuggagggagaggugaacaaaaucaaguccgcgcuucugagcaccaauaaagccgucgugucucucuccaacggcguuagcgugcugacauuuaagguccuugaucugaagaauuacauugacaaacaacuccugccuauccugaacaagcagucuuguuccauuccgaauaucgaaaccgugauugaguuccagcagaaaaacaaucggcuccuggaaaucacgcgcgaguuuagcgugaacgcuggcgucacaacccccguuucuacauauaugcuuaccaauuccgagcugcucagccugaucaacgauaugccuauuaccaacgaccaaaagaaacuuauguccaauaacgugcagaucgugagacagcagucuuacagcauuaugugcaucauuaaggaagagguccuggccuaugugguucaacucccccuguacggggugaucgauacaccuuguuggaaacugcauacgagcccccucugcaccacaaauaccaaggaaggauccaacaucugucugacacggaccgaccgcggcugguacugcgauaaugcugggucugucuccuucuuuccucaggccgagacguguaaggugcagagcaacagaguuuucugcgacacaaugaacucucuuacccugccgagcgaagugaaucucugcaaugucgauauuuuuaaccccaaauaugacuguaagaucaugaccuccaaaacagaugugucuagcuccgucauuaccagccugggagcgaucgugucuugcuacggcaagacaaaauguacggccuccaauaagaaccgggggauuaucaagaccuucagcaauggaugcgacuauguuucuaacaaaggcguggacacagucuccgugggcaauacccuuuacuguguuaacaagcaagaggggcagagccuguaugugaaaggagagccuaucauuaacuuuuacgauccccucgucuucccuuccgacgaauuugaugcuucuaucagccaggugaaugagaagauuaaccagucccuggccuucauccgcaaaucugacgaacugcuccacaaugugaacgcuggcaagagcacaaccaauauuaugaucacgaccauuaucaucguuauuaucgucauucugcuuucccugaucgccguggggcuccugcuguauugcaaggccagaugaggacuaguggaagcauuuuccuggcugauuaaaagaaauuacucagcuauggucaucuguuccuguuagaaggcuaugcagcauauuauauacuaugcgcauguuaugaaaugcauaauaaaaaauuuuaaaaaaucuaaaagaucuaaaaaaaaaaaaaaaaaaaaaaaaaaaaaaaaaaaaaaaaaaaaaaaaaaaaaaaaaaaaaaaaugcaucccccccccccccccccccccccccccccccaaaggcucuuuucagagccaccagaauu

SEQ ID NO: 2862 - RNA, 1916 nt, Artificial Sequence
  mRNA product Design c-4 comprising derived and/or modified sequence from HRSV(A2)__F-del_DSCav1_mut2 (opt6)
gggagaguccgcucagccagguugcagaagcggcuuagcguguguccuaaucuucucucugcguguagguaggccugugccgcaaacaagcuuaccauggaacuccuaauacuuaaagccaaugcaauaaccacaauacuaacagcaguaacauucugcuuugcaucaggacaaaacauaacagaagaauuuuaccaaucaacauguucagcaguaagcaaaggauaccuaggagccuuacgcacagguugguacacuuccguaauaacaauagaacucucaaauauaaaagaaaacaaaugcaacggaaccgaugcaaaaguaaaacuaauaaaacaagaauuagacaaauacaaaaacgcaguaacagaccuacaauuacuuaugcaaucaacacccgcaacaggauccggcucagcaaucuguucaggaguagcaguaugcaaaguucuccaccuagaaggcgaaguaaacaaaauaaaaucagcccuauuaucuaccaauaaagcaguaguaucacuaucaaauggaguaucuguccuaaccuucaaaguacuugaccuaaaaaauuacaucgacaaacaauuacuaccaauacuuaacaaacaaucauguucaauaccaaacauugaaacaguaauagaauuucaacaaaaaaauaacagauuauuagaaauaacccgcgaauuuucaguuaacgcaggaguaacaacaccaguauccacauacauguuaacaaauucagaacucuuaucacuuauaaacgacaugcccauaacaaacgaccaaaaaaaacucaugucuaacaauguucaaauaguucgacaacaaucauacuccauaaugugcauaauaaaagaagaaguucuagcauauguuguacaacucccacucuaugguguuauagacacaccaugcuggaaacuacauacaagccccuuaugcacuacaaacacaaaagaaggcucuaauauaugucuaacccgcacagacagaggcugguauugcgauaacgcagguucaguaucauucuuuccacaagcagaaacuugcaaaguccaauccaauagagucuucugcgacacuaugaacucacucacacucccaucugaagucaauuuauguaacgucgauaucuucaacccaaaauacgacugcaaaauaaugaccucaaaaacagacguaagcucaucagucauaacuucucuaggcgcaaucgucucauguuacggcaaaacaaaauguaccgcaucaaacaaaaaucgagguauaauaaaaaccuuuucuaacggcugcgacuacguaucaaacaaaggaguagauacuguaagugucggaaacacauuauacugcgucaacaaacaagaaggacaaucccuauauguuaaaggcgaaccuaucauuaauuucuacgacccacucgucuuuccauccgacgaauuugacgcaucaauuucccaaguaaaugaaaaaauaaaccaaucccuugcauucauaagaaaaucagaugaacuauuacacaacguaaacgcaggcaaaucaacaacaaauauaaugaucacaacaauaauaaucguaauaauaguaauccuacucucacuaauagcaguaggcuuacuauuauauugcaaagccagauaaggacuaguggaagcauuuuccuggcugauuaaaagaaauuacucagcuauggucaucuguuccuguuagaaggcuaugcagcauauuauauacuaugcgcauguuaugaaaugcauaauaaaaaauuuuaaaaaaucuaaaagaucuaaaaaaaaaaaaaaaaaaaaaaaaaaaaaaaaaaaaaaaaaaaaaaaaaaaaaaaaaaaaaaaaugcaucccccccccccccccccccccccccccccccaaaggcucuuuucagagccaccagaauu

SEQ ID NO: 2863 - RNA, 1916 nt, Artificial Sequence
  mRNA product Design c-4 comprising derived and/or modified sequence from HRSV(A2)__F-del_DSCav1_mut2 (opt11)
gggagaguccgcucagccagguugcagaagcggcuuagcguguguccuaaucuucucucugcguguagguaggccugugccgcaaacaagcuuaccauggaacuucuuauccuaaaagcgaacgccauaaccacaauccuaacagcagucaccuucuguuucgccucaggacaaaacaucaccgaggaauuuuaccaauccacauguagcgcugucucaaaaggcuaccucggcgcccuccgaaccggcugguacacauccguaauaacgaucgaacucuccaacauaaaagaaaauaaaugcaacggcaccgacgccaaagucaaacuuaucaaacaagaacuagacaaauacaaaaacgccgucaccgaccuccagcuccucaugcaauccaccccagcaacaggcuccggaagcgcaaucugcucaggcgucgccguaugcaaaguacuccaccucgaaggagaagucaacaaaaucaaauccgcccuccuauccacaaacaaagcaguugucucacucuccaacgggguaagcguacugaccuucaaaguccuagaccucaaaaacuacaucgauaaacaacuccuuccaauccucaacaaacaaucaugcucuauccccaacaucgaaaccguaaucgaauuucaacaaaaaaacaaccgccuacuugaaaucacacgcgaauuuagcgucaacgcaggaguaacaacacccguguccacauauaugcucacgaacagcgaacuacuaucccugauuaacgacaugcccaucaccaacgaccaaaaaaaacuaaugagcaacaacguacaaaucguccgccaacaaagcuacucuauaaugugcaucaucaaggaagaaguccuagccuacgucguccaauuaccacucuacggcgucaucgacacacccugcuggaaacuccauacauccccccucugcaccaccaacaccaaagaaggguccaacauaugccucacucgcacagaccgcggcugguacugcgacaacgcuggcagcgucagcuucuucccccaggccgaaaccugcaaaguccaauccaacagagucuucugcgacaccaugaacucgcucacccuccccuccgaggucaaccucugcaacgucgacauauucaaccccaaauacgacugcaaaaucaugaccuccaaaaccgacgucagcucaucagucaucacaucccucggggccaucgucuccugcuacggcaaaaccaagugcaccgccucaaacaaaaaccgcggcauuaucaaaacauucuccaacggcugcgacuacgucuccaacaaaggcgucgacacagucuccgucgguaacacccucuacugcguaaauaaacaagaaggccaaucccucuacgucaaaggcgaacccaucaucaacuucuacgacccucucgucuuccccuccgacgaauuugacgccucaaucagccaaguuaacgaaaaaaucaaccaaucacucgccuucauccgcaaauccgacgaacuccuccacaacguuaacgccggcaaaucuaccacgaacaucaugaucaccaccauaaucaucguaauuaucguaauacuccuaucccucauagcaguaggccuccuacucuacugcaaagcccguuaaggacuaguggaagcauuuuccuggcugauuaaaagaaauuacucagcuauggucaucuguuccuguuagaaggcuaugcagcauauuauauacuaugcgcauguuaugaaaugcauaauaaaaaauuuuaaaaaaucuaaaagaucuaaaaaaaaaaaaaaaaaaaaaaaaaaaaaaaaaaaaaaaaaaaaaaaaaaaaaaaaaaaaaaaaugcaucccccccccccccccccccccccccccccccaaaggcucuuuucagagccaccagaauu

SEQ ID NO: 2864 - RNA, 1834 nt, Artificial Sequence
  mRNA product Design c-5 comprising derived and/or modified sequence from HRSV(A2)__F-del_DSCav1_mut2 (opt1)
gggagagcggcucggccauuuugucccagucaguccggaggcugcggcugcagaaguaccgccugcggaguaacugcaaagaagcuuaccauggagcugcucauccugaaggccaacgccaucaccaccauccugacggcggugaccuucugcuucgccagcggccagaacaucaccgaggaguucuaccaguccacgugcagcgccgucuccaagggguaccucggcgcccugcggaccggcugguacaccuccgugaucaccaucgagcugagcaacaucaaggagaacaagugcaacgggaccgacgccaaggugaagcucaucaagcaggagcuggacaaguacaagaacgcggucacggaccugcagcuccugaugcaguccaccccggcaaccggcuccggcuccgccaucugcagcggcgucgccgugugcaaggugcugcaccucgagggggaggucaacaagaucaagagcgcccugcuguccaccaacaaggccguggugagccucuccaacggcgucagcgugcugaccuucaaggugcuggaccucaagaacuacaucgacaagcagcugcugcccauccugaacaagcagagcugcuccauccccaacaucgagacggugaucgaguuccagcagaagaacaaccggcuccuggagaucacccgcgaguucagcgugaacgccggggucaccacccccguguccacguacaugcugaccaacagcgagcuccugucccugaucaacgacaugccgaucaccaacgaccagaagaagcucaugagcaacaacgugcagaucguccggcagcaguccuacagcaucaugugcaucaucaaggaggaggugcuggcguacgugguccagcugccccucuacggcgugaucgacacccccugcuggaagcugcacacgagcccccugugcaccaccaacaccaaggagggguccaacaucugccucacgcgcaccgaccggggcugguacugcgacaacgccggcagcgucuccuucuucccgcaggccgagaccugcaaggugcagagcaaccgcguguucugcgacaccaugaacucccugacgcugcccagcgagguaaaccucugcaacgucgacaucuucaaccccaaguacgacugcaagaucaugaccuccaagaccgacgugagcuccagcgugaucaccucccugggggccaucgucagcugcuacggcaagacgaagugcaccgccagcaacaagaaccgggggaucaucaagaccuucuccaacggcugcgacuacgugagcaacaagggcguggacaccguguccgucgggaacacccuguacugcgugaacaagcaggagggccagagccucuacgugaagggggagcccaucaucaacuucuacgacccgcuggucuuccccuccgacgaguucgacgcgagcaucucccaggugaacgagaagaucaaccagagccuggccuucauccgcaaguccgacgagcugcuccacaacgugaacgccggcaagagcacgaccaacaucaugaucaccaccaucaucaucgucaucaucgugauccugcugucccucaucgccguggggcugcugcucuacugcaaggcccggugaggacuagucccuguucccagagcccacuuuuuuuucuuuuuuugaaauaaaauagccugucuuucagaucuaaaaaaaaaaaaaaaaaaaaaaaaaaaaaaaaaaaaaaaaaaaaaaaaaaaaaaaaaaaaaaaaugcaucccccccccccccccccccccccccccccccaaaggcucuuuucagagccaccagaauu

SEQ ID NO: 2865 - RNA, 1834 nt, Artificial Sequence
  mRNA product Design c-5 comprising derived and/or modified sequence from HRSV(A2)__F-del_DSCav1_mut2 (opt1)
gggagagcggcucggccauuuugucccagucaguccggaggcugcggcugcagaaguaccgccugcggaguaacugcaaagaagcuuaccauggagcugcucauccugaaggccaacgccaucaccaccauccugacggcggugaccuucugcuucgccagcggccagaacaucaccgaggaguucuaccaguccacgugcagcgccgucuccaagggguaccucggcgcccugcgcaccgggugguacaccagcgugaucaccaucgagcuguccaacaucaaggagaacaagugcaacggcaccgacgccaaggugaagcucaucaagcaggagcuggacaaguacaagaacgcggucacggaccugcagcuccugaugcagagcacccccgccaccggguccggcagcgccaucugcuccggcguggccgugugcaagguccugcaccucgagggggaggugaacaagaucaagagcgcgcugcuguccaccaacaaggccguggucagccucuccaacggcgugagcgugcugacguucaagguccuggaccucaagaacuacaucgacaagcagcugcugccgauccucaacaagcaguccugcagcauccccaacaucgagaccgugaucgaguuccagcagaagaacaaccggcugcuggagaucacccgcgaguucuccgugaacgccggggucaccacgcccgugagcaccuacaugcucaccaacuccgagcugcugagccucaucaacgacaugcccaucaccaacgaccagaagaagcugaugagcaacaacgugcagaucguccggcagcaguccuacagcaucaugugcaucaucaaggaggaggugcuggccuacgugguccagcucccgcuguacggcgugaucgacacgcccugcuggaagcugcacaccagcccccucugcaccaccaacacgaaggagggguccaacaucugccugacccgcaccgaccggggcugguacugcgacaacgccggcuccgugagcuucuucccccaggcggagaccugcaagguccaguccaaccgcguguucugcgacacgaugaacagccugacccucccguccgaggucaaccugugcaacguggacaucuucaaccccaaguacgacugcaagaucaugaccagcaagaccgacguguccagcuccgucaucacgagccugggggccaucguguccugcuacggcaagaccaagugcaccgccagcaacaagaaccgggggaucaucaagaccuucuccaacggcugcgacuacgugagcaacaagggcgucgacacgguguccguggggaacacccucuacugcgucaacaagcaggagggccagagccuguacgugaagggggagcccaucaucaacuucuacgacccccugguguucccgagcgacgaguucgacgccuccaucagccaggucaacgagaagaucaaccagucccucgccuucauccgcaagagcgacgagcugcugcacaacgugaacgcgggcaaguccaccaccaacaucaugaucaccacgaucaucaucgugaucaucgucauccuccugagccugaucgccguggggcuccugcuguacugcaaggcccggugaggacuagucccuguucccagagcccacuuuuuuuucuuuuuuugaaauaaaauagccugucuuucagaucuaaaaaaaaaaaaaaaaaaaaaaaaaaaaaaaaaaaaaaaaaaaaaaaaaaaaaaaaaaaaaaaaugcaucccccccccccccccccccccccccccccccaaaggcucuuuucagagccaccagaauu

SEQ ID NO: 2866 - RNA, 1834 nt, Artificial Sequence
  mRNA product Design c-5 comprising derived and/or modified sequence from HRSV(A2)__F-del_DSCav1_mut2 (opt2)
gggagagcggcucggccauuuugucccagucaguccggaggcugcggcugcagaaguaccgccugcggaguaacugcaaagaagcuuaccauggagcuccucauccucaaggccaacgccaucaccaccauccucaccgccgucaccuucugcuucgccuccggccagaacaucaccgaggaguucuaccaguccaccugcuccgccgucuccaagggcuaccucggcgcccuccgcaccggcugguacaccuccgucaucaccaucgagcucuccaacaucaaggagaacaagugcaacggcaccgacgccaaggucaagcucaucaagcaggagcucgacaaguacaagaacgccgucaccgaccuccagcuccucaugcaguccacccccgccaccggcuccggcuccgccaucugcuccggcgucgccgucugcaagguccuccaccucgagggcgaggucaacaagaucaaguccgcccuccucuccaccaacaaggccgucgucucccucuccaacggcgucuccguccucaccuucaagguccucgaccucaagaacuacaucgacaagcagcuccuccccauccucaacaagcaguccugcuccauccccaacaucgagaccgucaucgaguuccagcagaagaacaaccgccuccucgagaucacccgcgaguucuccgucaacgccggcgucaccacccccgucuccaccuacaugcucaccaacuccgagcuccucucccucaucaacgacaugcccaucaccaacgaccagaagaagcucauguccaacaacguccagaucguccgccagcaguccuacuccaucaugugcaucaucaaggaggagguccucgccuacgucguccagcucccccucuacggcgucaucgacacccccugcuggaagcuccacaccuccccccucugcaccaccaacaccaaggagggcuccaacaucugccucacccgcaccgaccgcggcugguacugcgacaacgccggcuccgucuccuucuucccccaggccgagaccugcaagguccaguccaaccgcgucuucugcgacaccaugaacucccucacccuccccuccgaggucaaccucugcaacgucgacaucuucaaccccaaguacgacugcaagaucaugaccuccaagaccgacgucuccuccuccgucaucaccucccucggcgccaucgucuccugcuacggcaagaccaagugcaccgccuccaacaagaaccgcggcaucaucaagaccuucuccaacggcugcgacuacgucuccaacaagggcgucgacaccgucuccgucggcaacacccucuacugcgucaacaagcaggagggccagucccucuacgucaagggcgagcccaucaucaacuucuacgacccccucgucuuccccuccgacgaguucgacgccuccaucucccaggucaacgagaagaucaaccagucccucgccuucauccgcaaguccgacgagcuccuccacaacgucaacgccggcaaguccaccaccaacaucaugaucaccaccaucaucaucgucaucaucgucauccuccucucccucaucgccgucggccuccuccucuacugcaaggcccgcugaggacuagucccuguucccagagcccacuuuuuuuucuuuuuuugaaauaaaauagccugucuuucagaucuaaaaaaaaaaaaaaaaaaaaaaaaaaaaaaaaaaaaaaaaaaaaaaaaaaaaaaaaaaaaaaaaugcaucccccccccccccccccccccccccccccccaaaggcucuuuucagagccaccagaauu

SEQ ID NO: 2867 - RNA, 1834 nt, Artificial Sequence
  mRNA product Design c-5 comprising derived and/or modified sequence from HRSV(A2)__F-del_DSCav1_mut2 (opt3)
gggagagcggcucggccauuuugucccagucaguccggaggcugcggcugcagaaguaccgccugcggaguaacugcaaagaagcuuaccauggagcugcucauccuuaaggccaacgcuauuaccacaauacugacugcagugacguucugcuuugccagcggccagaauaucaccgaagaguucuaccaauccacauguucugcggucucaaaaggguauuugggagcuuuaagaacugguugguacaccaguguuauuacaaucgaacugagcaacauuaaggagaauaaaugcaacggcaccgacgccaaggugaaacuaaucaagcaggaacucgauaaguauaaaaaugcaguaacugaccugcagcuucugaugcaguccacacccgccaccgggucuggaucggcuauauguucaggcguggcagucugcaagguguugcaccucgagggugagguuaacaaaaucaagagcgcccugcugaguacgaauaaagcuguggucucccucucuaacggggugagcguauuaacuuuuaagguucuggaucuuaagaauuacauugacaaacaauugcugccuauccuaaacaagcaguccuguucaauuccaaauaucgaaaccgugauagaguuccagcagaaaaacaauaggcuccuggaaauuacacgggaguuuagugucaacgccggagugacuaccccggugagcacauauaugcuuaccaauucugagcuguugucccucaucaacgauaugcccauuacgaacgaccaaaagaaacugaugucaaauaacguccagaucguucgccagcagagcuacaguaucaugugcauuauaaaggaagagguguuagcguauguagugcaacugccucucuacggcgucaucgauacuccauguuggaaacuucauacaucuccccugugcaccacuaauacaaaggaaggcuccaacauuuguuugacccgaacggaccgugggugguacugcgauaaugcaggaagcgugucguucuuuccucaggccgagaccuguaagguucagucuaacagaguguucugcgacacaaugaacucccuaacucugccaucagaagucaaucucugcaauguggauaucuuuaaccccaaauaugacuguaagauaaugaccaguaaaacagauguaagcuccucuguuauuacuagccugggugcuaucgugucaugcuacggcaagaccaaauguacagccaguaauaagaacagggggaucauuaagaccuucuccaauggaugcgacuaugucagcaacaaaggcguggacacugucucuguggguaauacgcuuuacuguguuaacaagcaagaggggcagucacuguaugugaaaggagagccuaucauuaacuuuuacgauccauugguauucccgagugacgaauuugaugcaagcauaucccaggucaaugagaagaucaaccagucucucgcuuucauucggaaaucggacgaacuguuacacaaugugaacgccggcaagagcacaaccaauaucaugaucacuaccauuauaaucguuauuaucgugauucugcuaucccucaucgcggucggccugcuuuuguauugcaaggcccgcugaggacuagucccuguucccagagcccacuuuuuuuucuuuuuuugaaauaaaauagccugucuuucagaucuaaaaaaaaaaaaaaaaaaaaaaaaaaaaaaaaaaaaaaaaaaaaaaaaaaaaaaaaaaaaaaaaugcaucccccccccccccccccccccccccccccccaaaggcucuuuucagagccaccagaauu

SEQ ID NO: 2868 - RNA, 1834 nt, Artificial Sequence
  mRNA product Design c-5 comprising derived and/or modified sequence from HRSV(A2)__F-del_DSCav1_mut2 (opt4)
gggagagcggcucggccauuuugucccagucaguccggaggcugcggcugcagaaguaccgccugcggaguaacugcaaagaagcuuaccauggagcugcugauccugaaggccaacgccaucaccaccauccugaccgccgugaccuucugcuucgccagcggccagaacaucaccgaggaguucuaccagagcaccugcagcgccgugagcaagggcuaccugggcgcccugagaaccggcugguacaccagcgugaucaccaucgagcugagcaacaucaaggagaacaagugcaacggcaccgacgccaaggugaagcugaucaagcaggagcuggacaaguacaagaacgccgugaccgaccugcagcugcugaugcagagcacccccgccaccggcagcggcagcgccaucugcagcggcguggccgugugcaaggugcugcaccuggagggcgaggugaacaagaucaagagcgcccugcugagcaccaacaaggccguggugagccugagcaacggcgugagcgugcugaccuucaaggugcuggaccugaagaacuacaucgacaagcagcugcugcccauccugaacaagcagagcugcagcauccccaacaucgagaccgugaucgaguuccagcagaagaacaacagacugcuggagaucaccagagaguucagcgugaacgccggcgugaccacccccgugagcaccuacaugcugaccaacagcgagcugcugagccugaucaacgacaugcccaucaccaacgaccagaagaagcugaugagcaacaacgugcagaucgugagacagcagagcuacagcaucaugugcaucaucaaggaggaggugcuggccuacguggugcagcugccccuguacggcgugaucgacacccccugcuggaagcugcacaccagcccccugugcaccaccaacaccaaggagggcagcaacaucugccugaccagaaccgacagaggcugguacugcgacaacgccggcagcgugagcuucuucccccaggccgagaccugcaaggugcagagcaacagaguguucugcgacaccaugaacagccugacccugcccagcgaggugaaccugugcaacguggacaucuucaaccccaaguacgacugcaagaucaugaccagcaagaccgacgugagcagcagcgugaucaccagccugggcgccaucgugagcugcuacggcaagaccaagugcaccgccagcaacaagaacagaggcaucaucaagaccuucagcaacggcugcgacuacgugagcaacaagggcguggacaccgugagcgugggcaacacccuguacugcgugaacaagcaggagggccagagccuguacgugaagggcgagcccaucaucaacuucuacgacccccugguguuccccagcgacgaguucgacgccagcaucagccaggugaacgagaagaucaaccagagccuggccuucaucagaaagagcgacgagcugcugcacaacgugaacgccggcaagagcaccaccaacaucaugaucaccaccaucaucaucgugaucaucgugauccugcugagccugaucgccgugggccugcugcuguacugcaaggccagaugaggacuagucccuguucccagagcccacuuuuuuuucuuuuuuugaaauaaaauagccugucuuucagaucuaaaaaaaaaaaaaaaaaaaaaaaaaaaaaaaaaaaaaaaaaaaaaaaaaaaaaaaaaaaaaaaaugcaucccccccccccccccccccccccccccccccaaaggcucuuuucagagccaccagaauu

SEQ ID NO: 2869 - RNA, 1834 nt, Artificial Sequence
  mRNA product Design c-5 comprising derived and/or modified sequence from HRSV(A2)__F-del_DSCav1_mut2 (opt5)
gggagagcggcucggccauuuugucccagucaguccggaggcugcggcugcagaaguaccgccugcggaguaacugcaaagaagcuuaccauggagcugcucauccugaaggccaacgcuauuaccacaauccuuacggccgugaccuucugcuuugcgagcggccagaauauuacagaagaguucuaccaauccaccuguucugcugucagcaaaggguaucugggagcccucagaacaggcugguacaccuccguuaucacaauugaacugucuaacaucaaggagaauaaaugcaacgggaccgacgccaaggugaaacuuaucaagcaggaacuggauaaguauaaaaaugcugugacggaccuccagcugcugaugcagagcacccccgccacaggauccggcucugcuauuuguagcggggucgccgugugcaagguucuccaccuggagggagaggugaacaaaaucaaguccgcgcuucugagcaccaauaaagccgucgugucucucuccaacggcguuagcgugcugacauuuaagguccuugaucugaagaauuacauugacaaacaacuccugccuauccugaacaagcagucuuguuccauuccgaauaucgaaaccgugauugaguuccagcagaaaaacaaucggcuccuggaaaucacgcgcgaguuuagcgugaacgcuggcgucacaacccccguuucuacauauaugcuuaccaauuccgagcugcucagccugaucaacgauaugccuauuaccaacgaccaaaagaaacuuauguccaauaacgugcagaucgugagacagcagucuuacagcauuaugugcaucauuaaggaagagguccuggccuaugugguucaacucccccuguacggggugaucgauacaccuuguuggaaacugcauacgagcccccucugcaccacaaauaccaaggaaggauccaacaucugucugacacggaccgaccgcggcugguacugcgauaaugcugggucugucuccuucuuuccucaggccgagacguguaaggugcagagcaacagaguuuucugcgacacaaugaacucucuuacccugccgagcgaagugaaucucugcaaugucgauauuuuuaaccccaaauaugacuguaagaucaugaccuccaaaacagaugugucuagcuccgucauuaccagccugggagcgaucgugucuugcuacggcaagacaaaauguacggccuccaauaagaaccgggggauuaucaagaccuucagcaauggaugcgacuauguuucuaacaaaggcguggacacagucuccgugggcaauacccuuuacuguguuaacaagcaagaggggcagagccuguaugugaaaggagagccuaucauuaacuuuuacgauccccucgucuucccuuccgacgaauuugaugcuucuaucagccaggugaaugagaagauuaaccagucccuggccuucauccgcaaaucugacgaacugcuccacaaugugaacgcuggcaagagcacaaccaauauuaugaucacgaccauuaucaucguuauuaucgucauucugcuuucccugaucgccguggggcuccugcuguauugcaaggccagaugaggacuagucccuguucccagagcccacuuuuuuuucuuuuuuugaaauaaaauagccugucuuucagaucuaaaaaaaaaaaaaaaaaaaaaaaaaaaaaaaaaaaaaaaaaaaaaaaaaaaaaaaaaaaaaaaaugcaucccccccccccccccccccccccccccccccaaaggcucuuuucagagccaccagaauu

SEQ ID NO: 2870 - RNA, 1834 nt, Artificial Sequence
  mRNA product Design c-5 comprising derived and/or modified sequence from HRSV(A2)__F-del_DSCav1_mut2 (opt6)
gggagagcggcucggccauuuugucccagucaguccggaggcugcggcugcagaaguaccgccugcggaguaacugcaaagaagcuuaccauggaacuccuaauacuuaaagccaaugcaauaaccacaauacuaacagcaguaacauucugcuuugcaucaggacaaaacauaacagaagaauuuuaccaaucaacauguucagcaguaagcaaaggauaccuaggagccuuacgcacagguugguacacuuccguaauaacaauagaacucucaaauauaaaagaaaacaaaugcaacggaaccgaugcaaaaguaaaacuaauaaaacaagaauuagacaaauacaaaaacgcaguaacagaccuacaauuacuuaugcaaucaacacccgcaacaggauccggcucagcaaucuguucaggaguagcaguaugcaaaguucuccaccuagaaggcgaaguaaacaaaauaaaaucagcccuauuaucuaccaauaaagcaguaguaucacuaucaaauggaguaucuguccuaaccuucaaaguacuugaccuaaaaaauuacaucgacaaacaauuacuaccaauacuuaacaaacaaucauguucaauaccaaacauugaaacaguaauagaauuucaacaaaaaaauaacagauuauuagaaauaacccgcgaauuuucaguuaacgcaggaguaacaacaccaguauccacauacauguuaacaaauucagaacucuuaucacuuauaaacgacaugcccauaacaaacgaccaaaaaaaacucaugucuaacaauguucaaauaguucgacaacaaucauacuccauaaugugcauaauaaaagaagaaguucuagcauauguuguacaacucccacucuaugguguuauagacacaccaugcuggaaacuacauacaagccccuuaugcacuacaaacacaaaagaaggcucuaauauaugucuaacccgcacagacagaggcugguauugcgauaacgcagguucaguaucauucuuuccacaagcagaaacuugcaaaguccaauccaauagagucuucugcgacacuaugaacucacucacacucccaucugaagucaauuuauguaacgucgauaucuucaacccaaaauacgacugcaaaauaaugaccucaaaaacagacguaagcucaucagucauaacuucucuaggcgcaaucgucucauguuacggcaaaacaaaauguaccgcaucaaacaaaaaucgagguauaauaaaaaccuuuucuaacggcugcgacuacguaucaaacaaaggaguagauacuguaagugucggaaacacauuauacugcgucaacaaacaagaaggacaaucccuauauguuaaaggcgaaccuaucauuaauuucuacgacccacucgucuuuccauccgacgaauuugacgcaucaauuucccaaguaaaugaaaaaauaaaccaaucccuugcauucauaagaaaaucagaugaacuauuacacaacguaaacgcaggcaaaucaacaacaaauauaaugaucacaacaauaauaaucguaauaauaguaauccuacucucacuaauagcaguaggcuuacuauuauauugcaaagccagauaaggacuagucccuguucccagagcccacuuuuuuuucuuuuuuugaaauaaaauagccugucuuucagaucuaaaaaaaaaaaaaaaaaaaaaaaaaaaaaaaaaaaaaaaaaaaaaaaaaaaaaaaaaaaaaaaaugcaucccccccccccccccccccccccccccccccaaaggcucuuuucagagccaccagaauu

SEQ ID NO: 2871 - RNA, 1834 nt, Artificial Sequence
  mRNA product Design c-5 comprising derived and/or modified sequence from HRSV(A2)__F-del_DSCav1_mut2 (opt11)
gggagagcggcucggccauuuugucccagucaguccggaggcugcggcugcagaaguaccgccugcggaguaacugcaaagaagcuuaccauggaacuucuuauccuaaaagcgaacgccauaaccacaauccuaacagcagucaccuucuguuucgccucaggacaaaacaucaccgaggaauuuuaccaauccacauguagcgcugucucaaaaggcuaccucggcgcccuccgaaccggcugguacacauccguaauaacgaucgaacucuccaacauaaaagaaaauaaaugcaacggcaccgacgccaaagucaaacuuaucaaacaagaacuagacaaauacaaaaacgccgucaccgaccuccagcuccucaugcaauccaccccagcaacaggcuccggaagcgcaaucugcucaggcgucgccguaugcaaaguacuccaccucgaaggagaagucaacaaaaucaaauccgcccuccuauccacaaacaaagcaguugucucacucuccaacgggguaagcguacugaccuucaaaguccuagaccucaaaaacuacaucgauaaacaacuccuuccaauccucaacaaacaaucaugcucuauccccaacaucgaaaccguaaucgaauuucaacaaaaaaacaaccgccuacuugaaaucacacgcgaauuuagcgucaacgcaggaguaacaacacccguguccacauauaugcucacgaacagcgaacuacuaucccugauuaacgacaugcccaucaccaacgaccaaaaaaaacuaaugagcaacaacguacaaaucguccgccaacaaagcuacucuauaaugugcaucaucaaggaagaaguccuagccuacgucguccaauuaccacucuacggcgucaucgacacacccugcuggaaacuccauacauccccccucugcaccaccaacaccaaagaaggguccaacauaugccucacucgcacagaccgcggcugguacugcgacaacgcuggcagcgucagcuucuucccccaggccgaaaccugcaaaguccaauccaacagagucuucugcgacaccaugaacucgcucacccuccccuccgaggucaaccucugcaacgucgacauauucaaccccaaauacgacugcaaaaucaugaccuccaaaaccgacgucagcucaucagucaucacaucccucggggccaucgucuccugcuacggcaaaaccaagugcaccgccucaaacaaaaaccgcggcauuaucaaaacauucuccaacggcugcgacuacgucuccaacaaaggcgucgacacagucuccgucgguaacacccucuacugcguaaauaaacaagaaggccaaucccucuacgucaaaggcgaacccaucaucaacuucuacgacccucucgucuuccccuccgacgaauuugacgccucaaucagccaaguuaacgaaaaaaucaaccaaucacucgccuucauccgcaaauccgacgaacuccuccacaacguuaacgccggcaaaucuaccacgaacaucaugaucaccaccauaaucaucguaauuaucguaauacuccuaucccucauagcaguaggccuccuacucuacugcaaagcccguuaaggacuagucccuguucccagagcccacuuuuuuuucuuuuuuugaaauaaaauagccugucuuucagaucuaaaaaaaaaaaaaaaaaaaaaaaaaaaaaaaaaaaaaaaaaaaaaaaaaaaaaaaaaaaaaaaaugcaucccccccccccccccccccccccccccccccaaaggcucuuuucagagccaccagaauu

SEQ ID NO: 2872 - RNA, 1843 nt, Artificial Sequence
  mRNA product Design d-1 comprising derived and/or modified sequence from HRSV(A2)__F-del_DSCav1_mut2 (opt1)
gggagacccgugacccggaaguuguacggcuacgcgacuuucccucccacaaacccucgcgcccuuccuuuccuacuugggcccggcagaaagcuuaccauggagcugcucauccugaaggccaacgccaucaccaccauccugacggcggugaccuucugcuucgccagcggccagaacaucaccgaggaguucuaccaguccacgugcagcgccgucuccaagggguaccucggcgcccugcggaccggcugguacaccuccgugaucaccaucgagcugagcaacaucaaggagaacaagugcaacgggaccgacgccaaggugaagcucaucaagcaggagcuggacaaguacaagaacgcggucacggaccugcagcuccugaugcaguccaccccggcaaccggcuccggcuccgccaucugcagcggcgucgccgugugcaaggugcugcaccucgagggggaggucaacaagaucaagagcgcccugcuguccaccaacaaggccguggugagccucuccaacggcgucagcgugcugaccuucaaggugcuggaccucaagaacuacaucgacaagcagcugcugcccauccugaacaagcagagcugcuccauccccaacaucgagacggugaucgaguuccagcagaagaacaaccggcuccuggagaucacccgcgaguucagcgugaacgccggggucaccacccccguguccacguacaugcugaccaacagcgagcuccugucccugaucaacgacaugccgaucaccaacgaccagaagaagcucaugagcaacaacgugcagaucguccggcagcaguccuacagcaucaugugcaucaucaaggaggaggugcuggcguacgugguccagcugccccucuacggcgugaucgacacccccugcuggaagcugcacacgagcccccugugcaccaccaacaccaaggagggguccaacaucugccucacgcgcaccgaccggggcugguacugcgacaacgccggcagcgucuccuucuucccgcaggccgagaccugcaaggugcagagcaaccgcguguucugcgacaccaugaacucccugacgcugcccagcgagguaaaccucugcaacgucgacaucuucaaccccaaguacgacugcaagaucaugaccuccaagaccgacgugagcuccagcgugaucaccucccugggggccaucgucagcugcuacggcaagacgaagugcaccgccagcaacaagaaccgggggaucaucaagaccuucuccaacggcugcgacuacgugagcaacaagggcguggacaccguguccgucgggaacacccuguacugcgugaacaagcaggagggccagagccucuacgugaagggggagcccaucaucaacuucuacgacccgcuggucuuccccuccgacgaguucgacgcgagcaucucccaggugaacgagaagaucaaccagagccuggccuucauccgcaaguccgacgagcugcuccacaacgugaacgccggcaagagcacgaccaacaucaugaucaccaccaucaucaucgucaucaucgugauccugcugucccucaucgccguggggcugcugcucuacugcaaggcccggugaggacuagucccuguucccagagcccacuuuuuuuucuuuuuuugaaauaaaauagccugucuuucagaucuaaaaaaaaaaaaaaaaaaaaaaaaaaaaaaaaaaaaaaaaaaaaaaaaaaaaaaaaaaaaaaaaugcaucccccccccccccccccccccccccccccccaaaggcucuuuucagagccaccagaauu

SEQ ID NO: 2873 - RNA, 1843 nt, Artificial Sequence
  mRNA product Design d-1 comprising derived and/or modified sequence from HRSV(A2)__F-del_DSCav1_mut2 (opt1)
gggagacccgugacccggaaguuguacggcuacgcgacuuucccucccacaaacccucgcgcccuuccuuuccuacuugggcccggcagaaagcuuaccauggagcugcucauccugaaggccaacgccaucaccaccauccugacggcggugaccuucugcuucgccagcggccagaacaucaccgaggaguucuaccaguccacgugcagcgccgucuccaagggguaccucggcgcccugcgcaccgggugguacaccagcgugaucaccaucgagcuguccaacaucaaggagaacaagugcaacggcaccgacgccaaggugaagcucaucaagcaggagcuggacaaguacaagaacgcggucacggaccugcagcuccugaugcagagcacccccgccaccggguccggcagcgccaucugcuccggcguggccgugugcaagguccugcaccucgagggggaggugaacaagaucaagagcgcgcugcuguccaccaacaaggccguggucagccucuccaacggcgugagcgugcugacguucaagguccuggaccucaagaacuacaucgacaagcagcugcugccgauccucaacaagcaguccugcagcauccccaacaucgagaccgugaucgaguuccagcagaagaacaaccggcugcuggagaucacccgcgaguucuccgugaacgccggggucaccacgcccgugagcaccuacaugcucaccaacuccgagcugcugagccucaucaacgacaugcccaucaccaacgaccagaagaagcugaugagcaacaacgugcagaucguccggcagcaguccuacagcaucaugugcaucaucaaggaggaggugcuggccuacgugguccagcucccgcuguacggcgugaucgacacgcccugcuggaagcugcacaccagcccccucugcaccaccaacacgaaggagggguccaacaucugccugacccgcaccgaccggggcugguacugcgacaacgccggcuccgugagcuucuucccccaggcggagaccugcaagguccaguccaaccgcguguucugcgacacgaugaacagccugacccucccguccgaggucaaccugugcaacguggacaucuucaaccccaaguacgacugcaagaucaugaccagcaagaccgacguguccagcuccgucaucacgagccugggggccaucguguccugcuacggcaagaccaagugcaccgccagcaacaagaaccgggggaucaucaagaccuucuccaacggcugcgacuacgugagcaacaagggcgucgacacgguguccguggggaacacccucuacugcgucaacaagcaggagggccagagccuguacgugaagggggagcccaucaucaacuucuacgacccccugguguucccgagcgacgaguucgacgccuccaucagccaggucaacgagaagaucaaccagucccucgccuucauccgcaagagcgacgagcugcugcacaacgugaacgcgggcaaguccaccaccaacaucaugaucaccacgaucaucaucgugaucaucgucauccuccugagccugaucgccguggggcuccugcuguacugcaaggcccggugaggacuagucccuguucccagagcccacuuuuuuuucuuuuuuugaaauaaaauagccugucuuucagaucuaaaaaaaaaaaaaaaaaaaaaaaaaaaaaaaaaaaaaaaaaaaaaaaaaaaaaaaaaaaaaaaaugcaucccccccccccccccccccccccccccccccaaaggcucuuuucagagccaccagaauu

SEQ ID NO: 2874 - RNA, 1843 nt, Artificial Sequence
  mRNA product Design d-1 comprising derived and/or modified sequence from HRSV(A2)__F-del_DSCav1_mut2 (opt2)
gggagacccgugacccggaaguuguacggcuacgcgacuuucccucccacaaacccucgcgcccuuccuuuccuacuugggcccggcagaaagcuuaccauggagcuccucauccucaaggccaacgccaucaccaccauccucaccgccgucaccuucugcuucgccuccggccagaacaucaccgaggaguucuaccaguccaccugcuccgccgucuccaagggcuaccucggcgcccuccgcaccggcugguacaccuccgucaucaccaucgagcucuccaacaucaaggagaacaagugcaacggcaccgacgccaaggucaagcucaucaagcaggagcucgacaaguacaagaacgccgucaccgaccuccagcuccucaugcaguccacccccgccaccggcuccggcuccgccaucugcuccggcgucgccgucugcaagguccuccaccucgagggcgaggucaacaagaucaaguccgcccuccucuccaccaacaaggccgucgucucccucuccaacggcgucuccguccucaccuucaagguccucgaccucaagaacuacaucgacaagcagcuccuccccauccucaacaagcaguccugcuccauccccaacaucgagaccgucaucgaguuccagcagaagaacaaccgccuccucgagaucacccgcgaguucuccgucaacgccggcgucaccacccccgucuccaccuacaugcucaccaacuccgagcuccucucccucaucaacgacaugcccaucaccaacgaccagaagaagcucauguccaacaacguccagaucguccgccagcaguccuacuccaucaugugcaucaucaaggaggagguccucgccuacgucguccagcucccccucuacggcgucaucgacacccccugcuggaagcuccacaccuccccccucugcaccaccaacaccaaggagggcuccaacaucugccucacccgcaccgaccgcggcugguacugcgacaacgccggcuccgucuccuucuucccccaggccgagaccugcaagguccaguccaaccgcgucuucugcgacaccaugaacucccucacccuccccuccgaggucaaccucugcaacgucgacaucuucaaccccaaguacgacugcaagaucaugaccuccaagaccgacgucuccuccuccgucaucaccucccucggcgccaucgucuccugcuacggcaagaccaagugcaccgccuccaacaagaaccgcggcaucaucaagaccuucuccaacggcugcgacuacgucuccaacaagggcgucgacaccgucuccgucggcaacacccucuacugcgucaacaagcaggagggccagucccucuacgucaagggcgagcccaucaucaacuucuacgacccccucgucuuccccuccgacgaguucgacgccuccaucucccaggucaacgagaagaucaaccagucccucgccuucauccgcaaguccgacgagcuccuccacaacgucaacgccggcaaguccaccaccaacaucaugaucaccaccaucaucaucgucaucaucgucauccuccucucccucaucgccgucggccuccuccucuacugcaaggcccgcugaggacuagucccuguucccagagcccacuuuuuuuucuuuuuuugaaauaaaauagccugucuuucagaucuaaaaaaaaaaaaaaaaaaaaaaaaaaaaaaaaaaaaaaaaaaaaaaaaaaaaaaaaaaaaaaaaugcaucccccccccccccccccccccccccccccccaaaggcucuuuucagagccaccagaauu

SEQ ID NO: 2875 - RNA, 1843 nt, Artificial Sequence
  mRNA product Design d-1 comprising derived and/or modified sequence from HRSV(A2)__F-del_DSCav1_mut2 (opt3)
gggagacccgugacccggaaguuguacggcuacgcgacuuucccucccacaaacccucgcgcccuuccuuuccuacuugggcccggcagaaagcuuaccauggagcugcucauccuuaaggccaacgcuauuaccacaauacugacugcagugacguucugcuuugccagcggccagaauaucaccgaagaguucuaccaauccacauguucugcggucucaaaaggguauuugggagcuuuaagaacugguugguacaccaguguuauuacaaucgaacugagcaacauuaaggagaauaaaugcaacggcaccgacgccaaggugaaacuaaucaagcaggaacucgauaaguauaaaaaugcaguaacugaccugcagcuucugaugcaguccacacccgccaccgggucuggaucggcuauauguucaggcguggcagucugcaagguguugcaccucgagggugagguuaacaaaaucaagagcgcccugcugaguacgaauaaagcuguggucucccucucuaacggggugagcguauuaacuuuuaagguucuggaucuuaagaauuacauugacaaacaauugcugccuauccuaaacaagcaguccuguucaauuccaaauaucgaaaccgugauagaguuccagcagaaaaacaauaggcuccuggaaauuacacgggaguuuagugucaacgccggagugacuaccccggugagcacauauaugcuuaccaauucugagcuguugucccucaucaacgauaugcccauuacgaacgaccaaaagaaacugaugucaaauaacguccagaucguucgccagcagagcuacaguaucaugugcauuauaaaggaagagguguuagcguauguagugcaacugccucucuacggcgucaucgauacuccauguuggaaacuucauacaucuccccugugcaccacuaauacaaaggaaggcuccaacauuuguuugacccgaacggaccgugggugguacugcgauaaugcaggaagcgugucguucuuuccucaggccgagaccuguaagguucagucuaacagaguguucugcgacacaaugaacucccuaacucugccaucagaagucaaucucugcaauguggauaucuuuaaccccaaauaugacuguaagauaaugaccaguaaaacagauguaagcuccucuguuauuacuagccugggugcuaucgugucaugcuacggcaagaccaaauguacagccaguaauaagaacagggggaucauuaagaccuucuccaauggaugcgacuaugucagcaacaaaggcguggacacugucucuguggguaauacgcuuuacuguguuaacaagcaagaggggcagucacuguaugugaaaggagagccuaucauuaacuuuuacgauccauugguauucccgagugacgaauuugaugcaagcauaucccaggucaaugagaagaucaaccagucucucgcuuucauucggaaaucggacgaacuguuacacaaugugaacgccggcaagagcacaaccaauaucaugaucacuaccauuauaaucguuauuaucgugauucugcuaucccucaucgcggucggccugcuuuuguauugcaaggcccgcugaggacuagucccuguucccagagcccacuuuuuuuucuuuuuuugaaauaaaauagccugucuuucagaucuaaaaaaaaaaaaaaaaaaaaaaaaaaaaaaaaaaaaaaaaaaaaaaaaaaaaaaaaaaaaaaaaugcaucccccccccccccccccccccccccccccccaaaggcucuuuucagagccaccagaauu

SEQ ID NO: 2876 - RNA, 1843 nt, Artificial Sequence
  mRNA product Design d-1 comprising derived and/or modified sequence from HRSV(A2)__F-del_DSCav1_mut2 (opt4)
gggagacccgugacccggaaguuguacggcuacgcgacuuucccucccacaaacccucgcgcccuuccuuuccuacuugggcccggcagaaagcuuaccauggagcugcugauccugaaggccaacgccaucaccaccauccugaccgccgugaccuucugcuucgccagcggccagaacaucaccgaggaguucuaccagagcaccugcagcgccgugagcaagggcuaccugggcgcccugagaaccggcugguacaccagcgugaucaccaucgagcugagcaacaucaaggagaacaagugcaacggcaccgacgccaaggugaagcugaucaagcaggagcuggacaaguacaagaacgccgugaccgaccugcagcugcugaugcagagcacccccgccaccggcagcggcagcgccaucugcagcggcguggccgugugcaaggugcugcaccuggagggcgaggugaacaagaucaagagcgcccugcugagcaccaacaaggccguggugagccugagcaacggcgugagcgugcugaccuucaaggugcuggaccugaagaacuacaucgacaagcagcugcugcccauccugaacaagcagagcugcagcauccccaacaucgagaccgugaucgaguuccagcagaagaacaacagacugcuggagaucaccagagaguucagcgugaacgccggcgugaccacccccgugagcaccuacaugcugaccaacagcgagcugcugagccugaucaacgacaugcccaucaccaacgaccagaagaagcugaugagcaacaacgugcagaucgugagacagcagagcuacagcaucaugugcaucaucaaggaggaggugcuggccuacguggugcagcugccccuguacggcgugaucgacacccccugcuggaagcugcacaccagcccccugugcaccaccaacaccaaggagggcagcaacaucugccugaccagaaccgacagaggcugguacugcgacaacgccggcagcgugagcuucuucccccaggccgagaccugcaaggugcagagcaacagaguguucugcgacaccaugaacagccugacccugcccagcgaggugaaccugugcaacguggacaucuucaaccccaaguacgacugcaagaucaugaccagcaagaccgacgugagcagcagcgugaucaccagccugggcgccaucgugagcugcuacggcaagaccaagugcaccgccagcaacaagaacagaggcaucaucaagaccuucagcaacggcugcgacuacgugagcaacaagggcguggacaccgugagcgugggcaacacccuguacugcgugaacaagcaggagggccagagccuguacgugaagggcgagcccaucaucaacuucuacgacccccugguguuccccagcgacgaguucgacgccagcaucagccaggugaacgagaagaucaaccagagccuggccuucaucagaaagagcgacgagcugcugcacaacgugaacgccggcaagagcaccaccaacaucaugaucaccaccaucaucaucgugaucaucgugauccugcugagccugaucgccgugggccugcugcuguacugcaaggccagaugaggacuagucccuguucccagagcccacuuuuuuuucuuuuuuugaaauaaaauagccugucuuucagaucuaaaaaaaaaaaaaaaaaaaaaaaaaaaaaaaaaaaaaaaaaaaaaaaaaaaaaaaaaaaaaaaaugcaucccccccccccccccccccccccccccccccaaaggcucuuuucagagccaccagaauu

SEQ ID NO: 2877 - RNA, 1843 nt, Artificial Sequence
  mRNA product Design d-1 comprising derived and/or modified sequence from HRSV(A2)__F-del_DSCav1_mut2 (opt5)
gggagacccgugacccggaaguuguacggcuacgcgacuuucccucccacaaacccucgcgcccuuccuuuccuacuugggcccggcagaaagcuuaccauggagcugcucauccugaaggccaacgcuauuaccacaauccuuacggccgugaccuucugcuuugcgagcggccagaauauuacagaagaguucuaccaauccaccuguucugcugucagcaaaggguaucugggagcccucagaacaggcugguacaccuccguuaucacaauugaacugucuaacaucaaggagaauaaaugcaacgggaccgacgccaaggugaaacuuaucaagcaggaacuggauaaguauaaaaaugcugugacggaccuccagcugcugaugcagagcacccccgccacaggauccggcucugcuauuuguagcggggucgccgugugcaagguucuccaccuggagggagaggugaacaaaaucaaguccgcgcuucugagcaccaauaaagccgucgugucucucuccaacggcguuagcgugcugacauuuaagguccuugaucugaagaauuacauugacaaacaacuccugccuauccugaacaagcagucuuguuccauuccgaauaucgaaaccgugauugaguuccagcagaaaaacaaucggcuccuggaaaucacgcgcgaguuuagcgugaacgcuggcgucacaacccccguuucuacauauaugcuuaccaauuccgagcugcucagccugaucaacgauaugccuauuaccaacgaccaaaagaaacuuauguccaauaacgugcagaucgugagacagcagucuuacagcauuaugugcaucauuaaggaagagguccuggccuaugugguucaacucccccuguacggggugaucgauacaccuuguuggaaacugcauacgagcccccucugcaccacaaauaccaaggaaggauccaacaucugucugacacggaccgaccgcggcugguacugcgauaaugcugggucugucuccuucuuuccucaggccgagacguguaaggugcagagcaacagaguuuucugcgacacaaugaacucucuuacccugccgagcgaagugaaucucugcaaugucgauauuuuuaaccccaaauaugacuguaagaucaugaccuccaaaacagaugugucuagcuccgucauuaccagccugggagcgaucgugucuugcuacggcaagacaaaauguacggccuccaauaagaaccgggggauuaucaagaccuucagcaauggaugcgacuauguuucuaacaaaggcguggacacagucuccgugggcaauacccuuuacuguguuaacaagcaagaggggcagagccuguaugugaaaggagagccuaucauuaacuuuuacgauccccucgucuucccuuccgacgaauuugaugcuucuaucagccaggugaaugagaagauuaaccagucccuggccuucauccgcaaaucugacgaacugcuccacaaugugaacgcuggcaagagcacaaccaauauuaugaucacgaccauuaucaucguuauuaucgucauucugcuuucccugaucgccguggggcuccugcuguauugcaaggccagaugaggacuagucccuguucccagagcccacuuuuuuuucuuuuuuugaaauaaaauagccugucuuucagaucuaaaaaaaaaaaaaaaaaaaaaaaaaaaaaaaaaaaaaaaaaaaaaaaaaaaaaaaaaaaaaaaaugcaucccccccccccccccccccccccccccccccaaaggcucuuuucagagccaccagaauu

SEQ ID NO: 2878 - RNA, 1843 nt, Artificial Sequence
  mRNA product Design d-1 comprising derived and/or modified sequence from HRSV(A2)__F-del_DSCav1_mut2 (opt6)
gggagacccgugacccggaaguuguacggcuacgcgacuuucccucccacaaacccucgcgcccuuccuuuccuacuugggcccggcagaaagcuuaccauggaacuccuaauacuuaaagccaaugcaauaaccacaauacuaacagcaguaacauucugcuuugcaucaggacaaaacauaacagaagaauuuuaccaaucaacauguucagcaguaagcaaaggauaccuaggagccuuacgcacagguugguacacuuccguaauaacaauagaacucucaaauauaaaagaaaacaaaugcaacggaaccgaugcaaaaguaaaacuaauaaaacaagaauuagacaaauacaaaaacgcaguaacagaccuacaauuacuuaugcaaucaacacccgcaacaggauccggcucagcaaucuguucaggaguagcaguaugcaaaguucuccaccuagaaggcgaaguaaacaaaauaaaaucagcccuauuaucuaccaauaaagcaguaguaucacuaucaaauggaguaucuguccuaaccuucaaaguacuugaccuaaaaaauuacaucgacaaacaauuacuaccaauacuuaacaaacaaucauguucaauaccaaacauugaaacaguaauagaauuucaacaaaaaaauaacagauuauuagaaauaacccgcgaauuuucaguuaacgcaggaguaacaacaccaguauccacauacauguuaacaaauucagaacucuuaucacuuauaaacgacaugcccauaacaaacgaccaaaaaaaacucaugucuaacaauguucaaauaguucgacaacaaucauacuccauaaugugcauaauaaaagaagaaguucuagcauauguuguacaacucccacucuaugguguuauagacacaccaugcuggaaacuacauacaagccccuuaugcacuacaaacacaaaagaaggcucuaauauaugucuaacccgcacagacagaggcugguauugcgauaacgcagguucaguaucauucuuuccacaagcagaaacuugcaaaguccaauccaauagagucuucugcgacacuaugaacucacucacacucccaucugaagucaauuuauguaacgucgauaucuucaacccaaaauacgacugcaaaauaaugaccucaaaaacagacguaagcucaucagucauaacuucucuaggcgcaaucgucucauguuacggcaaaacaaaauguaccgcaucaaacaaaaaucgagguauaauaaaaaccuuuucuaacggcugcgacuacguaucaaacaaaggaguagauacuguaagugucggaaacacauuauacugcgucaacaaacaagaaggacaaucccuauauguuaaaggcgaaccuaucauuaauuucuacgacccacucgucuuuccauccgacgaauuugacgcaucaauuucccaaguaaaugaaaaaauaaaccaaucccuugcauucauaagaaaaucagaugaacuauuacacaacguaaacgcaggcaaaucaacaacaaauauaaugaucacaacaauaauaaucguaauaauaguaauccuacucucacuaauagcaguaggcuuacuauuauauugcaaagccagauaaggacuagucccuguucccagagcccacuuuuuuuucuuuuuuugaaauaaaauagccugucuuucagaucuaaaaaaaaaaaaaaaaaaaaaaaaaaaaaaaaaaaaaaaaaaaaaaaaaaaaaaaaaaaaaaaaugcaucccccccccccccccccccccccccccccccaaaggcucuuuucagagccaccagaauu

SEQ ID NO: 2879 - RNA, 1843 nt, Artificial Sequence
  mRNA product Design d-1 comprising derived and/or modified sequence from HRSV(A2)__F-del_DSCav1_mut2 (opt11)
gggagacccgugacccggaaguuguacggcuacgcgacuuucccucccacaaacccucgcgcccuuccuuuccuacuugggcccggcagaaagcuuaccauggaacuucuuauccuaaaagcgaacgccauaaccacaauccuaacagcagucaccuucuguuucgccucaggacaaaacaucaccgaggaauuuuaccaauccacauguagcgcugucucaaaaggcuaccucggcgcccuccgaaccggcugguacacauccguaauaacgaucgaacucuccaacauaaaagaaaauaaaugcaacggcaccgacgccaaagucaaacuuaucaaacaagaacuagacaaauacaaaaacgccgucaccgaccuccagcuccucaugcaauccaccccagcaacaggcuccggaagcgcaaucugcucaggcgucgccguaugcaaaguacuccaccucgaaggagaagucaacaaaaucaaauccgcccuccuauccacaaacaaagcaguugucucacucuccaacgggguaagcguacugaccuucaaaguccuagaccucaaaaacuacaucgauaaacaacuccuuccaauccucaacaaacaaucaugcucuauccccaacaucgaaaccguaaucgaauuucaacaaaaaaacaaccgccuacuugaaaucacacgcgaauuuagcgucaacgcaggaguaacaacacccguguccacauauaugcucacgaacagcgaacuacuaucccugauuaacgacaugcccaucaccaacgaccaaaaaaaacuaaugagcaacaacguacaaaucguccgccaacaaagcuacucuauaaugugcaucaucaaggaagaaguccuagccuacgucguccaauuaccacucuacggcgucaucgacacacccugcuggaaacuccauacauccccccucugcaccaccaacaccaaagaaggguccaacauaugccucacucgcacagaccgcggcugguacugcgacaacgcuggcagcgucagcuucuucccccaggccgaaaccugcaaaguccaauccaacagagucuucugcgacaccaugaacucgcucacccuccccuccgaggucaaccucugcaacgucgacauauucaaccccaaauacgacugcaaaaucaugaccuccaaaaccgacgucagcucaucagucaucacaucccucggggccaucgucuccugcuacggcaaaaccaagugcaccgccucaaacaaaaaccgcggcauuaucaaaacauucuccaacggcugcgacuacgucuccaacaaaggcgucgacacagucuccgucgguaacacccucuacugcguaaauaaacaagaaggccaaucccucuacgucaaaggcgaacccaucaucaacuucuacgacccucucgucuuccccuccgacgaauuugacgccucaaucagccaaguuaacgaaaaaaucaaccaaucacucgccuucauccgcaaauccgacgaacuccuccacaacguuaacgccggcaaaucuaccacgaacaucaugaucaccaccauaaucaucguaauuaucguaauacuccuaucccucauagcaguaggccuccuacucuacugcaaagcccguuaaggacuagucccuguucccagagcccacuuuuuuuucuuuuuuugaaauaaaauagccugucuuucagaucuaaaaaaaaaaaaaaaaaaaaaaaaaaaaaaaaaaaaaaaaaaaaaaaaaaaaaaaaaaaaaaaaugcaucccccccccccccccccccccccccccccccaaaggcucuuuucagagccaccagaauu

SEQ ID NO: 2880 - RNA, 1898 nt, Artificial Sequence
  mRNA product Design d-2 comprising derived and/or modified sequence from HRSV(A2)__F-del_DSCav1_mut2 (opt1)
gggagagcggcucggccauuuugucccagucaguccggaggcugcggcugcagaaguaccgccugcggaguaacugcaaagaagcuuaccauggagcugcucauccugaaggccaacgccaucaccaccauccugacggcggugaccuucugcuucgccagcggccagaacaucaccgaggaguucuaccaguccacgugcagcgccgucuccaagggguaccucggcgcccugcggaccggcugguacaccuccgugaucaccaucgagcugagcaacaucaaggagaacaagugcaacgggaccgacgccaaggugaagcucaucaagcaggagcuggacaaguacaagaacgcggucacggaccugcagcuccugaugcaguccaccccggcaaccggcuccggcuccgccaucugcagcggcgucgccgugugcaaggugcugcaccucgagggggaggucaacaagaucaagagcgcccugcuguccaccaacaaggccguggugagccucuccaacggcgucagcgugcugaccuucaaggugcuggaccucaagaacuacaucgacaagcagcugcugcccauccugaacaagcagagcugcuccauccccaacaucgagacggugaucgaguuccagcagaagaacaaccggcuccuggagaucacccgcgaguucagcgugaacgccggggucaccacccccguguccacguacaugcugaccaacagcgagcuccugucccugaucaacgacaugccgaucaccaacgaccagaagaagcucaugagcaacaacgugcagaucguccggcagcaguccuacagcaucaugugcaucaucaaggaggaggugcuggcguacgugguccagcugccccucuacggcgugaucgacacccccugcuggaagcugcacacgagcccccugugcaccaccaacaccaaggagggguccaacaucugccucacgcgcaccgaccggggcugguacugcgacaacgccggcagcgucuccuucuucccgcaggccgagaccugcaaggugcagagcaaccgcguguucugcgacaccaugaacucccugacgcugcccagcgagguaaaccucugcaacgucgacaucuucaaccccaaguacgacugcaagaucaugaccuccaagaccgacgugagcuccagcgugaucaccucccugggggccaucgucagcugcuacggcaagacgaagugcaccgccagcaacaagaaccgggggaucaucaagaccuucuccaacggcugcgacuacgugagcaacaagggcguggacaccguguccgucgggaacacccuguacugcgugaacaagcaggagggccagagccucuacgugaagggggagcccaucaucaacuucuacgacccgcuggucuuccccuccgacgaguucgacgcgagcaucucccaggugaacgagaagaucaaccagagccuggccuucauccgcaaguccgacgagcugcuccacaacgugaacgccggcaagagcacgaccaacaucaugaucaccaccaucaucaucgucaucaucgugauccugcugucccucaucgccguggggcugcugcucuacugcaaggcccggugaggacuaguaauaaggaaacuguaugaaugucugugggcaggaagugaagagauccuucuguaaagguuuuuggaauuaugucugcugaauaauaaacuuuuuugaaauaauaaaucugguagaaaaaugagaucuaaaaaaaaaaaaaaaaaaaaaaaaaaaaaaaaaaaaaaaaaaaaaaaaaaaaaaaaaaaaaaaaugcaucccccccccccccccccccccccccccccccaaaggcucuuuucagagccaccagaauu

SEQ ID NO: 2881 - RNA, 1898 nt, Artificial Sequence
  mRNA product Design d-2 comprising derived and/or modified sequence from HRSV(A2)__F-del_DSCav1_mut2 (opt1)
gggagagcggcucggccauuuugucccagucaguccggaggcugcggcugcagaaguaccgccugcggaguaacugcaaagaagcuuaccauggagcugcucauccugaaggccaacgccaucaccaccauccugacggcggugaccuucugcuucgccagcggccagaacaucaccgaggaguucuaccaguccacgugcagcgccgucuccaagggguaccucggcgcccugcgcaccgggugguacaccagcgugaucaccaucgagcuguccaacaucaaggagaacaagugcaacggcaccgacgccaaggugaagcucaucaagcaggagcuggacaaguacaagaacgcggucacggaccugcagcuccugaugcagagcacccccgccaccggguccggcagcgccaucugcuccggcguggccgugugcaagguccugcaccucgagggggaggugaacaagaucaagagcgcgcugcuguccaccaacaaggccguggucagccucuccaacggcgugagcgugcugacguucaagguccuggaccucaagaacuacaucgacaagcagcugcugccgauccucaacaagcaguccugcagcauccccaacaucgagaccgugaucgaguuccagcagaagaacaaccggcugcuggagaucacccgcgaguucuccgugaacgccggggucaccacgcccgugagcaccuacaugcucaccaacuccgagcugcugagccucaucaacgacaugcccaucaccaacgaccagaagaagcugaugagcaacaacgugcagaucguccggcagcaguccuacagcaucaugugcaucaucaaggaggaggugcuggccuacgugguccagcucccgcuguacggcgugaucgacacgcccugcuggaagcugcacaccagcccccucugcaccaccaacacgaaggagggguccaacaucugccugacccgcaccgaccggggcugguacugcgacaacgccggcuccgugagcuucuucccccaggcggagaccugcaagguccaguccaaccgcguguucugcgacacgaugaacagccugacccucccguccgaggucaaccugugcaacguggacaucuucaaccccaaguacgacugcaagaucaugaccagcaagaccgacguguccagcuccgucaucacgagccugggggccaucguguccugcuacggcaagaccaagugcaccgccagcaacaagaaccgggggaucaucaagaccuucuccaacggcugcgacuacgugagcaacaagggcgucgacacgguguccguggggaacacccucuacugcgucaacaagcaggagggccagagccuguacgugaagggggagcccaucaucaacuucuacgacccccugguguucccgagcgacgaguucgacgccuccaucagccaggucaacgagaagaucaaccagucccucgccuucauccgcaagagcgacgagcugcugcacaacgugaacgcgggcaaguccaccaccaacaucaugaucaccacgaucaucaucgugaucaucgucauccuccugagccugaucgccguggggcuccugcuguacugcaaggcccggugaggacuaguaauaaggaaacuguaugaaugucugugggcaggaagugaagagauccuucuguaaagguuuuuggaauuaugucugcugaauaauaaacuuuuuugaaauaauaaaucugguagaaaaaugagaucuaaaaaaaaaaaaaaaaaaaaaaaaaaaaaaaaaaaaaaaaaaaaaaaaaaaaaaaaaaaaaaaaugcaucccccccccccccccccccccccccccccccaaaggcucuuuucagagccaccagaauu

SEQ ID NO: 2882 - RNA, 1898 nt, Artificial Sequence
  mRNA product Design d-2 comprising derived and/or modified sequence from HRSV(A2)__F-del_DSCav1_mut2 (opt2)
gggagagcggcucggccauuuugucccagucaguccggaggcugcggcugcagaaguaccgccugcggaguaacugcaaagaagcuuaccauggagcuccucauccucaaggccaacgccaucaccaccauccucaccgccgucaccuucugcuucgccuccggccagaacaucaccgaggaguucuaccaguccaccugcuccgccgucuccaagggcuaccucggcgcccuccgcaccggcugguacaccuccgucaucaccaucgagcucuccaacaucaaggagaacaagugcaacggcaccgacgccaaggucaagcucaucaagcaggagcucgacaaguacaagaacgccgucaccgaccuccagcuccucaugcaguccacccccgccaccggcuccggcuccgccaucugcuccggcgucgccgucugcaagguccuccaccucgagggcgaggucaacaagaucaaguccgcccuccucuccaccaacaaggccgucgucucccucuccaacggcgucuccguccucaccuucaagguccucgaccucaagaacuacaucgacaagcagcuccuccccauccucaacaagcaguccugcuccauccccaacaucgagaccgucaucgaguuccagcagaagaacaaccgccuccucgagaucacccgcgaguucuccgucaacgccggcgucaccacccccgucuccaccuacaugcucaccaacuccgagcuccucucccucaucaacgacaugcccaucaccaacgaccagaagaagcucauguccaacaacguccagaucguccgccagcaguccuacuccaucaugugcaucaucaaggaggagguccucgccuacgucguccagcucccccucuacggcgucaucgacacccccugcuggaagcuccacaccuccccccucugcaccaccaacaccaaggagggcuccaacaucugccucacccgcaccgaccgcggcugguacugcgacaacgccggcuccgucuccuucuucccccaggccgagaccugcaagguccaguccaaccgcgucuucugcgacaccaugaacucccucacccuccccuccgaggucaaccucugcaacgucgacaucuucaaccccaaguacgacugcaagaucaugaccuccaagaccgacgucuccuccuccgucaucaccucccucggcgccaucgucuccugcuacggcaagaccaagugcaccgccuccaacaagaaccgcggcaucaucaagaccuucuccaacggcugcgacuacgucuccaacaagggcgucgacaccgucuccgucggcaacacccucuacugcgucaacaagcaggagggccagucccucuacgucaagggcgagcccaucaucaacuucuacgacccccucgucuuccccuccgacgaguucgacgccuccaucucccaggucaacgagaagaucaaccagucccucgccuucauccgcaaguccgacgagcuccuccacaacgucaacgccggcaaguccaccaccaacaucaugaucaccaccaucaucaucgucaucaucgucauccuccucucccucaucgccgucggccuccuccucuacugcaaggcccgcugaggacuaguaauaaggaaacuguaugaaugucugugggcaggaagugaagagauccuucuguaaagguuuuuggaauuaugucugcugaauaauaaacuuuuuugaaauaauaaaucugguagaaaaaugagaucuaaaaaaaaaaaaaaaaaaaaaaaaaaaaaaaaaaaaaaaaaaaaaaaaaaaaaaaaaaaaaaaaugcaucccccccccccccccccccccccccccccccaaaggcucuuuucagagccaccagaauu

SEQ ID NO: 2883 - RNA, 1898 nt, Artificial Sequence
  mRNA product Design d-2 comprising derived and/or modified sequence from HRSV(A2)__F-del_DSCav1_mut2 (opt3)
gggagagcggcucggccauuuugucccagucaguccggaggcugcggcugcagaaguaccgccugcggaguaacugcaaagaagcuuaccauggagcugcucauccuuaaggccaacgcuauuaccacaauacugacugcagugacguucugcuuugccagcggccagaauaucaccgaagaguucuaccaauccacauguucugcggucucaaaaggguauuugggagcuuuaagaacugguugguacaccaguguuauuacaaucgaacugagcaacauuaaggagaauaaaugcaacggcaccgacgccaaggugaaacuaaucaagcaggaacucgauaaguauaaaaaugcaguaacugaccugcagcuucugaugcaguccacacccgccaccgggucuggaucggcuauauguucaggcguggcagucugcaagguguugcaccucgagggugagguuaacaaaaucaagagcgcccugcugaguacgaauaaagcuguggucucccucucuaacggggugagcguauuaacuuuuaagguucuggaucuuaagaauuacauugacaaacaauugcugccuauccuaaacaagcaguccuguucaauuccaaauaucgaaaccgugauagaguuccagcagaaaaacaauaggcuccuggaaauuacacgggaguuuagugucaacgccggagugacuaccccggugagcacauauaugcuuaccaauucugagcuguugucccucaucaacgauaugcccauuacgaacgaccaaaagaaacugaugucaaauaacguccagaucguucgccagcagagcuacaguaucaugugcauuauaaaggaagagguguuagcguauguagugcaacugccucucuacggcgucaucgauacuccauguuggaaacuucauacaucuccccugugcaccacuaauacaaaggaaggcuccaacauuuguuugacccgaacggaccgugggugguacugcgauaaugcaggaagcgugucguucuuuccucaggccgagaccuguaagguucagucuaacagaguguucugcgacacaaugaacucccuaacucugccaucagaagucaaucucugcaauguggauaucuuuaaccccaaauaugacuguaagauaaugaccaguaaaacagauguaagcuccucuguuauuacuagccugggugcuaucgugucaugcuacggcaagaccaaauguacagccaguaauaagaacagggggaucauuaagaccuucuccaauggaugcgacuaugucagcaacaaaggcguggacacugucucuguggguaauacgcuuuacuguguuaacaagcaagaggggcagucacuguaugugaaaggagagccuaucauuaacuuuuacgauccauugguauucccgagugacgaauuugaugcaagcauaucccaggucaaugagaagaucaaccagucucucgcuuucauucggaaaucggacgaacuguuacacaaugugaacgccggcaagagcacaaccaauaucaugaucacuaccauuauaaucguuauuaucgugauucugcuaucccucaucgcggucggccugcuuuuguauugcaaggcccgcugaggacuaguaauaaggaaacuguaugaaugucugugggcaggaagugaagagauccuucuguaaagguuuuuggaauuaugucugcugaauaauaaacuuuuuugaaauaauaaaucugguagaaaaaugagaucuaaaaaaaaaaaaaaaaaaaaaaaaaaaaaaaaaaaaaaaaaaaaaaaaaaaaaaaaaaaaaaaaugcaucccccccccccccccccccccccccccccccaaaggcucuuuucagagccaccagaauu

SEQ ID NO: 2884 - RNA, 1898 nt, Artificial Sequence
  mRNA product Design d-2 comprising derived and/or modified sequence from HRSV(A2)__F-del_DSCav1_mut2 (opt4)
gggagagcggcucggccauuuugucccagucaguccggaggcugcggcugcagaaguaccgccugcggaguaacugcaaagaagcuuaccauggagcugcugauccugaaggccaacgccaucaccaccauccugaccgccgugaccuucugcuucgccagcggccagaacaucaccgaggaguucuaccagagcaccugcagcgccgugagcaagggcuaccugggcgcccugagaaccggcugguacaccagcgugaucaccaucgagcugagcaacaucaaggagaacaagugcaacggcaccgacgccaaggugaagcugaucaagcaggagcuggacaaguacaagaacgccgugaccgaccugcagcugcugaugcagagcacccccgccaccggcagcggcagcgccaucugcagcggcguggccgugugcaaggugcugcaccuggagggcgaggugaacaagaucaagagcgcccugcugagcaccaacaaggccguggugagccugagcaacggcgugagcgugcugaccuucaaggugcuggaccugaagaacuacaucgacaagcagcugcugcccauccugaacaagcagagcugcagcauccccaacaucgagaccgugaucgaguuccagcagaagaacaacagacugcuggagaucaccagagaguucagcgugaacgccggcgugaccacccccgugagcaccuacaugcugaccaacagcgagcugcugagccugaucaacgacaugcccaucaccaacgaccagaagaagcugaugagcaacaacgugcagaucgugagacagcagagcuacagcaucaugugcaucaucaaggaggaggugcuggccuacguggugcagcugccccuguacggcgugaucgacacccccugcuggaagcugcacaccagcccccugugcaccaccaacaccaaggagggcagcaacaucugccugaccagaaccgacagaggcugguacugcgacaacgccggcagcgugagcuucuucccccaggccgagaccugcaaggugcagagcaacagaguguucugcgacaccaugaacagccugacccugcccagcgaggugaaccugugcaacguggacaucuucaaccccaaguacgacugcaagaucaugaccagcaagaccgacgugagcagcagcgugaucaccagccugggcgccaucgugagcugcuacggcaagaccaagugcaccgccagcaacaagaacagaggcaucaucaagaccuucagcaacggcugcgacuacgugagcaacaagggcguggacaccgugagcgugggcaacacccuguacugcgugaacaagcaggagggccagagccuguacgugaagggcgagcccaucaucaacuucuacgacccccugguguuccccagcgacgaguucgacgccagcaucagccaggugaacgagaagaucaaccagagccuggccuucaucagaaagagcgacgagcugcugcacaacgugaacgccggcaagagcaccaccaacaucaugaucaccaccaucaucaucgugaucaucgugauccugcugagccugaucgccgugggccugcugcuguacugcaaggccagaugaggacuaguaauaaggaaacuguaugaaugucugugggcaggaagugaagagauccuucuguaaagguuuuuggaauuaugucugcugaauaauaaacuuuuuugaaauaauaaaucugguagaaaaaugagaucuaaaaaaaaaaaaaaaaaaaaaaaaaaaaaaaaaaaaaaaaaaaaaaaaaaaaaaaaaaaaaaaaugcaucccccccccccccccccccccccccccccccaaaggcucuuuucagagccaccagaauu

SEQ ID NO: 2885 - RNA, 1898 nt, Artificial Sequence
  mRNA product Design d-2 comprising derived and/or modified sequence from HRSV(A2)__F-del_DSCav1_mut2 (opt5)
gggagagcggcucggccauuuugucccagucaguccggaggcugcggcugcagaaguaccgccugcggaguaacugcaaagaagcuuaccauggagcugcucauccugaaggccaacgcuauuaccacaauccuuacggccgugaccuucugcuuugcgagcggccagaauauuacagaagaguucuaccaauccaccuguucugcugucagcaaaggguaucugggagcccucagaacaggcugguacaccuccguuaucacaauugaacugucuaacaucaaggagaauaaaugcaacgggaccgacgccaaggugaaacuuaucaagcaggaacuggauaaguauaaaaaugcugugacggaccuccagcugcugaugcagagcacccccgccacaggauccggcucugcuauuuguagcggggucgccgugugcaagguucuccaccuggagggagaggugaacaaaaucaaguccgcgcuucugagcaccaauaaagccgucgugucucucuccaacggcguuagcgugcugacauuuaagguccuugaucugaagaauuacauugacaaacaacuccugccuauccugaacaagcagucuuguuccauuccgaauaucgaaaccgugauugaguuccagcagaaaaacaaucggcuccuggaaaucacgcgcgaguuuagcgugaacgcuggcgucacaacccccguuucuacauauaugcuuaccaauuccgagcugcucagccugaucaacgauaugccuauuaccaacgaccaaaagaaacuuauguccaauaacgugcagaucgugagacagcagucuuacagcauuaugugcaucauuaaggaagagguccuggccuaugugguucaacucccccuguacggggugaucgauacaccuuguuggaaacugcauacgagcccccucugcaccacaaauaccaaggaaggauccaacaucugucugacacggaccgaccgcggcugguacugcgauaaugcugggucugucuccuucuuuccucaggccgagacguguaaggugcagagcaacagaguuuucugcgacacaaugaacucucuuacccugccgagcgaagugaaucucugcaaugucgauauuuuuaaccccaaauaugacuguaagaucaugaccuccaaaacagaugugucuagcuccgucauuaccagccugggagcgaucgugucuugcuacggcaagacaaaauguacggccuccaauaagaaccgggggauuaucaagaccuucagcaauggaugcgacuauguuucuaacaaaggcguggacacagucuccgugggcaauacccuuuacuguguuaacaagcaagaggggcagagccuguaugugaaaggagagccuaucauuaacuuuuacgauccccucgucuucccuuccgacgaauuugaugcuucuaucagccaggugaaugagaagauuaaccagucccuggccuucauccgcaaaucugacgaacugcuccacaaugugaacgcuggcaagagcacaaccaauauuaugaucacgaccauuaucaucguuauuaucgucauucugcuuucccugaucgccguggggcuccugcuguauugcaaggccagaugaggacuaguaauaaggaaacuguaugaaugucugugggcaggaagugaagagauccuucuguaaagguuuuuggaauuaugucugcugaauaauaaacuuuuuugaaauaauaaaucugguagaaaaaugagaucuaaaaaaaaaaaaaaaaaaaaaaaaaaaaaaaaaaaaaaaaaaaaaaaaaaaaaaaaaaaaaaaaugcaucccccccccccccccccccccccccccccccaaaggcucuuuucagagccaccagaauu

SEQ ID NO: 2886 - RNA, 1898 nt, Artificial Sequence
  mRNA product Design d-2 comprising derived and/or modified sequence from HRSV(A2)__F-del_DSCav1_mut2 (opt6)
gggagagcggcucggccauuuugucccagucaguccggaggcugcggcugcagaaguaccgccugcggaguaacugcaaagaagcuuaccauggaacuccuaauacuuaaagccaaugcaauaaccacaauacuaacagcaguaacauucugcuuugcaucaggacaaaacauaacagaagaauuuuaccaaucaacauguucagcaguaagcaaaggauaccuaggagccuuacgcacagguugguacacuuccguaauaacaauagaacucucaaauauaaaagaaaacaaaugcaacggaaccgaugcaaaaguaaaacuaauaaaacaagaauuagacaaauacaaaaacgcaguaacagaccuacaauuacuuaugcaaucaacacccgcaacaggauccggcucagcaaucuguucaggaguagcaguaugcaaaguucuccaccuagaaggcgaaguaaacaaaauaaaaucagcccuauuaucuaccaauaaagcaguaguaucacuaucaaauggaguaucuguccuaaccuucaaaguacuugaccuaaaaaauuacaucgacaaacaauuacuaccaauacuuaacaaacaaucauguucaauaccaaacauugaaacaguaauagaauuucaacaaaaaaauaacagauuauuagaaauaacccgcgaauuuucaguuaacgcaggaguaacaacaccaguauccacauacauguuaacaaauucagaacucuuaucacuuauaaacgacaugcccauaacaaacgaccaaaaaaaacucaugucuaacaauguucaaauaguucgacaacaaucauacuccauaaugugcauaauaaaagaagaaguucuagcauauguuguacaacucccacucuaugguguuauagacacaccaugcuggaaacuacauacaagccccuuaugcacuacaaacacaaaagaaggcucuaauauaugucuaacccgcacagacagaggcugguauugcgauaacgcagguucaguaucauucuuuccacaagcagaaacuugcaaaguccaauccaauagagucuucugcgacacuaugaacucacucacacucccaucugaagucaauuuauguaacgucgauaucuucaacccaaaauacgacugcaaaauaaugaccucaaaaacagacguaagcucaucagucauaacuucucuaggcgcaaucgucucauguuacggcaaaacaaaauguaccgcaucaaacaaaaaucgagguauaauaaaaaccuuuucuaacggcugcgacuacguaucaaacaaaggaguagauacuguaagugucggaaacacauuauacugcgucaacaaacaagaaggacaaucccuauauguuaaaggcgaaccuaucauuaauuucuacgacccacucgucuuuccauccgacgaauuugacgcaucaauuucccaaguaaaugaaaaaauaaaccaaucccuugcauucauaagaaaaucagaugaacuauuacacaacguaaacgcaggcaaaucaacaacaaauauaaugaucacaacaauaauaaucguaauaauaguaauccuacucucacuaauagcaguaggcuuacuauuauauugcaaagccagauaaggacuaguaauaaggaaacuguaugaaugucugugggcaggaagugaagagauccuucuguaaagguuuuuggaauuaugucugcugaauaauaaacuuuuuugaaauaauaaaucugguagaaaaaugagaucuaaaaaaaaaaaaaaaaaaaaaaaaaaaaaaaaaaaaaaaaaaaaaaaaaaaaaaaaaaaaaaaaugcaucccccccccccccccccccccccccccccccaaaggcucuuuucagagccaccagaauu

SEQ ID NO: 2887 - RNA, 1898 nt, Artificial Sequence
  mRNA product Design d-2 comprising derived and/or modified sequence from HRSV(A2)__F-del_DSCav1_mut2 (opt11)
gggagagcggcucggccauuuugucccagucaguccggaggcugcggcugcagaaguaccgccugcggaguaacugcaaagaagcuuaccauggaacuucuuauccuaaaagcgaacgccauaaccacaauccuaacagcagucaccuucuguuucgccucaggacaaaacaucaccgaggaauuuuaccaauccacauguagcgcugucucaaaaggcuaccucggcgcccuccgaaccggcugguacacauccguaauaacgaucgaacucuccaacauaaaagaaaauaaaugcaacggcaccgacgccaaagucaaacuuaucaaacaagaacuagacaaauacaaaaacgccgucaccgaccuccagcuccucaugcaauccaccccagcaacaggcuccggaagcgcaaucugcucaggcgucgccguaugcaaaguacuccaccucgaaggagaagucaacaaaaucaaauccgcccuccuauccacaaacaaagcaguugucucacucuccaacgggguaagcguacugaccuucaaaguccuagaccucaaaaacuacaucgauaaacaacuccuuccaauccucaacaaacaaucaugcucuauccccaacaucgaaaccguaaucgaauuucaacaaaaaaacaaccgccuacuugaaaucacacgcgaauuuagcgucaacgcaggaguaacaacacccguguccacauauaugcucacgaacagcgaacuacuaucccugauuaacgacaugcccaucaccaacgaccaaaaaaaacuaaugagcaacaacguacaaaucguccgccaacaaagcuacucuauaaugugcaucaucaaggaagaaguccuagccuacgucguccaauuaccacucuacggcgucaucgacacacccugcuggaaacuccauacauccccccucugcaccaccaacaccaaagaaggguccaacauaugccucacucgcacagaccgcggcugguacugcgacaacgcuggcagcgucagcuucuucccccaggccgaaaccugcaaaguccaauccaacagagucuucugcgacaccaugaacucgcucacccuccccuccgaggucaaccucugcaacgucgacauauucaaccccaaauacgacugcaaaaucaugaccuccaaaaccgacgucagcucaucagucaucacaucccucggggccaucgucuccugcuacggcaaaaccaagugcaccgccucaaacaaaaaccgcggcauuaucaaaacauucuccaacggcugcgacuacgucuccaacaaaggcgucgacacagucuccgucgguaacacccucuacugcguaaauaaacaagaaggccaaucccucuacgucaaaggcgaacccaucaucaacuucuacgacccucucgucuuccccuccgacgaauuugacgccucaaucagccaaguuaacgaaaaaaucaaccaaucacucgccuucauccgcaaauccgacgaacuccuccacaacguuaacgccggcaaaucuaccacgaacaucaugaucaccaccauaaucaucguaauuaucguaauacuccuaucccucauagcaguaggccuccuacucuacugcaaagcccguuaaggacuaguaauaaggaaacuguaugaaugucugugggcaggaagugaagagauccuucuguaaagguuuuuggaauuaugucugcugaauaauaaacuuuuuugaaauaauaaaucugguagaaaaaugagaucuaaaaaaaaaaaaaaaaaaaaaaaaaaaaaaaaaaaaaaaaaaaaaaaaaaaaaaaaaaaaaaaaugcaucccccccccccccccccccccccccccccccaaaggcucuuuucagagccaccagaauu

SEQ ID NO: 2888 - RNA, 2214 nt, Artificial Sequence
  mRNA product Design d-3 comprising derived and/or modified sequence from HRSV(A2)__F-del_DSCav1_mut2 (opt1)
gggagagggcgcuuggcuugcaaggacccugagcugcggcauugaagcacacccaacccaacucgacugaagucagccucacugaaccggaucugagaaucuucucucucugggcuugccagggcucuccgaaccuagcuagcauccucuucaauuccaacuagaaagcuuaccauggagcugcucauccugaaggccaacgccaucaccaccauccugacggcggugaccuucugcuucgccagcggccagaacaucaccgaggaguucuaccaguccacgugcagcgccgucuccaagggguaccucggcgcccugcggaccggcugguacaccuccgugaucaccaucgagcugagcaacaucaaggagaacaagugcaacgggaccgacgccaaggugaagcucaucaagcaggagcuggacaaguacaagaacgcggucacggaccugcagcuccugaugcaguccaccccggcaaccggcuccggcuccgccaucugcagcggcgucgccgugugcaaggugcugcaccucgagggggaggucaacaagaucaagagcgcccugcuguccaccaacaaggccguggugagccucuccaacggcgucagcgugcugaccuucaaggugcuggaccucaagaacuacaucgacaagcagcugcugcccauccugaacaagcagagcugcuccauccccaacaucgagacggugaucgaguuccagcagaagaacaaccggcuccuggagaucacccgcgaguucagcgugaacgccggggucaccacccccguguccacguacaugcugaccaacagcgagcuccugucccugaucaacgacaugccgaucaccaacgaccagaagaagcucaugagcaacaacgugcagaucguccggcagcaguccuacagcaucaugugcaucaucaaggaggaggugcuggcguacgugguccagcugccccucuacggcgugaucgacacccccugcuggaagcugcacacgagcccccugugcaccaccaacaccaaggagggguccaacaucugccucacgcgcaccgaccggggcugguacugcgacaacgccggcagcgucuccuucuucccgcaggccgagaccugcaaggugcagagcaaccgcguguucugcgacaccaugaacucccugacgcugcccagcgagguaaaccucugcaacgucgacaucuucaaccccaaguacgacugcaagaucaugaccuccaagaccgacgugagcuccagcgugaucaccucccugggggccaucgucagcugcuacggcaagacgaagugcaccgccagcaacaagaaccgggggaucaucaagaccuucuccaacggcugcgacuacgugagcaacaagggcguggacaccguguccgucgggaacacccuguacugcgugaacaagcaggagggccagagccucuacgugaagggggagcccaucaucaacuucuacgacccgcuggucuuccccuccgacgaguucgacgcgagcaucucccaggugaacgagaagaucaaccagagccuggccuucauccgcaaguccgacgagcugcuccacaacgugaacgccggcaagagcacgaccaacaucaugaucaccaccaucaucaucgucaucaucgugauccugcugucccucaucgccguggggcugcugcucuacugcaaggcccggugaggacuagugaagggaacacccaaauuuaauucagccuuaagcacaauuaauuaagagugaaacguaauuguacaagcaguuggucacccaccauagggcaugaucaacaccgcaaccuuuccuuuuucccccagugauucugaaaaaccccucuucccuucagcuugcuuagauguuccaaauuuaguaagcuuaaggcggccuacagaagaaaaagaaaaaaaaggccacaaaaguucccucucacuuucaguaaauaaaauaaaagcagcaacagaaauaaagaaauaaaugaaauucaaaaugaaauaaauauuguguugugcagcauuaaaaaaucaauaaaaauuaaaaaugagcaagaucuaaaaaaaaaaaaaaaaaaaaaaaaaaaaaaaaaaaaaaaaaaaaaaaaaaaaaaaaaaaaaaaaugcaucccccccccccccccccccccccccccccccaaaggcucuuuucagagccaccagaauu

SEQ ID NO: 2889 - RNA, 2214 nt, Artificial Sequence
  mRNA product Design d-3 comprising derived and/or modified sequence from HRSV(A2)__F-del_DSCav1_mut2 (opt1)
gggagagggcgcuuggcuugcaaggacccugagcugcggcauugaagcacacccaacccaacucgacugaagucagccucacugaaccggaucugagaaucuucucucucugggcuugccagggcucuccgaaccuagcuagcauccucuucaauuccaacuagaaagcuuaccauggagcugcucauccugaaggccaacgccaucaccaccauccugacggcggugaccuucugcuucgccagcggccagaacaucaccgaggaguucuaccaguccacgugcagcgccgucuccaagggguaccucggcgcccugcgcaccgggugguacaccagcgugaucaccaucgagcuguccaacaucaaggagaacaagugcaacggcaccgacgccaaggugaagcucaucaagcaggagcuggacaaguacaagaacgcggucacggaccugcagcuccugaugcagagcacccccgccaccggguccggcagcgccaucugcuccggcguggccgugugcaagguccugcaccucgagggggaggugaacaagaucaagagcgcgcugcuguccaccaacaaggccguggucagccucuccaacggcgugagcgugcugacguucaagguccuggaccucaagaacuacaucgacaagcagcugcugccgauccucaacaagcaguccugcagcauccccaacaucgagaccgugaucgaguuccagcagaagaacaaccggcugcuggagaucacccgcgaguucuccgugaacgccggggucaccacgcccgugagcaccuacaugcucaccaacuccgagcugcugagccucaucaacgacaugcccaucaccaacgaccagaagaagcugaugagcaacaacgugcagaucguccggcagcaguccuacagcaucaugugcaucaucaaggaggaggugcuggccuacgugguccagcucccgcuguacggcgugaucgacacgcccugcuggaagcugcacaccagcccccucugcaccaccaacacgaaggagggguccaacaucugccugacccgcaccgaccggggcugguacugcgacaacgccggcuccgugagcuucuucccccaggcggagaccugcaagguccaguccaaccgcguguucugcgacacgaugaacagccugacccucccguccgaggucaaccugugcaacguggacaucuucaaccccaaguacgacugcaagaucaugaccagcaagaccgacguguccagcuccgucaucacgagccugggggccaucguguccugcuacggcaagaccaagugcaccgccagcaacaagaaccgggggaucaucaagaccuucuccaacggcugcgacuacgugagcaacaagggcgucgacacgguguccguggggaacacccucuacugcgucaacaagcaggagggccagagccuguacgugaagggggagcccaucaucaacuucuacgacccccugguguucccgagcgacgaguucgacgccuccaucagccaggucaacgagaagaucaaccagucccucgccuucauccgcaagagcgacgagcugcugcacaacgugaacgcgggcaaguccaccaccaacaucaugaucaccacgaucaucaucgugaucaucgucauccuccugagccugaucgccguggggcuccugcuguacugcaaggcccggugaggacuagugaagggaacacccaaauuuaauucagccuuaagcacaauuaauuaagagugaaacguaauuguacaagcaguuggucacccaccauagggcaugaucaacaccgcaaccuuuccuuuuucccccagugauucugaaaaaccccucuucccuucagcuugcuuagauguuccaaauuuaguaagcuuaaggcggccuacagaagaaaaagaaaaaaaaggccacaaaaguucccucucacuuucaguaaauaaaauaaaagcagcaacagaaauaaagaaauaaaugaaauucaaaaugaaauaaauauuguguugugcagcauuaaaaaaucaauaaaaauuaaaaaugagcaagaucuaaaaaaaaaaaaaaaaaaaaaaaaaaaaaaaaaaaaaaaaaaaaaaaaaaaaaaaaaaaaaaaaugcaucccccccccccccccccccccccccccccccaaaggcucuuuucagagccaccagaauu

SEQ ID NO: 2890 - RNA, 2214 nt, Artificial Sequence
  mRNA product Design d-3 comprising derived and/or modified sequence from HRSV(A2)__F-del_DSCav1_mut2 (opt2)
gggagagggcgcuuggcuugcaaggacccugagcugcggcauugaagcacacccaacccaacucgacugaagucagccucacugaaccggaucugagaaucuucucucucugggcuugccagggcucuccgaaccuagcuagcauccucuucaauuccaacuagaaagcuuaccauggagcuccucauccucaaggccaacgccaucaccaccauccucaccgccgucaccuucugcuucgccuccggccagaacaucaccgaggaguucuaccaguccaccugcuccgccgucuccaagggcuaccucggcgcccuccgcaccggcugguacaccuccgucaucaccaucgagcucuccaacaucaaggagaacaagugcaacggcaccgacgccaaggucaagcucaucaagcaggagcucgacaaguacaagaacgccgucaccgaccuccagcuccucaugcaguccacccccgccaccggcuccggcuccgccaucugcuccggcgucgccgucugcaagguccuccaccucgagggcgaggucaacaagaucaaguccgcccuccucuccaccaacaaggccgucgucucccucuccaacggcgucuccguccucaccuucaagguccucgaccucaagaacuacaucgacaagcagcuccuccccauccucaacaagcaguccugcuccauccccaacaucgagaccgucaucgaguuccagcagaagaacaaccgccuccucgagaucacccgcgaguucuccgucaacgccggcgucaccacccccgucuccaccuacaugcucaccaacuccgagcuccucucccucaucaacgacaugcccaucaccaacgaccagaagaagcucauguccaacaacguccagaucguccgccagcaguccuacuccaucaugugcaucaucaaggaggagguccucgccuacgucguccagcucccccucuacggcgucaucgacacccccugcuggaagcuccacaccuccccccucugcaccaccaacaccaaggagggcuccaacaucugccucacccgcaccgaccgcggcugguacugcgacaacgccggcuccgucuccuucuucccccaggccgagaccugcaagguccaguccaaccgcgucuucugcgacaccaugaacucccucacccuccccuccgaggucaaccucugcaacgucgacaucuucaaccccaaguacgacugcaagaucaugaccuccaagaccgacgucuccuccuccgucaucaccucccucggcgccaucgucuccugcuacggcaagaccaagugcaccgccuccaacaagaaccgcggcaucaucaagaccuucuccaacggcugcgacuacgucuccaacaagggcgucgacaccgucuccgucggcaacacccucuacugcgucaacaagcaggagggccagucccucuacgucaagggcgagcccaucaucaacuucuacgacccccucgucuuccccuccgacgaguucgacgccuccaucucccaggucaacgagaagaucaaccagucccucgccuucauccgcaaguccgacgagcuccuccacaacgucaacgccggcaaguccaccaccaacaucaugaucaccaccaucaucaucgucaucaucgucauccuccucucccucaucgccgucggccuccuccucuacugcaaggcccgcugaggacuagugaagggaacacccaaauuuaauucagccuuaagcacaauuaauuaagagugaaacguaauuguacaagcaguuggucacccaccauagggcaugaucaacaccgcaaccuuuccuuuuucccccagugauucugaaaaaccccucuucccuucagcuugcuuagauguuccaaauuuaguaagcuuaaggcggccuacagaagaaaaagaaaaaaaaggccacaaaaguucccucucacuuucaguaaauaaaauaaaagcagcaacagaaauaaagaaauaaaugaaauucaaaaugaaauaaauauuguguugugcagcauuaaaaaaucaauaaaaauuaaaaaugagcaagaucuaaaaaaaaaaaaaaaaaaaaaaaaaaaaaaaaaaaaaaaaaaaaaaaaaaaaaaaaaaaaaaaaugcaucccccccccccccccccccccccccccccccaaaggcucuuuucagagccaccagaauu

SEQ ID NO: 2891 - RNA, 2214 nt, Artificial Sequence
  mRNA product Design d-3 comprising derived and/or modified sequence from HRSV(A2)__F-del_DSCav1_mut2 (opt3)
gggagagggcgcuuggcuugcaaggacccugagcugcggcauugaagcacacccaacccaacucgacugaagucagccucacugaaccggaucugagaaucuucucucucugggcuugccagggcucuccgaaccuagcuagcauccucuucaauuccaacuagaaagcuuaccauggagcugcucauccuuaaggccaacgcuauuaccacaauacugacugcagugacguucugcuuugccagcggccagaauaucaccgaagaguucuaccaauccacauguucugcggucucaaaaggguauuugggagcuuuaagaacugguugguacaccaguguuauuacaaucgaacugagcaacauuaaggagaauaaaugcaacggcaccgacgccaaggugaaacuaaucaagcaggaacucgauaaguauaaaaaugcaguaacugaccugcagcuucugaugcaguccacacccgccaccgggucuggaucggcuauauguucaggcguggcagucugcaagguguugcaccucgagggugagguuaacaaaaucaagagcgcccugcugaguacgaauaaagcuguggucucccucucuaacggggugagcguauuaacuuuuaagguucuggaucuuaagaauuacauugacaaacaauugcugccuauccuaaacaagcaguccuguucaauuccaaauaucgaaaccgugauagaguuccagcagaaaaacaauaggcuccuggaaauuacacgggaguuuagugucaacgccggagugacuaccccggugagcacauauaugcuuaccaauucugagcuguugucccucaucaacgauaugcccauuacgaacgaccaaaagaaacugaugucaaauaacguccagaucguucgccagcagagcuacaguaucaugugcauuauaaaggaagagguguuagcguauguagugcaacugccucucuacggcgucaucgauacuccauguuggaaacuucauacaucuccccugugcaccacuaauacaaaggaaggcuccaacauuuguuugacccgaacggaccgugggugguacugcgauaaugcaggaagcgugucguucuuuccucaggccgagaccuguaagguucagucuaacagaguguucugcgacacaaugaacucccuaacucugccaucagaagucaaucucugcaauguggauaucuuuaaccccaaauaugacuguaagauaaugaccaguaaaacagauguaagcuccucuguuauuacuagccugggugcuaucgugucaugcuacggcaagaccaaauguacagccaguaauaagaacagggggaucauuaagaccuucuccaauggaugcgacuaugucagcaacaaaggcguggacacugucucuguggguaauacgcuuuacuguguuaacaagcaagaggggcagucacuguaugugaaaggagagccuaucauuaacuuuuacgauccauugguauucccgagugacgaauuugaugcaagcauaucccaggucaaugagaagaucaaccagucucucgcuuucauucggaaaucggacgaacuguuacacaaugugaacgccggcaagagcacaaccaauaucaugaucacuaccauuauaaucguuauuaucgugauucugcuaucccucaucgcggucggccugcuuuuguauugcaaggcccgcugaggacuagugaagggaacacccaaauuuaauucagccuuaagcacaauuaauuaagagugaaacguaauuguacaagcaguuggucacccaccauagggcaugaucaacaccgcaaccuuuccuuuuucccccagugauucugaaaaaccccucuucccuucagcuugcuuagauguuccaaauuuaguaagcuuaaggcggccuacagaagaaaaagaaaaaaaaggccacaaaaguucccucucacuuucaguaaauaaaauaaaagcagcaacagaaauaaagaaauaaaugaaauucaaaaugaaauaaauauuguguugugcagcauuaaaaaaucaauaaaaauuaaaaaugagcaagaucuaaaaaaaaaaaaaaaaaaaaaaaaaaaaaaaaaaaaaaaaaaaaaaaaaaaaaaaaaaaaaaaaugcaucccccccccccccccccccccccccccccccaaaggcucuuuucagagccaccagaauu

SEQ ID NO: 2892 - RNA, 2214 nt, Artificial Sequence
  mRNA product Design d-3 comprising derived and/or modified sequence from HRSV(A2)__F-del_DSCav1_mut2 (opt4)
gggagagggcgcuuggcuugcaaggacccugagcugcggcauugaagcacacccaacccaacucgacugaagucagccucacugaaccggaucugagaaucuucucucucugggcuugccagggcucuccgaaccuagcuagcauccucuucaauuccaacuagaaagcuuaccauggagcugcugauccugaaggccaacgccaucaccaccauccugaccgccgugaccuucugcuucgccagcggccagaacaucaccgaggaguucuaccagagcaccugcagcgccgugagcaagggcuaccugggcgcccugagaaccggcugguacaccagcgugaucaccaucgagcugagcaacaucaaggagaacaagugcaacggcaccgacgccaaggugaagcugaucaagcaggagcuggacaaguacaagaacgccgugaccgaccugcagcugcugaugcagagcacccccgccaccggcagcggcagcgccaucugcagcggcguggccgugugcaaggugcugcaccuggagggcgaggugaacaagaucaagagcgcccugcugagcaccaacaaggccguggugagccugagcaacggcgugagcgugcugaccuucaaggugcuggaccugaagaacuacaucgacaagcagcugcugcccauccugaacaagcagagcugcagcauccccaacaucgagaccgugaucgaguuccagcagaagaacaacagacugcuggagaucaccagagaguucagcgugaacgccggcgugaccacccccgugagcaccuacaugcugaccaacagcgagcugcugagccugaucaacgacaugcccaucaccaacgaccagaagaagcugaugagcaacaacgugcagaucgugagacagcagagcuacagcaucaugugcaucaucaaggaggaggugcuggccuacguggugcagcugccccuguacggcgugaucgacacccccugcuggaagcugcacaccagcccccugugcaccaccaacaccaaggagggcagcaacaucugccugaccagaaccgacagaggcugguacugcgacaacgccggcagcgugagcuucuucccccaggccgagaccugcaaggugcagagcaacagaguguucugcgacaccaugaacagccugacccugcccagcgaggugaaccugugcaacguggacaucuucaaccccaaguacgacugcaagaucaugaccagcaagaccgacgugagcagcagcgugaucaccagccugggcgccaucgugagcugcuacggcaagaccaagugcaccgccagcaacaagaacagaggcaucaucaagaccuucagcaacggcugcgacuacgugagcaacaagggcguggacaccgugagcgugggcaacacccuguacugcgugaacaagcaggagggccagagccuguacgugaagggcgagcccaucaucaacuucuacgacccccugguguuccccagcgacgaguucgacgccagcaucagccaggugaacgagaagaucaaccagagccuggccuucaucagaaagagcgacgagcugcugcacaacgugaacgccggcaagagcaccaccaacaucaugaucaccaccaucaucaucgugaucaucgugauccugcugagccugaucgccgugggccugcugcuguacugcaaggccagaugaggacuagugaagggaacacccaaauuuaauucagccuuaagcacaauuaauuaagagugaaacguaauuguacaagcaguuggucacccaccauagggcaugaucaacaccgcaaccuuuccuuuuucccccagugauucugaaaaaccccucuucccuucagcuugcuuagauguuccaaauuuaguaagcuuaaggcggccuacagaagaaaaagaaaaaaaaggccacaaaaguucccucucacuuucaguaaauaaaauaaaagcagcaacagaaauaaagaaauaaaugaaauucaaaaugaaauaaauauuguguugugcagcauuaaaaaaucaauaaaaauuaaaaaugagcaagaucuaaaaaaaaaaaaaaaaaaaaaaaaaaaaaaaaaaaaaaaaaaaaaaaaaaaaaaaaaaaaaaaaugcaucccccccccccccccccccccccccccccccaaaggcucuuuucagagccaccagaauu

SEQ ID NO: 2893 - RNA, 2214 nt, Artificial Sequence
  mRNA product Design d-3 comprising derived and/or modified sequence from HRSV(A2)__F-del_DSCav1_mut2 (opt5)
gggagagggcgcuuggcuugcaaggacccugagcugcggcauugaagcacacccaacccaacucgacugaagucagccucacugaaccggaucugagaaucuucucucucugggcuugccagggcucuccgaaccuagcuagcauccucuucaauuccaacuagaaagcuuaccauggagcugcucauccugaaggccaacgcuauuaccacaauccuuacggccgugaccuucugcuuugcgagcggccagaauauuacagaagaguucuaccaauccaccuguucugcugucagcaaaggguaucugggagcccucagaacaggcugguacaccuccguuaucacaauugaacugucuaacaucaaggagaauaaaugcaacgggaccgacgccaaggugaaacuuaucaagcaggaacuggauaaguauaaaaaugcugugacggaccuccagcugcugaugcagagcacccccgccacaggauccggcucugcuauuuguagcggggucgccgugugcaagguucuccaccuggagggagaggugaacaaaaucaaguccgcgcuucugagcaccaauaaagccgucgugucucucuccaacggcguuagcgugcugacauuuaagguccuugaucugaagaauuacauugacaaacaacuccugccuauccugaacaagcagucuuguuccauuccgaauaucgaaaccgugauugaguuccagcagaaaaacaaucggcuccuggaaaucacgcgcgaguuuagcgugaacgcuggcgucacaacccccguuucuacauauaugcuuaccaauuccgagcugcucagccugaucaacgauaugccuauuaccaacgaccaaaagaaacuuauguccaauaacgugcagaucgugagacagcagucuuacagcauuaugugcaucauuaaggaagagguccuggccuaugugguucaacucccccuguacggggugaucgauacaccuuguuggaaacugcauacgagcccccucugcaccacaaauaccaaggaaggauccaacaucugucugacacggaccgaccgcggcugguacugcgauaaugcugggucugucuccuucuuuccucaggccgagacguguaaggugcagagcaacagaguuuucugcgacacaaugaacucucuuacccugccgagcgaagugaaucucugcaaugucgauauuuuuaaccccaaauaugacuguaagaucaugaccuccaaaacagaugugucuagcuccgucauuaccagccugggagcgaucgugucuugcuacggcaagacaaaauguacggccuccaauaagaaccgggggauuaucaagaccuucagcaauggaugcgacuauguuucuaacaaaggcguggacacagucuccgugggcaauacccuuuacuguguuaacaagcaagaggggcagagccuguaugugaaaggagagccuaucauuaacuuuuacgauccccucgucuucccuuccgacgaauuugaugcuucuaucagccaggugaaugagaagauuaaccagucccuggccuucauccgcaaaucugacgaacugcuccacaaugugaacgcuggcaagagcacaaccaauauuaugaucacgaccauuaucaucguuauuaucgucauucugcuuucccugaucgccguggggcuccugcuguauugcaaggccagaugaggacuagugaagggaacacccaaauuuaauucagccuuaagcacaauuaauuaagagugaaacguaauuguacaagcaguuggucacccaccauagggcaugaucaacaccgcaaccuuuccuuuuucccccagugauucugaaaaaccccucuucccuucagcuugcuuagauguuccaaauuuaguaagcuuaaggcggccuacagaagaaaaagaaaaaaaaggccacaaaaguucccucucacuuucaguaaauaaaauaaaagcagcaacagaaauaaagaaauaaaugaaauucaaaaugaaauaaauauuguguugugcagcauuaaaaaaucaauaaaaauuaaaaaugagcaagaucuaaaaaaaaaaaaaaaaaaaaaaaaaaaaaaaaaaaaaaaaaaaaaaaaaaaaaaaaaaaaaaaaugcaucccccccccccccccccccccccccccccccaaaggcucuuuucagagccaccagaauu

SEQ ID NO: 2894 - RNA, 2214 nt, Artificial Sequence
  mRNA product Design d-3 comprising derived and/or modified sequence from HRSV(A2)__F-del_DSCav1_mut2 (opt6)
gggagagggcgcuuggcuugcaaggacccugagcugcggcauugaagcacacccaacccaacucgacugaagucagccucacugaaccggaucugagaaucuucucucucugggcuugccagggcucuccgaaccuagcuagcauccucuucaauuccaacuagaaagcuuaccauggaacuccuaauacuuaaagccaaugcaauaaccacaauacuaacagcaguaacauucugcuuugcaucaggacaaaacauaacagaagaauuuuaccaaucaacauguucagcaguaagcaaaggauaccuaggagccuuacgcacagguugguacacuuccguaauaacaauagaacucucaaauauaaaagaaaacaaaugcaacggaaccgaugcaaaaguaaaacuaauaaaacaagaauuagacaaauacaaaaacgcaguaacagaccuacaauuacuuaugcaaucaacacccgcaacaggauccggcucagcaaucuguucaggaguagcaguaugcaaaguucuccaccuagaaggcgaaguaaacaaaauaaaaucagcccuauuaucuaccaauaaagcaguaguaucacuaucaaauggaguaucuguccuaaccuucaaaguacuugaccuaaaaaauuacaucgacaaacaauuacuaccaauacuuaacaaacaaucauguucaauaccaaacauugaaacaguaauagaauuucaacaaaaaaauaacagauuauuagaaauaacccgcgaauuuucaguuaacgcaggaguaacaacaccaguauccacauacauguuaacaaauucagaacucuuaucacuuauaaacgacaugcccauaacaaacgaccaaaaaaaacucaugucuaacaauguucaaauaguucgacaacaaucauacuccauaaugugcauaauaaaagaagaaguucuagcauauguuguacaacucccacucuaugguguuauagacacaccaugcuggaaacuacauacaagccccuuaugcacuacaaacacaaaagaaggcucuaauauaugucuaacccgcacagacagaggcugguauugcgauaacgcagguucaguaucauucuuuccacaagcagaaacuugcaaaguccaauccaauagagucuucugcgacacuaugaacucacucacacucccaucugaagucaauuuauguaacgucgauaucuucaacccaaaauacgacugcaaaauaaugaccucaaaaacagacguaagcucaucagucauaacuucucuaggcgcaaucgucucauguuacggcaaaacaaaauguaccgcaucaaacaaaaaucgagguauaauaaaaaccuuuucuaacggcugcgacuacguaucaaacaaaggaguagauacuguaagugucggaaacacauuauacugcgucaacaaacaagaaggacaaucccuauauguuaaaggcgaaccuaucauuaauuucuacgacccacucgucuuuccauccgacgaauuugacgcaucaauuucccaaguaaaugaaaaaauaaaccaaucccuugcauucauaagaaaaucagaugaacuauuacacaacguaaacgcaggcaaaucaacaacaaauauaaugaucacaacaauaauaaucguaauaauaguaauccuacucucacuaauagcaguaggcuuacuauuauauugcaaagccagauaaggacuagugaagggaacacccaaauuuaauucagccuuaagcacaauuaauuaagagugaaacguaauuguacaagcaguuggucacccaccauagggcaugaucaacaccgcaaccuuuccuuuuucccccagugauucugaaaaaccccucuucccuucagcuugcuuagauguuccaaauuuaguaagcuuaaggcggccuacagaagaaaaagaaaaaaaaggccacaaaaguucccucucacuuucaguaaauaaaauaaaagcagcaacagaaauaaagaaauaaaugaaauucaaaaugaaauaaauauuguguugugcagcauuaaaaaaucaauaaaaauuaaaaaugagcaagaucuaaaaaaaaaaaaaaaaaaaaaaaaaaaaaaaaaaaaaaaaaaaaaaaaaaaaaaaaaaaaaaaaugcaucccccccccccccccccccccccccccccccaaaggcucuuuucagagccaccagaauu

SEQ ID NO: 2895 - RNA, 2214 nt, Artificial Sequence
  mRNA product Design d-3 comprising derived and/or modified sequence from HRSV(A2)__F-del_DSCav1_mut2 (opt11)
gggagagggcgcuuggcuugcaaggacccugagcugcggcauugaagcacacccaacccaacucgacugaagucagccucacugaaccggaucugagaaucuucucucucugggcuugccagggcucuccgaaccuagcuagcauccucuucaauuccaacuagaaagcuuaccauggaacuucuuauccuaaaagcgaacgccauaaccacaauccuaacagcagucaccuucuguuucgccucaggacaaaacaucaccgaggaauuuuaccaauccacauguagcgcugucucaaaaggcuaccucggcgcccuccgaaccggcugguacacauccguaauaacgaucgaacucuccaacauaaaagaaaauaaaugcaacggcaccgacgccaaagucaaacuuaucaaacaagaacuagacaaauacaaaaacgccgucaccgaccuccagcuccucaugcaauccaccccagcaacaggcuccggaagcgcaaucugcucaggcgucgccguaugcaaaguacuccaccucgaaggagaagucaacaaaaucaaauccgcccuccuauccacaaacaaagcaguugucucacucuccaacgggguaagcguacugaccuucaaaguccuagaccucaaaaacuacaucgauaaacaacuccuuccaauccucaacaaacaaucaugcucuauccccaacaucgaaaccguaaucgaauuucaacaaaaaaacaaccgccuacuugaaaucacacgcgaauuuagcgucaacgcaggaguaacaacacccguguccacauauaugcucacgaacagcgaacuacuaucccugauuaacgacaugcccaucaccaacgaccaaaaaaaacuaaugagcaacaacguacaaaucguccgccaacaaagcuacucuauaaugugcaucaucaaggaagaaguccuagccuacgucguccaauuaccacucuacggcgucaucgacacacccugcuggaaacuccauacauccccccucugcaccaccaacaccaaagaaggguccaacauaugccucacucgcacagaccgcggcugguacugcgacaacgcuggcagcgucagcuucuucccccaggccgaaaccugcaaaguccaauccaacagagucuucugcgacaccaugaacucgcucacccuccccuccgaggucaaccucugcaacgucgacauauucaaccccaaauacgacugcaaaaucaugaccuccaaaaccgacgucagcucaucagucaucacaucccucggggccaucgucuccugcuacggcaaaaccaagugcaccgccucaaacaaaaaccgcggcauuaucaaaacauucuccaacggcugcgacuacgucuccaacaaaggcgucgacacagucuccgucgguaacacccucuacugcguaaauaaacaagaaggccaaucccucuacgucaaaggcgaacccaucaucaacuucuacgacccucucgucuuccccuccgacgaauuugacgccucaaucagccaaguuaacgaaaaaaucaaccaaucacucgccuucauccgcaaauccgacgaacuccuccacaacguuaacgccggcaaaucuaccacgaacaucaugaucaccaccauaaucaucguaauuaucguaauacuccuaucccucauagcaguaggccuccuacucuacugcaaagcccguuaaggacuagugaagggaacacccaaauuuaauucagccuuaagcacaauuaauuaagagugaaacguaauuguacaagcaguuggucacccaccauagggcaugaucaacaccgcaaccuuuccuuuuucccccagugauucugaaaaaccccucuucccuucagcuugcuuagauguuccaaauuuaguaagcuuaaggcggccuacagaagaaaaagaaaaaaaaggccacaaaaguucccucucacuuucaguaaauaaaauaaaagcagcaacagaaauaaagaaauaaaugaaauucaaaaugaaauaaauauuguguugugcagcauuaaaaaaucaauaaaaauuaaaaaugagcaagaucuaaaaaaaaaaaaaaaaaaaaaaaaaaaaaaaaaaaaaaaaaaaaaaaaaaaaaaaaaaaaaaaaugcaucccccccccccccccccccccccccccccccaaaggcucuuuucagagccaccagaauu

SEQ ID NO: 2896 - RNA, 1897 nt, Artificial Sequence
  mRNA product Design d-4 comprising derived and/or modified sequence from HRSV(A2)__F-del_DSCav1_mut2 (opt1)
gggagagucccgcagucggcguccagcggcucugcuuguucgugugugugucguugcaggccuuauucaagcuuaccauggagcugcucauccugaaggccaacgccaucaccaccauccugacggcggugaccuucugcuucgccagcggccagaacaucaccgaggaguucuaccaguccacgugcagcgccgucuccaagggguaccucggcgcccugcggaccggcugguacaccuccgugaucaccaucgagcugagcaacaucaaggagaacaagugcaacgggaccgacgccaaggugaagcucaucaagcaggagcuggacaaguacaagaacgcggucacggaccugcagcuccugaugcaguccaccccggcaaccggcuccggcuccgccaucugcagcggcgucgccgugugcaaggugcugcaccucgagggggaggucaacaagaucaagagcgcccugcuguccaccaacaaggccguggugagccucuccaacggcgucagcgugcugaccuucaaggugcuggaccucaagaacuacaucgacaagcagcugcugcccauccugaacaagcagagcugcuccauccccaacaucgagacggugaucgaguuccagcagaagaacaaccggcuccuggagaucacccgcgaguucagcgugaacgccggggucaccacccccguguccacguacaugcugaccaacagcgagcuccugucccugaucaacgacaugccgaucaccaacgaccagaagaagcucaugagcaacaacgugcagaucguccggcagcaguccuacagcaucaugugcaucaucaaggaggaggugcuggcguacgugguccagcugccccucuacggcgugaucgacacccccugcuggaagcugcacacgagcccccugugcaccaccaacaccaaggagggguccaacaucugccucacgcgcaccgaccggggcugguacugcgacaacgccggcagcgucuccuucuucccgcaggccgagaccugcaaggugcagagcaaccgcguguucugcgacaccaugaacucccugacgcugcccagcgagguaaaccucugcaacgucgacaucuucaaccccaaguacgacugcaagaucaugaccuccaagaccgacgugagcuccagcgugaucaccucccugggggccaucgucagcugcuacggcaagacgaagugcaccgccagcaacaagaaccgggggaucaucaagaccuucuccaacggcugcgacuacgugagcaacaagggcguggacaccguguccgucgggaacacccuguacugcgugaacaagcaggagggccagagccucuacgugaagggggagcccaucaucaacuucuacgacccgcuggucuuccccuccgacgaguucgacgcgagcaucucccaggugaacgagaagaucaaccagagccuggccuucauccgcaaguccgacgagcugcuccacaacgugaacgccggcaagagcacgaccaacaucaugaucaccaccaucaucaucgucaucaucgugauccugcugucccucaucgccguggggcugcugcucuacugcaaggcccggugaggacuaguggaagcauuuuccuggcugauuaaaagaaauuacucagcuauggucaucuguuccuguuagaaggcuaugcagcauauuauauacuaugcgcauguuaugaaaugcauaauaaaaaauuuuaaaaaaucuaaaagaucuaaaaaaaaaaaaaaaaaaaaaaaaaaaaaaaaaaaaaaaaaaaaaaaaaaaaaaaaaaaaaaaaugcaucccccccccccccccccccccccccccccccaaaggcucuuuucagagccaccagaauu

SEQ ID NO: 2897 - RNA, 1897 nt, Artificial Sequence
  mRNA product Design d-4 comprising derived and/or modified sequence from HRSV(A2)__F-del_DSCav1_mut2 (opt1)
gggagagucccgcagucggcguccagcggcucugcuuguucgugugugugucguugcaggccuuauucaagcuuaccauggagcugcucauccugaaggccaacgccaucaccaccauccugacggcggugaccuucugcuucgccagcggccagaacaucaccgaggaguucuaccaguccacgugcagcgccgucuccaagggguaccucggcgcccugcgcaccgggugguacaccagcgugaucaccaucgagcuguccaacaucaaggagaacaagugcaacggcaccgacgccaaggugaagcucaucaagcaggagcuggacaaguacaagaacgcggucacggaccugcagcuccugaugcagagcacccccgccaccggguccggcagcgccaucugcuccggcguggccgugugcaagguccugcaccucgagggggaggugaacaagaucaagagcgcgcugcuguccaccaacaaggccguggucagccucuccaacggcgugagcgugcugacguucaagguccuggaccucaagaacuacaucgacaagcagcugcugccgauccucaacaagcaguccugcagcauccccaacaucgagaccgugaucgaguuccagcagaagaacaaccggcugcuggagaucacccgcgaguucuccgugaacgccggggucaccacgcccgugagcaccuacaugcucaccaacuccgagcugcugagccucaucaacgacaugcccaucaccaacgaccagaagaagcugaugagcaacaacgugcagaucguccggcagcaguccuacagcaucaugugcaucaucaaggaggaggugcuggccuacgugguccagcucccgcuguacggcgugaucgacacgcccugcuggaagcugcacaccagcccccucugcaccaccaacacgaaggagggguccaacaucugccugacccgcaccgaccggggcugguacugcgacaacgccggcuccgugagcuucuucccccaggcggagaccugcaagguccaguccaaccgcguguucugcgacacgaugaacagccugacccucccguccgaggucaaccugugcaacguggacaucuucaaccccaaguacgacugcaagaucaugaccagcaagaccgacguguccagcuccgucaucacgagccugggggccaucguguccugcuacggcaagaccaagugcaccgccagcaacaagaaccgggggaucaucaagaccuucuccaacggcugcgacuacgugagcaacaagggcgucgacacgguguccguggggaacacccucuacugcgucaacaagcaggagggccagagccuguacgugaagggggagcccaucaucaacuucuacgacccccugguguucccgagcgacgaguucgacgccuccaucagccaggucaacgagaagaucaaccagucccucgccuucauccgcaagagcgacgagcugcugcacaacgugaacgcgggcaaguccaccaccaacaucaugaucaccacgaucaucaucgugaucaucgucauccuccugagccugaucgccguggggcuccugcuguacugcaaggcccggugaggacuaguggaagcauuuuccuggcugauuaaaagaaauuacucagcuauggucaucuguuccuguuagaaggcuaugcagcauauuauauacuaugcgcauguuaugaaaugcauaauaaaaaauuuuaaaaaaucuaaaagaucuaaaaaaaaaaaaaaaaaaaaaaaaaaaaaaaaaaaaaaaaaaaaaaaaaaaaaaaaaaaaaaaaugcaucccccccccccccccccccccccccccccccaaaggcucuuuucagagccaccagaauu

SEQ ID NO: 2898 - RNA, 1897 nt, Artificial Sequence
  mRNA product Design d-4 comprising derived and/or modified sequence from HRSV(A2)__F-del_DSCav1_mut2 (opt2)
gggagagucccgcagucggcguccagcggcucugcuuguucgugugugugucguugcaggccuuauucaagcuuaccauggagcuccucauccucaaggccaacgccaucaccaccauccucaccgccgucaccuucugcuucgccuccggccagaacaucaccgaggaguucuaccaguccaccugcuccgccgucuccaagggcuaccucggcgcccuccgcaccggcugguacaccuccgucaucaccaucgagcucuccaacaucaaggagaacaagugcaacggcaccgacgccaaggucaagcucaucaagcaggagcucgacaaguacaagaacgccgucaccgaccuccagcuccucaugcaguccacccccgccaccggcuccggcuccgccaucugcuccggcgucgccgucugcaagguccuccaccucgagggcgaggucaacaagaucaaguccgcccuccucuccaccaacaaggccgucgucucccucuccaacggcgucuccguccucaccuucaagguccucgaccucaagaacuacaucgacaagcagcuccuccccauccucaacaagcaguccugcuccauccccaacaucgagaccgucaucgaguuccagcagaagaacaaccgccuccucgagaucacccgcgaguucuccgucaacgccggcgucaccacccccgucuccaccuacaugcucaccaacuccgagcuccucucccucaucaacgacaugcccaucaccaacgaccagaagaagcucauguccaacaacguccagaucguccgccagcaguccuacuccaucaugugcaucaucaaggaggagguccucgccuacgucguccagcucccccucuacggcgucaucgacacccccugcuggaagcuccacaccuccccccucugcaccaccaacaccaaggagggcuccaacaucugccucacccgcaccgaccgcggcugguacugcgacaacgccggcuccgucuccuucuucccccaggccgagaccugcaagguccaguccaaccgcgucuucugcgacaccaugaacucccucacccuccccuccgaggucaaccucugcaacgucgacaucuucaaccccaaguacgacugcaagaucaugaccuccaagaccgacgucuccuccuccgucaucaccucccucggcgccaucgucuccugcuacggcaagaccaagugcaccgccuccaacaagaaccgcggcaucaucaagaccuucuccaacggcugcgacuacgucuccaacaagggcgucgacaccgucuccgucggcaacacccucuacugcgucaacaagcaggagggccagucccucuacgucaagggcgagcccaucaucaacuucuacgacccccucgucuuccccuccgacgaguucgacgccuccaucucccaggucaacgagaagaucaaccagucccucgccuucauccgcaaguccgacgagcuccuccacaacgucaacgccggcaaguccaccaccaacaucaugaucaccaccaucaucaucgucaucaucgucauccuccucucccucaucgccgucggccuccuccucuacugcaaggcccgcugaggacuaguggaagcauuuuccuggcugauuaaaagaaauuacucagcuauggucaucuguuccuguuagaaggcuaugcagcauauuauauacuaugcgcauguuaugaaaugcauaauaaaaaauuuuaaaaaaucuaaaagaucuaaaaaaaaaaaaaaaaaaaaaaaaaaaaaaaaaaaaaaaaaaaaaaaaaaaaaaaaaaaaaaaaugcaucccccccccccccccccccccccccccccccaaaggcucuuuucagagccaccagaauu

SEQ ID NO: 2899 - RNA, 1897 nt, Artificial Sequence
  mRNA product Design d-4 comprising derived and/or modified sequence from HRSV(A2)__F-del_DSCav1_mut2 (opt3)
gggagagucccgcagucggcguccagcggcucugcuuguucgugugugugucguugcaggccuuauucaagcuuaccauggagcugcucauccuuaaggccaacgcuauuaccacaauacugacugcagugacguucugcuuugccagcggccagaauaucaccgaagaguucuaccaauccacauguucugcggucucaaaaggguauuugggagcuuuaagaacugguugguacaccaguguuauuacaaucgaacugagcaacauuaaggagaauaaaugcaacggcaccgacgccaaggugaaacuaaucaagcaggaacucgauaaguauaaaaaugcaguaacugaccugcagcuucugaugcaguccacacccgccaccgggucuggaucggcuauauguucaggcguggcagucugcaagguguugcaccucgagggugagguuaacaaaaucaagagcgcccugcugaguacgaauaaagcuguggucucccucucuaacggggugagcguauuaacuuuuaagguucuggaucuuaagaauuacauugacaaacaauugcugccuauccuaaacaagcaguccuguucaauuccaaauaucgaaaccgugauagaguuccagcagaaaaacaauaggcuccuggaaauuacacgggaguuuagugucaacgccggagugacuaccccggugagcacauauaugcuuaccaauucugagcuguugucccucaucaacgauaugcccauuacgaacgaccaaaagaaacugaugucaaauaacguccagaucguucgccagcagagcuacaguaucaugugcauuauaaaggaagagguguuagcguauguagugcaacugccucucuacggcgucaucgauacuccauguuggaaacuucauacaucuccccugugcaccacuaauacaaaggaaggcuccaacauuuguuugacccgaacggaccgugggugguacugcgauaaugcaggaagcgugucguucuuuccucaggccgagaccuguaagguucagucuaacagaguguucugcgacacaaugaacucccuaacucugccaucagaagucaaucucugcaauguggauaucuuuaaccccaaauaugacuguaagauaaugaccaguaaaacagauguaagcuccucuguuauuacuagccugggugcuaucgugucaugcuacggcaagaccaaauguacagccaguaauaagaacagggggaucauuaagaccuucuccaauggaugcgacuaugucagcaacaaaggcguggacacugucucuguggguaauacgcuuuacuguguuaacaagcaagaggggcagucacuguaugugaaaggagagccuaucauuaacuuuuacgauccauugguauucccgagugacgaauuugaugcaagcauaucccaggucaaugagaagaucaaccagucucucgcuuucauucggaaaucggacgaacuguuacacaaugugaacgccggcaagagcacaaccaauaucaugaucacuaccauuauaaucguuauuaucgugauucugcuaucccucaucgcggucggccugcuuuuguauugcaaggcccgcugaggacuaguggaagcauuuuccuggcugauuaaaagaaauuacucagcuauggucaucuguuccuguuagaaggcuaugcagcauauuauauacuaugcgcauguuaugaaaugcauaauaaaaaauuuuaaaaaaucuaaaagaucuaaaaaaaaaaaaaaaaaaaaaaaaaaaaaaaaaaaaaaaaaaaaaaaaaaaaaaaaaaaaaaaaugcaucccccccccccccccccccccccccccccccaaaggcucuuuucagagccaccagaauu

SEQ ID NO: 2900 - RNA, 1897 nt, Artificial Sequence
  mRNA product Design d-4 comprising derived and/or modified sequence from HRSV(A2)__F-del_DSCav1_mut2 (opt4)
gggagagucccgcagucggcguccagcggcucugcuuguucgugugugugucguugcaggccuuauucaagcuuaccauggagcugcugauccugaaggccaacgccaucaccaccauccugaccgccgugaccuucugcuucgccagcggccagaacaucaccgaggaguucuaccagagcaccugcagcgccgugagcaagggcuaccugggcgcccugagaaccggcugguacaccagcgugaucaccaucgagcugagcaacaucaaggagaacaagugcaacggcaccgacgccaaggugaagcugaucaagcaggagcuggacaaguacaagaacgccgugaccgaccugcagcugcugaugcagagcacccccgccaccggcagcggcagcgccaucugcagcggcguggccgugugcaaggugcugcaccuggagggcgaggugaacaagaucaagagcgcccugcugagcaccaacaaggccguggugagccugagcaacggcgugagcgugcugaccuucaaggugcuggaccugaagaacuacaucgacaagcagcugcugcccauccugaacaagcagagcugcagcauccccaacaucgagaccgugaucgaguuccagcagaagaacaacagacugcuggagaucaccagagaguucagcgugaacgccggcgugaccacccccgugagcaccuacaugcugaccaacagcgagcugcugagccugaucaacgacaugcccaucaccaacgaccagaagaagcugaugagcaacaacgugcagaucgugagacagcagagcuacagcaucaugugcaucaucaaggaggaggugcuggccuacguggugcagcugccccuguacggcgugaucgacacccccugcuggaagcugcacaccagcccccugugcaccaccaacaccaaggagggcagcaacaucugccugaccagaaccgacagaggcugguacugcgacaacgccggcagcgugagcuucuucccccaggccgagaccugcaaggugcagagcaacagaguguucugcgacaccaugaacagccugacccugcccagcgaggugaaccugugcaacguggacaucuucaaccccaaguacgacugcaagaucaugaccagcaagaccgacgugagcagcagcgugaucaccagccugggcgccaucgugagcugcuacggcaagaccaagugcaccgccagcaacaagaacagaggcaucaucaagaccuucagcaacggcugcgacuacgugagcaacaagggcguggacaccgugagcgugggcaacacccuguacugcgugaacaagcaggagggccagagccuguacgugaagggcgagcccaucaucaacuucuacgacccccugguguuccccagcgacgaguucgacgccagcaucagccaggugaacgagaagaucaaccagagccuggccuucaucagaaagagcgacgagcugcugcacaacgugaacgccggcaagagcaccaccaacaucaugaucaccaccaucaucaucgugaucaucgugauccugcugagccugaucgccgugggccugcugcuguacugcaaggccagaugaggacuaguggaagcauuuuccuggcugauuaaaagaaauuacucagcuauggucaucuguuccuguuagaaggcuaugcagcauauuauauacuaugcgcauguuaugaaaugcauaauaaaaaauuuuaaaaaaucuaaaagaucuaaaaaaaaaaaaaaaaaaaaaaaaaaaaaaaaaaaaaaaaaaaaaaaaaaaaaaaaaaaaaaaaugcaucccccccccccccccccccccccccccccccaaaggcucuuuucagagccaccagaauu

SEQ ID NO: 2901 - RNA, 1897 nt, Artificial Sequence
  mRNA product Design d-4 comprising derived and/or modified sequence from HRSV(A2)__F-del_DSCav1_mut2 (opt5)
gggagagucccgcagucggcguccagcggcucugcuuguucgugugugugucguugcaggccuuauucaagcuuaccauggagcugcucauccugaaggccaacgcuauuaccacaauccuuacggccgugaccuucugcuuugcgagcggccagaauauuacagaagaguucuaccaauccaccuguucugcugucagcaaaggguaucugggagcccucagaacaggcugguacaccuccguuaucacaauugaacugucuaacaucaaggagaauaaaugcaacgggaccgacgccaaggugaaacuuaucaagcaggaacuggauaaguauaaaaaugcugugacggaccuccagcugcugaugcagagcacccccgccacaggauccggcucugcuauuuguagcggggucgccgugugcaagguucuccaccuggagggagaggugaacaaaaucaaguccgcgcuucugagcaccaauaaagccgucgugucucucuccaacggcguuagcgugcugacauuuaagguccuugaucugaagaauuacauugacaaacaacuccugccuauccugaacaagcagucuuguuccauuccgaauaucgaaaccgugauugaguuccagcagaaaaacaaucggcuccuggaaaucacgcgcgaguuuagcgugaacgcuggcgucacaacccccguuucuacauauaugcuuaccaauuccgagcugcucagccugaucaacgauaugccuauuaccaacgaccaaaagaaacuuauguccaauaacgugcagaucgugagacagcagucuuacagcauuaugugcaucauuaaggaagagguccuggccuaugugguucaacucccccuguacggggugaucgauacaccuuguuggaaacugcauacgagcccccucugcaccacaaauaccaaggaaggauccaacaucugucugacacggaccgaccgcggcugguacugcgauaaugcugggucugucuccuucuuuccucaggccgagacguguaaggugcagagcaacagaguuuucugcgacacaaugaacucucuuacccugccgagcgaagugaaucucugcaaugucgauauuuuuaaccccaaauaugacuguaagaucaugaccuccaaaacagaugugucuagcuccgucauuaccagccugggagcgaucgugucuugcuacggcaagacaaaauguacggccuccaauaagaaccgggggauuaucaagaccuucagcaauggaugcgacuauguuucuaacaaaggcguggacacagucuccgugggcaauacccuuuacuguguuaacaagcaagaggggcagagccuguaugugaaaggagagccuaucauuaacuuuuacgauccccucgucuucccuuccgacgaauuugaugcuucuaucagccaggugaaugagaagauuaaccagucccuggccuucauccgcaaaucugacgaacugcuccacaaugugaacgcuggcaagagcacaaccaauauuaugaucacgaccauuaucaucguuauuaucgucauucugcuuucccugaucgccguggggcuccugcuguauugcaaggccagaugaggacuaguggaagcauuuuccuggcugauuaaaagaaauuacucagcuauggucaucuguuccuguuagaaggcuaugcagcauauuauauacuaugcgcauguuaugaaaugcauaauaaaaaauuuuaaaaaaucuaaaagaucuaaaaaaaaaaaaaaaaaaaaaaaaaaaaaaaaaaaaaaaaaaaaaaaaaaaaaaaaaaaaaaaaugcaucccccccccccccccccccccccccccccccaaaggcucuuuucagagccaccagaauu

SEQ ID NO: 2902 - RNA, 1897 nt, Artificial Sequence
  mRNA product Design d-4 comprising derived and/or modified sequence from HRSV(A2)__F-del_DSCav1_mut2 (opt6)
gggagagucccgcagucggcguccagcggcucugcuuguucgugugugugucguugcaggccuuauucaagcuuaccauggaacuccuaauacuuaaagccaaugcaauaaccacaauacuaacagcaguaacauucugcuuugcaucaggacaaaacauaacagaagaauuuuaccaaucaacauguucagcaguaagcaaaggauaccuaggagccuuacgcacagguugguacacuuccguaauaacaauagaacucucaaauauaaaagaaaacaaaugcaacggaaccgaugcaaaaguaaaacuaauaaaacaagaauuagacaaauacaaaaacgcaguaacagaccuacaauuacuuaugcaaucaacacccgcaacaggauccggcucagcaaucuguucaggaguagcaguaugcaaaguucuccaccuagaaggcgaaguaaacaaaauaaaaucagcccuauuaucuaccaauaaagcaguaguaucacuaucaaauggaguaucuguccuaaccuucaaaguacuugaccuaaaaaauuacaucgacaaacaauuacuaccaauacuuaacaaacaaucauguucaauaccaaacauugaaacaguaauagaauuucaacaaaaaaauaacagauuauuagaaauaacccgcgaauuuucaguuaacgcaggaguaacaacaccaguauccacauacauguuaacaaauucagaacucuuaucacuuauaaacgacaugcccauaacaaacgaccaaaaaaaacucaugucuaacaauguucaaauaguucgacaacaaucauacuccauaaugugcauaauaaaagaagaaguucuagcauauguuguacaacucccacucuaugguguuauagacacaccaugcuggaaacuacauacaagccccuuaugcacuacaaacacaaaagaaggcucuaauauaugucuaacccgcacagacagaggcugguauugcgauaacgcagguucaguaucauucuuuccacaagcagaaacuugcaaaguccaauccaauagagucuucugcgacacuaugaacucacucacacucccaucugaagucaauuuauguaacgucgauaucuucaacccaaaauacgacugcaaaauaaugaccucaaaaacagacguaagcucaucagucauaacuucucuaggcgcaaucgucucauguuacggcaaaacaaaauguaccgcaucaaacaaaaaucgagguauaauaaaaaccuuuucuaacggcugcgacuacguaucaaacaaaggaguagauacuguaagugucggaaacacauuauacugcgucaacaaacaagaaggacaaucccuauauguuaaaggcgaaccuaucauuaauuucuacgacccacucgucuuuccauccgacgaauuugacgcaucaauuucccaaguaaaugaaaaaauaaaccaaucccuugcauucauaagaaaaucagaugaacuauuacacaacguaaacgcaggcaaaucaacaacaaauauaaugaucacaacaauaauaaucguaauaauaguaauccuacucucacuaauagcaguaggcuuacuauuauauugcaaagccagauaaggacuaguggaagcauuuuccuggcugauuaaaagaaauuacucagcuauggucaucuguuccuguuagaaggcuaugcagcauauuauauacuaugcgcauguuaugaaaugcauaauaaaaaauuuuaaaaaaucuaaaagaucuaaaaaaaaaaaaaaaaaaaaaaaaaaaaaaaaaaaaaaaaaaaaaaaaaaaaaaaaaaaaaaaaugcaucccccccccccccccccccccccccccccccaaaggcucuuuucagagccaccagaauu

SEQ ID NO: 2903 - RNA, 1897 nt, Artificial Sequence
  mRNA product Design d-4 comprising derived and/or modified sequence from HRSV(A2)__F-del_DSCav1_mut2 (opt11)
gggagagucccgcagucggcguccagcggcucugcuuguucgugugugugucguugcaggccuuauucaagcuuaccauggaacuucuuauccuaaaagcgaacgccauaaccacaauccuaacagcagucaccuucuguuucgccucaggacaaaacaucaccgaggaauuuuaccaauccacauguagcgcugucucaaaaggcuaccucggcgcccuccgaaccggcugguacacauccguaauaacgaucgaacucuccaacauaaaagaaaauaaaugcaacggcaccgacgccaaagucaaacuuaucaaacaagaacuagacaaauacaaaaacgccgucaccgaccuccagcuccucaugcaauccaccccagcaacaggcuccggaagcgcaaucugcucaggcgucgccguaugcaaaguacuccaccucgaaggagaagucaacaaaaucaaauccgcccuccuauccacaaacaaagcaguugucucacucuccaacgggguaagcguacugaccuucaaaguccuagaccucaaaaacuacaucgauaaacaacuccuuccaauccucaacaaacaaucaugcucuauccccaacaucgaaaccguaaucgaauuucaacaaaaaaacaaccgccuacuugaaaucacacgcgaauuuagcgucaacgcaggaguaacaacacccguguccacauauaugcucacgaacagcgaacuacuaucccugauuaacgacaugcccaucaccaacgaccaaaaaaaacuaaugagcaacaacguacaaaucguccgccaacaaagcuacucuauaaugugcaucaucaaggaagaaguccuagccuacgucguccaauuaccacucuacggcgucaucgacacacccugcuggaaacuccauacauccccccucugcaccaccaacaccaaagaaggguccaacauaugccucacucgcacagaccgcggcugguacugcgacaacgcuggcagcgucagcuucuucccccaggccgaaaccugcaaaguccaauccaacagagucuucugcgacaccaugaacucgcucacccuccccuccgaggucaaccucugcaacgucgacauauucaaccccaaauacgacugcaaaaucaugaccuccaaaaccgacgucagcucaucagucaucacaucccucggggccaucgucuccugcuacggcaaaaccaagugcaccgccucaaacaaaaaccgcggcauuaucaaaacauucuccaacggcugcgacuacgucuccaacaaaggcgucgacacagucuccgucgguaacacccucuacugcguaaauaaacaagaaggccaaucccucuacgucaaaggcgaacccaucaucaacuucuacgacccucucgucuuccccuccgacgaauuugacgccucaaucagccaaguuaacgaaaaaaucaaccaaucacucgccuucauccgcaaauccgacgaacuccuccacaacguuaacgccggcaaaucuaccacgaacaucaugaucaccaccauaaucaucguaauuaucguaauacuccuaucccucauagcaguaggccuccuacucuacugcaaagcccguuaaggacuaguggaagcauuuuccuggcugauuaaaagaaauuacucagcuauggucaucuguuccuguuagaaggcuaugcagcauauuauauacuaugcgcauguuaugaaaugcauaauaaaaaauuuuaaaaaaucuaaaagaucuaaaaaaaaaaaaaaaaaaaaaaaaaaaaaaaaaaaaaaaaaaaaaaaaaaaaaaaaaaaaaaaaugcaucccccccccccccccccccccccccccccccaaaggcucuuuucagagccaccagaauu

SEQ ID NO: 2904 - RNA, 1994 nt, Artificial Sequence
  mRNA product Design d-5 comprising derived and/or modified sequence from HRSV(A2)__F-del_DSCav1_mut2 (opt1)
gggagagggcgcuuggcuugcaaggacccugagcugcggcauugaagcacacccaacccaacucgacugaagucagccucacugaaccggaucugagaaucuucucucucugggcuugccagggcucuccgaaccuagcuagcauccucuucaauuccaacuagaaagcuuaccauggagcugcucauccugaaggccaacgccaucaccaccauccugacggcggugaccuucugcuucgccagcggccagaacaucaccgaggaguucuaccaguccacgugcagcgccgucuccaagggguaccucggcgcccugcggaccggcugguacaccuccgugaucaccaucgagcugagcaacaucaaggagaacaagugcaacgggaccgacgccaaggugaagcucaucaagcaggagcuggacaaguacaagaacgcggucacggaccugcagcuccugaugcaguccaccccggcaaccggcuccggcuccgccaucugcagcggcgucgccgugugcaaggugcugcaccucgagggggaggucaacaagaucaagagcgcccugcuguccaccaacaaggccguggugagccucuccaacggcgucagcgugcugaccuucaaggugcuggaccucaagaacuacaucgacaagcagcugcugcccauccugaacaagcagagcugcuccauccccaacaucgagacggugaucgaguuccagcagaagaacaaccggcuccuggagaucacccgcgaguucagcgugaacgccggggucaccacccccguguccacguacaugcugaccaacagcgagcuccugucccugaucaacgacaugccgaucaccaacgaccagaagaagcucaugagcaacaacgugcagaucguccggcagcaguccuacagcaucaugugcaucaucaaggaggaggugcuggcguacgugguccagcugccccucuacggcgugaucgacacccccugcuggaagcugcacacgagcccccugugcaccaccaacaccaaggagggguccaacaucugccucacgcgcaccgaccggggcugguacugcgacaacgccggcagcgucuccuucuucccgcaggccgagaccugcaaggugcagagcaaccgcguguucugcgacaccaugaacucccugacgcugcccagcgagguaaaccucugcaacgucgacaucuucaaccccaaguacgacugcaagaucaugaccuccaagaccgacgugagcuccagcgugaucaccucccugggggccaucgucagcugcuacggcaagacgaagugcaccgccagcaacaagaaccgggggaucaucaagaccuucuccaacggcugcgacuacgugagcaacaagggcguggacaccguguccgucgggaacacccuguacugcgugaacaagcaggagggccagagccucuacgugaagggggagcccaucaucaacuucuacgacccgcuggucuuccccuccgacgaguucgacgcgagcaucucccaggugaacgagaagaucaaccagagccuggccuucauccgcaaguccgacgagcugcuccacaacgugaacgccggcaagagcacgaccaacaucaugaucaccaccaucaucaucgucaucaucgugauccugcugucccucaucgccguggggcugcugcucuacugcaaggcccggugaggacuaguggaagcauuuuccuggcugauuaaaagaaauuacucagcuauggucaucuguuccuguuagaaggcuaugcagcauauuauauacuaugcgcauguuaugaaaugcauaauaaaaaauuuuaaaaaaucuaaaagaucuaaaaaaaaaaaaaaaaaaaaaaaaaaaaaaaaaaaaaaaaaaaaaaaaaaaaaaaaaaaaaaaaugcaucccccccccccccccccccccccccccccccaaaggcucuuuucagagccaccagaauu

SEQ ID NO: 2905 - RNA, 1994 nt, Artificial Sequence
  mRNA product Design d-5 comprising derived and/or modified sequence from HRSV(A2)__F-del_DSCav1_mut2 (opt1)
gggagagggcgcuuggcuugcaaggacccugagcugcggcauugaagcacacccaacccaacucgacugaagucagccucacugaaccggaucugagaaucuucucucucugggcuugccagggcucuccgaaccuagcuagcauccucuucaauuccaacuagaaagcuuaccauggagcugcucauccugaaggccaacgccaucaccaccauccugacggcggugaccuucugcuucgccagcggccagaacaucaccgaggaguucuaccaguccacgugcagcgccgucuccaagggguaccucggcgcccugcgcaccgggugguacaccagcgugaucaccaucgagcuguccaacaucaaggagaacaagugcaacggcaccgacgccaaggugaagcucaucaagcaggagcuggacaaguacaagaacgcggucacggaccugcagcuccugaugcagagcacccccgccaccggguccggcagcgccaucugcuccggcguggccgugugcaagguccugcaccucgagggggaggugaacaagaucaagagcgcgcugcuguccaccaacaaggccguggucagccucuccaacggcgugagcgugcugacguucaagguccuggaccucaagaacuacaucgacaagcagcugcugccgauccucaacaagcaguccugcagcauccccaacaucgagaccgugaucgaguuccagcagaagaacaaccggcugcuggagaucacccgcgaguucuccgugaacgccggggucaccacgcccgugagcaccuacaugcucaccaacuccgagcugcugagccucaucaacgacaugcccaucaccaacgaccagaagaagcugaugagcaacaacgugcagaucguccggcagcaguccuacagcaucaugugcaucaucaaggaggaggugcuggccuacgugguccagcucccgcuguacggcgugaucgacacgcccugcuggaagcugcacaccagcccccucugcaccaccaacacgaaggagggguccaacaucugccugacccgcaccgaccggggcugguacugcgacaacgccggcuccgugagcuucuucccccaggcggagaccugcaagguccaguccaaccgcguguucugcgacacgaugaacagccugacccucccguccgaggucaaccugugcaacguggacaucuucaaccccaaguacgacugcaagaucaugaccagcaagaccgacguguccagcuccgucaucacgagccugggggccaucguguccugcuacggcaagaccaagugcaccgccagcaacaagaaccgggggaucaucaagaccuucuccaacggcugcgacuacgugagcaacaagggcgucgacacgguguccguggggaacacccucuacugcgucaacaagcaggagggccagagccuguacgugaagggggagcccaucaucaacuucuacgacccccugguguucccgagcgacgaguucgacgccuccaucagccaggucaacgagaagaucaaccagucccucgccuucauccgcaagagcgacgagcugcugcacaacgugaacgcgggcaaguccaccaccaacaucaugaucaccacgaucaucaucgugaucaucgucauccuccugagccugaucgccguggggcuccugcuguacugcaaggcccggugaggacuaguggaagcauuuuccuggcugauuaaaagaaauuacucagcuauggucaucuguuccuguuagaaggcuaugcagcauauuauauacuaugcgcauguuaugaaaugcauaauaaaaaauuuuaaaaaaucuaaaagaucuaaaaaaaaaaaaaaaaaaaaaaaaaaaaaaaaaaaaaaaaaaaaaaaaaaaaaaaaaaaaaaaaugcaucccccccccccccccccccccccccccccccaaaggcucuuuucagagccaccagaauu

SEQ ID NO: 2906 - RNA, 1994 nt, Artificial Sequence
  mRNA product Design d-5 comprising derived and/or modified sequence from HRSV(A2)__F-del_DSCav1_mut2 (opt2)
gggagagggcgcuuggcuugcaaggacccugagcugcggcauugaagcacacccaacccaacucgacugaagucagccucacugaaccggaucugagaaucuucucucucugggcuugccagggcucuccgaaccuagcuagcauccucuucaauuccaacuagaaagcuuaccauggagcuccucauccucaaggccaacgccaucaccaccauccucaccgccgucaccuucugcuucgccuccggccagaacaucaccgaggaguucuaccaguccaccugcuccgccgucuccaagggcuaccucggcgcccuccgcaccggcugguacaccuccgucaucaccaucgagcucuccaacaucaaggagaacaagugcaacggcaccgacgccaaggucaagcucaucaagcaggagcucgacaaguacaagaacgccgucaccgaccuccagcuccucaugcaguccacccccgccaccggcuccggcuccgccaucugcuccggcgucgccgucugcaagguccuccaccucgagggcgaggucaacaagaucaaguccgcccuccucuccaccaacaaggccgucgucucccucuccaacggcgucuccguccucaccuucaagguccucgaccucaagaacuacaucgacaagcagcuccuccccauccucaacaagcaguccugcuccauccccaacaucgagaccgucaucgaguuccagcagaagaacaaccgccuccucgagaucacccgcgaguucuccgucaacgccggcgucaccacccccgucuccaccuacaugcucaccaacuccgagcuccucucccucaucaacgacaugcccaucaccaacgaccagaagaagcucauguccaacaacguccagaucguccgccagcaguccuacuccaucaugugcaucaucaaggaggagguccucgccuacgucguccagcucccccucuacggcgucaucgacacccccugcuggaagcuccacaccuccccccucugcaccaccaacaccaaggagggcuccaacaucugccucacccgcaccgaccgcggcugguacugcgacaacgccggcuccgucuccuucuucccccaggccgagaccugcaagguccaguccaaccgcgucuucugcgacaccaugaacucccucacccuccccuccgaggucaaccucugcaacgucgacaucuucaaccccaaguacgacugcaagaucaugaccuccaagaccgacgucuccuccuccgucaucaccucccucggcgccaucgucuccugcuacggcaagaccaagugcaccgccuccaacaagaaccgcggcaucaucaagaccuucuccaacggcugcgacuacgucuccaacaagggcgucgacaccgucuccgucggcaacacccucuacugcgucaacaagcaggagggccagucccucuacgucaagggcgagcccaucaucaacuucuacgacccccucgucuuccccuccgacgaguucgacgccuccaucucccaggucaacgagaagaucaaccagucccucgccuucauccgcaaguccgacgagcuccuccacaacgucaacgccggcaaguccaccaccaacaucaugaucaccaccaucaucaucgucaucaucgucauccuccucucccucaucgccgucggccuccuccucuacugcaaggcccgcugaggacuaguggaagcauuuuccuggcugauuaaaagaaauuacucagcuauggucaucuguuccuguuagaaggcuaugcagcauauuauauacuaugcgcauguuaugaaaugcauaauaaaaaauuuuaaaaaaucuaaaagaucuaaaaaaaaaaaaaaaaaaaaaaaaaaaaaaaaaaaaaaaaaaaaaaaaaaaaaaaaaaaaaaaaugcaucccccccccccccccccccccccccccccccaaaggcucuuuucagagccaccagaauu

SEQ ID NO: 2907 - RNA, 1994 nt, Artificial Sequence
  mRNA product Design d-5 comprising derived and/or modified sequence from HRSV(A2)__F-del_DSCav1_mut2 (opt3)
gggagagggcgcuuggcuugcaaggacccugagcugcggcauugaagcacacccaacccaacucgacugaagucagccucacugaaccggaucugagaaucuucucucucugggcuugccagggcucuccgaaccuagcuagcauccucuucaauuccaacuagaaagcuuaccauggagcugcucauccuuaaggccaacgcuauuaccacaauacugacugcagugacguucugcuuugccagcggccagaauaucaccgaagaguucuaccaauccacauguucugcggucucaaaaggguauuugggagcuuuaagaacugguugguacaccaguguuauuacaaucgaacugagcaacauuaaggagaauaaaugcaacggcaccgacgccaaggugaaacuaaucaagcaggaacucgauaaguauaaaaaugcaguaacugaccugcagcuucugaugcaguccacacccgccaccgggucuggaucggcuauauguucaggcguggcagucugcaagguguugcaccucgagggugagguuaacaaaaucaagagcgcccugcugaguacgaauaaagcuguggucucccucucuaacggggugagcguauuaacuuuuaagguucuggaucuuaagaauuacauugacaaacaauugcugccuauccuaaacaagcaguccuguucaauuccaaauaucgaaaccgugauagaguuccagcagaaaaacaauaggcuccuggaaauuacacgggaguuuagugucaacgccggagugacuaccccggugagcacauauaugcuuaccaauucugagcuguugucccucaucaacgauaugcccauuacgaacgaccaaaagaaacugaugucaaauaacguccagaucguucgccagcagagcuacaguaucaugugcauuauaaaggaagagguguuagcguauguagugcaacugccucucuacggcgucaucgauacuccauguuggaaacuucauacaucuccccugugcaccacuaauacaaaggaaggcuccaacauuuguuugacccgaacggaccgugggugguacugcgauaaugcaggaagcgugucguucuuuccucaggccgagaccuguaagguucagucuaacagaguguucugcgacacaaugaacucccuaacucugccaucagaagucaaucucugcaauguggauaucuuuaaccccaaauaugacuguaagauaaugaccaguaaaacagauguaagcuccucuguuauuacuagccugggugcuaucgugucaugcuacggcaagaccaaauguacagccaguaauaagaacagggggaucauuaagaccuucuccaauggaugcgacuaugucagcaacaaaggcguggacacugucucuguggguaauacgcuuuacuguguuaacaagcaagaggggcagucacuguaugugaaaggagagccuaucauuaacuuuuacgauccauugguauucccgagugacgaauuugaugcaagcauaucccaggucaaugagaagaucaaccagucucucgcuuucauucggaaaucggacgaacuguuacacaaugugaacgccggcaagagcacaaccaauaucaugaucacuaccauuauaaucguuauuaucgugauucugcuaucccucaucgcggucggccugcuuuuguauugcaaggcccgcugaggacuaguggaagcauuuuccuggcugauuaaaagaaauuacucagcuauggucaucuguuccuguuagaaggcuaugcagcauauuauauacuaugcgcauguuaugaaaugcauaauaaaaaauuuuaaaaaaucuaaaagaucuaaaaaaaaaaaaaaaaaaaaaaaaaaaaaaaaaaaaaaaaaaaaaaaaaaaaaaaaaaaaaaaaugcaucccccccccccccccccccccccccccccccaaaggcucuuuucagagccaccagaauu

SEQ ID NO: 2908 - RNA, 1994 nt, Artificial Sequence
  mRNA product Design d-5 comprising derived and/or modified sequence from HRSV(A2)__F-del_DSCav1_mut2 (opt4)
gggagagggcgcuuggcuugcaaggacccugagcugcggcauugaagcacacccaacccaacucgacugaagucagccucacugaaccggaucugagaaucuucucucucugggcuugccagggcucuccgaaccuagcuagcauccucuucaauuccaacuagaaagcuuaccauggagcugcugauccugaaggccaacgccaucaccaccauccugaccgccgugaccuucugcuucgccagcggccagaacaucaccgaggaguucuaccagagcaccugcagcgccgugagcaagggcuaccugggcgcccugagaaccggcugguacaccagcgugaucaccaucgagcugagcaacaucaaggagaacaagugcaacggcaccgacgccaaggugaagcugaucaagcaggagcuggacaaguacaagaacgccgugaccgaccugcagcugcugaugcagagcacccccgccaccggcagcggcagcgccaucugcagcggcguggccgugugcaaggugcugcaccuggagggcgaggugaacaagaucaagagcgcccugcugagcaccaacaaggccguggugagccugagcaacggcgugagcgugcugaccuucaaggugcuggaccugaagaacuacaucgacaagcagcugcugcccauccugaacaagcagagcugcagcauccccaacaucgagaccgugaucgaguuccagcagaagaacaacagacugcuggagaucaccagagaguucagcgugaacgccggcgugaccacccccgugagcaccuacaugcugaccaacagcgagcugcugagccugaucaacgacaugcccaucaccaacgaccagaagaagcugaugagcaacaacgugcagaucgugagacagcagagcuacagcaucaugugcaucaucaaggaggaggugcuggccuacguggugcagcugccccuguacggcgugaucgacacccccugcuggaagcugcacaccagcccccugugcaccaccaacaccaaggagggcagcaacaucugccugaccagaaccgacagaggcugguacugcgacaacgccggcagcgugagcuucuucccccaggccgagaccugcaaggugcagagcaacagaguguucugcgacaccaugaacagccugacccugcccagcgaggugaaccugugcaacguggacaucuucaaccccaaguacgacugcaagaucaugaccagcaagaccgacgugagcagcagcgugaucaccagccugggcgccaucgugagcugcuacggcaagaccaagugcaccgccagcaacaagaacagaggcaucaucaagaccuucagcaacggcugcgacuacgugagcaacaagggcguggacaccgugagcgugggcaacacccuguacugcgugaacaagcaggagggccagagccuguacgugaagggcgagcccaucaucaacuucuacgacccccugguguuccccagcgacgaguucgacgccagcaucagccaggugaacgagaagaucaaccagagccuggccuucaucagaaagagcgacgagcugcugcacaacgugaacgccggcaagagcaccaccaacaucaugaucaccaccaucaucaucgugaucaucgugauccugcugagccugaucgccgugggccugcugcuguacugcaaggccagaugaggacuaguggaagcauuuuccuggcugauuaaaagaaauuacucagcuauggucaucuguuccuguuagaaggcuaugcagcauauuauauacuaugcgcauguuaugaaaugcauaauaaaaaauuuuaaaaaaucuaaaagaucuaaaaaaaaaaaaaaaaaaaaaaaaaaaaaaaaaaaaaaaaaaaaaaaaaaaaaaaaaaaaaaaaugcaucccccccccccccccccccccccccccccccaaaggcucuuuucagagccaccagaauu

SEQ ID NO: 2909 - RNA, 1994 nt, Artificial Sequence
  mRNA product Design d-5 comprising derived and/or modified sequence from HRSV(A2)__F-del_DSCav1_mut2 (opt5)
gggagagggcgcuuggcuugcaaggacccugagcugcggcauugaagcacacccaacccaacucgacugaagucagccucacugaaccggaucugagaaucuucucucucugggcuugccagggcucuccgaaccuagcuagcauccucuucaauuccaacuagaaagcuuaccauggagcugcucauccugaaggccaacgcuauuaccacaauccuuacggccgugaccuucugcuuugcgagcggccagaauauuacagaagaguucuaccaauccaccuguucugcugucagcaaaggguaucugggagcccucagaacaggcugguacaccuccguuaucacaauugaacugucuaacaucaaggagaauaaaugcaacgggaccgacgccaaggugaaacuuaucaagcaggaacuggauaaguauaaaaaugcugugacggaccuccagcugcugaugcagagcacccccgccacaggauccggcucugcuauuuguagcggggucgccgugugcaagguucuccaccuggagggagaggugaacaaaaucaaguccgcgcuucugagcaccaauaaagccgucgugucucucuccaacggcguuagcgugcugacauuuaagguccuugaucugaagaauuacauugacaaacaacuccugccuauccugaacaagcagucuuguuccauuccgaauaucgaaaccgugauugaguuccagcagaaaaacaaucggcuccuggaaaucacgcgcgaguuuagcgugaacgcuggcgucacaacccccguuucuacauauaugcuuaccaauuccgagcugcucagccugaucaacgauaugccuauuaccaacgaccaaaagaaacuuauguccaauaacgugcagaucgugagacagcagucuuacagcauuaugugcaucauuaaggaagagguccuggccuaugugguucaacucccccuguacggggugaucgauacaccuuguuggaaacugcauacgagcccccucugcaccacaaauaccaaggaaggauccaacaucugucugacacggaccgaccgcggcugguacugcgauaaugcugggucugucuccuucuuuccucaggccgagacguguaaggugcagagcaacagaguuuucugcgacacaaugaacucucuuacccugccgagcgaagugaaucucugcaaugucgauauuuuuaaccccaaauaugacuguaagaucaugaccuccaaaacagaugugucuagcuccgucauuaccagccugggagcgaucgugucuugcuacggcaagacaaaauguacggccuccaauaagaaccgggggauuaucaagaccuucagcaauggaugcgacuauguuucuaacaaaggcguggacacagucuccgugggcaauacccuuuacuguguuaacaagcaagaggggcagagccuguaugugaaaggagagccuaucauuaacuuuuacgauccccucgucuucccuuccgacgaauuugaugcuucuaucagccaggugaaugagaagauuaaccagucccuggccuucauccgcaaaucugacgaacugcuccacaaugugaacgcuggcaagagcacaaccaauauuaugaucacgaccauuaucaucguuauuaucgucauucugcuuucccugaucgccguggggcuccugcuguauugcaaggccagaugaggacuaguggaagcauuuuccuggcugauuaaaagaaauuacucagcuauggucaucuguuccuguuagaaggcuaugcagcauauuauauacuaugcgcauguuaugaaaugcauaauaaaaaauuuuaaaaaaucuaaaagaucuaaaaaaaaaaaaaaaaaaaaaaaaaaaaaaaaaaaaaaaaaaaaaaaaaaaaaaaaaaaaaaaaugcaucccccccccccccccccccccccccccccccaaaggcucuuuucagagccaccagaauu

SEQ ID NO: 2910 - RNA, 1994 nt, Artificial Sequence
  mRNA product Design d-5 comprising derived and/or modified sequence from HRSV(A2)__F-del_DSCav1_mut2 (opt6)
gggagagggcgcuuggcuugcaaggacccugagcugcggcauugaagcacacccaacccaacucgacugaagucagccucacugaaccggaucugagaaucuucucucucugggcuugccagggcucuccgaaccuagcuagcauccucuucaauuccaacuagaaagcuuaccauggaacuccuaauacuuaaagccaaugcaauaaccacaauacuaacagcaguaacauucugcuuugcaucaggacaaaacauaacagaagaauuuuaccaaucaacauguucagcaguaagcaaaggauaccuaggagccuuacgcacagguugguacacuuccguaauaacaauagaacucucaaauauaaaagaaaacaaaugcaacggaaccgaugcaaaaguaaaacuaauaaaacaagaauuagacaaauacaaaaacgcaguaacagaccuacaauuacuuaugcaaucaacacccgcaacaggauccggcucagcaaucuguucaggaguagcaguaugcaaaguucuccaccuagaaggcgaaguaaacaaaauaaaaucagcccuauuaucuaccaauaaagcaguaguaucacuaucaaauggaguaucuguccuaaccuucaaaguacuugaccuaaaaaauuacaucgacaaacaauuacuaccaauacuuaacaaacaaucauguucaauaccaaacauugaaacaguaauagaauuucaacaaaaaaauaacagauuauuagaaauaacccgcgaauuuucaguuaacgcaggaguaacaacaccaguauccacauacauguuaacaaauucagaacucuuaucacuuauaaacgacaugcccauaacaaacgaccaaaaaaaacucaugucuaacaauguucaaauaguucgacaacaaucauacuccauaaugugcauaauaaaagaagaaguucuagcauauguuguacaacucccacucuaugguguuauagacacaccaugcuggaaacuacauacaagccccuuaugcacuacaaacacaaaagaaggcucuaauauaugucuaacccgcacagacagaggcugguauugcgauaacgcagguucaguaucauucuuuccacaagcagaaacuugcaaaguccaauccaauagagucuucugcgacacuaugaacucacucacacucccaucugaagucaauuuauguaacgucgauaucuucaacccaaaauacgacugcaaaauaaugaccucaaaaacagacguaagcucaucagucauaacuucucuaggcgcaaucgucucauguuacggcaaaacaaaauguaccgcaucaaacaaaaaucgagguauaauaaaaaccuuuucuaacggcugcgacuacguaucaaacaaaggaguagauacuguaagugucggaaacacauuauacugcgucaacaaacaagaaggacaaucccuauauguuaaaggcgaaccuaucauuaauuucuacgacccacucgucuuuccauccgacgaauuugacgcaucaauuucccaaguaaaugaaaaaauaaaccaaucccuugcauucauaagaaaaucagaugaacuauuacacaacguaaacgcaggcaaaucaacaacaaauauaaugaucacaacaauaauaaucguaauaauaguaauccuacucucacuaauagcaguaggcuuacuauuauauugcaaagccagauaaggacuaguggaagcauuuuccuggcugauuaaaagaaauuacucagcuauggucaucuguuccuguuagaaggcuaugcagcauauuauauacuaugcgcauguuaugaaaugcauaauaaaaaauuuuaaaaaaucuaaaagaucuaaaaaaaaaaaaaaaaaaaaaaaaaaaaaaaaaaaaaaaaaaaaaaaaaaaaaaaaaaaaaaaaugcaucccccccccccccccccccccccccccccccaaaggcucuuuucagagccaccagaauu

SEQ ID NO: 2911 - RNA, 1994 nt, Artificial Sequence
  mRNA product Design d-5 comprising derived and/or modified sequence from HRSV(A2)__F-del_DSCav1_mut2 (opt11)
gggagagggcgcuuggcuugcaaggacccugagcugcggcauugaagcacacccaacccaacucgacugaagucagccucacugaaccggaucugagaaucuucucucucugggcuugccagggcucuccgaaccuagcuagcauccucuucaauuccaacuagaaagcuuaccauggaacuucuuauccuaaaagcgaacgccauaaccacaauccuaacagcagucaccuucuguuucgccucaggacaaaacaucaccgaggaauuuuaccaauccacauguagcgcugucucaaaaggcuaccucggcgcccuccgaaccggcugguacacauccguaauaacgaucgaacucuccaacauaaaagaaaauaaaugcaacggcaccgacgccaaagucaaacuuaucaaacaagaacuagacaaauacaaaaacgccgucaccgaccuccagcuccucaugcaauccaccccagcaacaggcuccggaagcgcaaucugcucaggcgucgccguaugcaaaguacuccaccucgaaggagaagucaacaaaaucaaauccgcccuccuauccacaaacaaagcaguugucucacucuccaacgggguaagcguacugaccuucaaaguccuagaccucaaaaacuacaucgauaaacaacuccuuccaauccucaacaaacaaucaugcucuauccccaacaucgaaaccguaaucgaauuucaacaaaaaaacaaccgccuacuugaaaucacacgcgaauuuagcgucaacgcaggaguaacaacacccguguccacauauaugcucacgaacagcgaacuacuaucccugauuaacgacaugcccaucaccaacgaccaaaaaaaacuaaugagcaacaacguacaaaucguccgccaacaaagcuacucuauaaugugcaucaucaaggaagaaguccuagccuacgucguccaauuaccacucuacggcgucaucgacacacccugcuggaaacuccauacauccccccucugcaccaccaacaccaaagaaggguccaacauaugccucacucgcacagaccgcggcugguacugcgacaacgcuggcagcgucagcuucuucccccaggccgaaaccugcaaaguccaauccaacagagucuucugcgacaccaugaacucgcucacccuccccuccgaggucaaccucugcaacgucgacauauucaaccccaaauacgacugcaaaaucaugaccuccaaaaccgacgucagcucaucagucaucacaucccucggggccaucgucuccugcuacggcaaaaccaagugcaccgccucaaacaaaaaccgcggcauuaucaaaacauucuccaacggcugcgacuacgucuccaacaaaggcgucgacacagucuccgucgguaacacccucuacugcguaaauaaacaagaaggccaaucccucuacgucaaaggcgaacccaucaucaacuucuacgacccucucgucuuccccuccgacgaauuugacgccucaaucagccaaguuaacgaaaaaaucaaccaaucacucgccuucauccgcaaauccgacgaacuccuccacaacguuaacgccggcaaaucuaccacgaacaucaugaucaccaccauaaucaucguaauuaucguaauacuccuaucccucauagcaguaggccuccuacucuacugcaaagcccguuaaggacuaguggaagcauuuuccuggcugauuaaaagaaauuacucagcuauggucaucuguuccuguuagaaggcuaugcagcauauuauauacuaugcgcauguuaugaaaugcauaauaaaaaauuuuaaaaaaucuaaaagaucuaaaaaaaaaaaaaaaaaaaaaaaaaaaaaaaaaaaaaaaaaaaaaaaaaaaaaaaaaaaaaaaaugcaucccccccccccccccccccccccccccccccaaaggcucuuuucagagccaccagaauu

SEQ ID NO: 2912 - RNA, 1874 nt, Artificial Sequence
  mRNA product Design e-1 comprising derived and/or modified sequence from HRSV(A2)__F-del_DSCav1_mut2 (opt1)
gggagaauauaagcguuggcggagcgucgguuguagcacucugcgcgcccgcucuucugcugcuguuugucuacuuccuccugcuuccccgccgccgccgccgccaucaagcuuaccauggagcugcucauccugaaggccaacgccaucaccaccauccugacggcggugaccuucugcuucgccagcggccagaacaucaccgaggaguucuaccaguccacgugcagcgccgucuccaagggguaccucggcgcccugcggaccggcugguacaccuccgugaucaccaucgagcugagcaacaucaaggagaacaagugcaacgggaccgacgccaaggugaagcucaucaagcaggagcuggacaaguacaagaacgcggucacggaccugcagcuccugaugcaguccaccccggcaaccggcuccggcuccgccaucugcagcggcgucgccgugugcaaggugcugcaccucgagggggaggucaacaagaucaagagcgcccugcuguccaccaacaaggccguggugagccucuccaacggcgucagcgugcugaccuucaaggugcuggaccucaagaacuacaucgacaagcagcugcugcccauccugaacaagcagagcugcuccauccccaacaucgagacggugaucgaguuccagcagaagaacaaccggcuccuggagaucacccgcgaguucagcgugaacgccggggucaccacccccguguccacguacaugcugaccaacagcgagcuccugucccugaucaacgacaugccgaucaccaacgaccagaagaagcucaugagcaacaacgugcagaucguccggcagcaguccuacagcaucaugugcaucaucaaggaggaggugcuggcguacgugguccagcugccccucuacggcgugaucgacacccccugcuggaagcugcacacgagcccccugugcaccaccaacaccaaggagggguccaacaucugccucacgcgcaccgaccggggcugguacugcgacaacgccggcagcgucuccuucuucccgcaggccgagaccugcaaggugcagagcaaccgcguguucugcgacaccaugaacucccugacgcugcccagcgagguaaaccucugcaacgucgacaucuucaaccccaaguacgacugcaagaucaugaccuccaagaccgacgugagcuccagcgugaucaccucccugggggccaucgucagcugcuacggcaagacgaagugcaccgccagcaacaagaaccgggggaucaucaagaccuucuccaacggcugcgacuacgugagcaacaagggcguggacaccguguccgucgggaacacccuguacugcgugaacaagcaggagggccagagccucuacgugaagggggagcccaucaucaacuucuacgacccgcuggucuuccccuccgacgaguucgacgcgagcaucucccaggugaacgagaagaucaaccagagccuggccuucauccgcaaguccgacgagcugcuccacaacgugaacgccggcaagagcacgaccaacaucaugaucaccaccaucaucaucgucaucaucgugauccugcugucccucaucgccguggggcugcugcucuacugcaaggcccggugaggacuaguguccaccugucccuccugggcugcuggauugucucguuuuccugccaaauaaacaggaucagcgcuuuacagaucuaaaaaaaaaaaaaaaaaaaaaaaaaaaaaaaaaaaaaaaaaaaaaaaaaaaaaaaaaaaaaaaaugcaucccccccccccccccccccccccccccccccaaaggcucuuuucagagccaccagaauu

SEQ ID NO: 2913 - RNA, 1874 nt, Artificial Sequence
  mRNA product Design e-1 comprising derived and/or modified sequence from HRSV(A2)__F-del_DSCav1_mut2 (opt1)
gggagaauauaagcguuggcggagcgucgguuguagcacucugcgcgcccgcucuucugcugcuguuugucuacuuccuccugcuuccccgccgccgccgccgccaucaagcuuaccauggagcugcucauccugaaggccaacgccaucaccaccauccugacggcggugaccuucugcuucgccagcggccagaacaucaccgaggaguucuaccaguccacgugcagcgccgucuccaagggguaccucggcgcccugcgcaccgggugguacaccagcgugaucaccaucgagcuguccaacaucaaggagaacaagugcaacggcaccgacgccaaggugaagcucaucaagcaggagcuggacaaguacaagaacgcggucacggaccugcagcuccugaugcagagcacccccgccaccggguccggcagcgccaucugcuccggcguggccgugugcaagguccugcaccucgagggggaggugaacaagaucaagagcgcgcugcuguccaccaacaaggccguggucagccucuccaacggcgugagcgugcugacguucaagguccuggaccucaagaacuacaucgacaagcagcugcugccgauccucaacaagcaguccugcagcauccccaacaucgagaccgugaucgaguuccagcagaagaacaaccggcugcuggagaucacccgcgaguucuccgugaacgccggggucaccacgcccgugagcaccuacaugcucaccaacuccgagcugcugagccucaucaacgacaugcccaucaccaacgaccagaagaagcugaugagcaacaacgugcagaucguccggcagcaguccuacagcaucaugugcaucaucaaggaggaggugcuggccuacgugguccagcucccgcuguacggcgugaucgacacgcccugcuggaagcugcacaccagcccccucugcaccaccaacacgaaggagggguccaacaucugccugacccgcaccgaccggggcugguacugcgacaacgccggcuccgugagcuucuucccccaggcggagaccugcaagguccaguccaaccgcguguucugcgacacgaugaacagccugacccucccguccgaggucaaccugugcaacguggacaucuucaaccccaaguacgacugcaagaucaugaccagcaagaccgacguguccagcuccgucaucacgagccugggggccaucguguccugcuacggcaagaccaagugcaccgccagcaacaagaaccgggggaucaucaagaccuucuccaacggcugcgacuacgugagcaacaagggcgucgacacgguguccguggggaacacccucuacugcgucaacaagcaggagggccagagccuguacgugaagggggagcccaucaucaacuucuacgacccccugguguucccgagcgacgaguucgacgccuccaucagccaggucaacgagaagaucaaccagucccucgccuucauccgcaagagcgacgagcugcugcacaacgugaacgcgggcaaguccaccaccaacaucaugaucaccacgaucaucaucgugaucaucgucauccuccugagccugaucgccguggggcuccugcuguacugcaaggcccggugaggacuaguguccaccugucccuccugggcugcuggauugucucguuuuccugccaaauaaacaggaucagcgcuuuacagaucuaaaaaaaaaaaaaaaaaaaaaaaaaaaaaaaaaaaaaaaaaaaaaaaaaaaaaaaaaaaaaaaaugcaucccccccccccccccccccccccccccccccaaaggcucuuuucagagccaccagaauu

SEQ ID NO: 2914 - RNA, 1874 nt, Artificial Sequence
  mRNA product Design e-1 comprising derived and/or modified sequence from HRSV(A2)__F-del_DSCav1_mut2 (opt2)
gggagaauauaagcguuggcggagcgucgguuguagcacucugcgcgcccgcucuucugcugcuguuugucuacuuccuccugcuuccccgccgccgccgccgccaucaagcuuaccauggagcuccucauccucaaggccaacgccaucaccaccauccucaccgccgucaccuucugcuucgccuccggccagaacaucaccgaggaguucuaccaguccaccugcuccgccgucuccaagggcuaccucggcgcccuccgcaccggcugguacaccuccgucaucaccaucgagcucuccaacaucaaggagaacaagugcaacggcaccgacgccaaggucaagcucaucaagcaggagcucgacaaguacaagaacgccgucaccgaccuccagcuccucaugcaguccacccccgccaccggcuccggcuccgccaucugcuccggcgucgccgucugcaagguccuccaccucgagggcgaggucaacaagaucaaguccgcccuccucuccaccaacaaggccgucgucucccucuccaacggcgucuccguccucaccuucaagguccucgaccucaagaacuacaucgacaagcagcuccuccccauccucaacaagcaguccugcuccauccccaacaucgagaccgucaucgaguuccagcagaagaacaaccgccuccucgagaucacccgcgaguucuccgucaacgccggcgucaccacccccgucuccaccuacaugcucaccaacuccgagcuccucucccucaucaacgacaugcccaucaccaacgaccagaagaagcucauguccaacaacguccagaucguccgccagcaguccuacuccaucaugugcaucaucaaggaggagguccucgccuacgucguccagcucccccucuacggcgucaucgacacccccugcuggaagcuccacaccuccccccucugcaccaccaacaccaaggagggcuccaacaucugccucacccgcaccgaccgcggcugguacugcgacaacgccggcuccgucuccuucuucccccaggccgagaccugcaagguccaguccaaccgcgucuucugcgacaccaugaacucccucacccuccccuccgaggucaaccucugcaacgucgacaucuucaaccccaaguacgacugcaagaucaugaccuccaagaccgacgucuccuccuccgucaucaccucccucggcgccaucgucuccugcuacggcaagaccaagugcaccgccuccaacaagaaccgcggcaucaucaagaccuucuccaacggcugcgacuacgucuccaacaagggcgucgacaccgucuccgucggcaacacccucuacugcgucaacaagcaggagggccagucccucuacgucaagggcgagcccaucaucaacuucuacgacccccucgucuuccccuccgacgaguucgacgccuccaucucccaggucaacgagaagaucaaccagucccucgccuucauccgcaaguccgacgagcuccuccacaacgucaacgccggcaaguccaccaccaacaucaugaucaccaccaucaucaucgucaucaucgucauccuccucucccucaucgccgucggccuccuccucuacugcaaggcccgcugaggacuaguguccaccugucccuccugggcugcuggauugucucguuuuccugccaaauaaacaggaucagcgcuuuacagaucuaaaaaaaaaaaaaaaaaaaaaaaaaaaaaaaaaaaaaaaaaaaaaaaaaaaaaaaaaaaaaaaaugcaucccccccccccccccccccccccccccccccaaaggcucuuuucagagccaccagaauu

SEQ ID NO: 2915 - RNA, 1874 nt, Artificial Sequence
  mRNA product Design e-1 comprising derived and/or modified sequence from HRSV(A2)__F-del_DSCav1_mut2 (opt3)
gggagaauauaagcguuggcggagcgucgguuguagcacucugcgcgcccgcucuucugcugcuguuugucuacuuccuccugcuuccccgccgccgccgccgccaucaagcuuaccauggagcugcucauccuuaaggccaacgcuauuaccacaauacugacugcagugacguucugcuuugccagcggccagaauaucaccgaagaguucuaccaauccacauguucugcggucucaaaaggguauuugggagcuuuaagaacugguugguacaccaguguuauuacaaucgaacugagcaacauuaaggagaauaaaugcaacggcaccgacgccaaggugaaacuaaucaagcaggaacucgauaaguauaaaaaugcaguaacugaccugcagcuucugaugcaguccacacccgccaccgggucuggaucggcuauauguucaggcguggcagucugcaagguguugcaccucgagggugagguuaacaaaaucaagagcgcccugcugaguacgaauaaagcuguggucucccucucuaacggggugagcguauuaacuuuuaagguucuggaucuuaagaauuacauugacaaacaauugcugccuauccuaaacaagcaguccuguucaauuccaaauaucgaaaccgugauagaguuccagcagaaaaacaauaggcuccuggaaauuacacgggaguuuagugucaacgccggagugacuaccccggugagcacauauaugcuuaccaauucugagcuguugucccucaucaacgauaugcccauuacgaacgaccaaaagaaacugaugucaaauaacguccagaucguucgccagcagagcuacaguaucaugugcauuauaaaggaagagguguuagcguauguagugcaacugccucucuacggcgucaucgauacuccauguuggaaacuucauacaucuccccugugcaccacuaauacaaaggaaggcuccaacauuuguuugacccgaacggaccgugggugguacugcgauaaugcaggaagcgugucguucuuuccucaggccgagaccuguaagguucagucuaacagaguguucugcgacacaaugaacucccuaacucugccaucagaagucaaucucugcaauguggauaucuuuaaccccaaauaugacuguaagauaaugaccaguaaaacagauguaagcuccucuguuauuacuagccugggugcuaucgugucaugcuacggcaagaccaaauguacagccaguaauaagaacagggggaucauuaagaccuucuccaauggaugcgacuaugucagcaacaaaggcguggacacugucucuguggguaauacgcuuuacuguguuaacaagcaagaggggcagucacuguaugugaaaggagagccuaucauuaacuuuuacgauccauugguauucccgagugacgaauuugaugcaagcauaucccaggucaaugagaagaucaaccagucucucgcuuucauucggaaaucggacgaacuguuacacaaugugaacgccggcaagagcacaaccaauaucaugaucacuaccauuauaaucguuauuaucgugauucugcuaucccucaucgcggucggccugcuuuuguauugcaaggcccgcugaggacuaguguccaccugucccuccugggcugcuggauugucucguuuuccugccaaauaaacaggaucagcgcuuuacagaucuaaaaaaaaaaaaaaaaaaaaaaaaaaaaaaaaaaaaaaaaaaaaaaaaaaaaaaaaaaaaaaaaugcaucccccccccccccccccccccccccccccccaaaggcucuuuucagagccaccagaauu

SEQ ID NO: 2916 - RNA, 1874 nt, Artificial Sequence
  mRNA product Design e-1 comprising derived and/or modified sequence from HRSV(A2)__F-del_DSCav1_mut2 (opt4)
gggagaauauaagcguuggcggagcgucgguuguagcacucugcgcgcccgcucuucugcugcuguuugucuacuuccuccugcuuccccgccgccgccgccgccaucaagcuuaccauggagcugcugauccugaaggccaacgccaucaccaccauccugaccgccgugaccuucugcuucgccagcggccagaacaucaccgaggaguucuaccagagcaccugcagcgccgugagcaagggcuaccugggcgcccugagaaccggcugguacaccagcgugaucaccaucgagcugagcaacaucaaggagaacaagugcaacggcaccgacgccaaggugaagcugaucaagcaggagcuggacaaguacaagaacgccgugaccgaccugcagcugcugaugcagagcacccccgccaccggcagcggcagcgccaucugcagcggcguggccgugugcaaggugcugcaccuggagggcgaggugaacaagaucaagagcgcccugcugagcaccaacaaggccguggugagccugagcaacggcgugagcgugcugaccuucaaggugcuggaccugaagaacuacaucgacaagcagcugcugcccauccugaacaagcagagcugcagcauccccaacaucgagaccgugaucgaguuccagcagaagaacaacagacugcuggagaucaccagagaguucagcgugaacgccggcgugaccacccccgugagcaccuacaugcugaccaacagcgagcugcugagccugaucaacgacaugcccaucaccaacgaccagaagaagcugaugagcaacaacgugcagaucgugagacagcagagcuacagcaucaugugcaucaucaaggaggaggugcuggccuacguggugcagcugccccuguacggcgugaucgacacccccugcuggaagcugcacaccagcccccugugcaccaccaacaccaaggagggcagcaacaucugccugaccagaaccgacagaggcugguacugcgacaacgccggcagcgugagcuucuucccccaggccgagaccugcaaggugcagagcaacagaguguucugcgacaccaugaacagccugacccugcccagcgaggugaaccugugcaacguggacaucuucaaccccaaguacgacugcaagaucaugaccagcaagaccgacgugagcagcagcgugaucaccagccugggcgccaucgugagcugcuacggcaagaccaagugcaccgccagcaacaagaacagaggcaucaucaagaccuucagcaacggcugcgacuacgugagcaacaagggcguggacaccgugagcgugggcaacacccuguacugcgugaacaagcaggagggccagagccuguacgugaagggcgagcccaucaucaacuucuacgacccccugguguuccccagcgacgaguucgacgccagcaucagccaggugaacgagaagaucaaccagagccuggccuucaucagaaagagcgacgagcugcugcacaacgugaacgccggcaagagcaccaccaacaucaugaucaccaccaucaucaucgugaucaucgugauccugcugagccugaucgccgugggccugcugcuguacugcaaggccagaugaggacuaguguccaccugucccuccugggcugcuggauugucucguuuuccugccaaauaaacaggaucagcgcuuuacagaucuaaaaaaaaaaaaaaaaaaaaaaaaaaaaaaaaaaaaaaaaaaaaaaaaaaaaaaaaaaaaaaaaugcaucccccccccccccccccccccccccccccccaaaggcucuuuucagagccaccagaauu

SEQ ID NO: 2917 - RNA, 1874 nt, Artificial Sequence
  mRNA product Design e-1 comprising derived and/or modified sequence from HRSV(A2)__F-del_DSCav1_mut2 (opt5)
gggagaauauaagcguuggcggagcgucgguuguagcacucugcgcgcccgcucuucugcugcuguuugucuacuuccuccugcuuccccgccgccgccgccgccaucaagcuuaccauggagcugcucauccugaaggccaacgcuauuaccacaauccuuacggccgugaccuucugcuuugcgagcggccagaauauuacagaagaguucuaccaauccaccuguucugcugucagcaaaggguaucugggagcccucagaacaggcugguacaccuccguuaucacaauugaacugucuaacaucaaggagaauaaaugcaacgggaccgacgccaaggugaaacuuaucaagcaggaacuggauaaguauaaaaaugcugugacggaccuccagcugcugaugcagagcacccccgccacaggauccggcucugcuauuuguagcggggucgccgugugcaagguucuccaccuggagggagaggugaacaaaaucaaguccgcgcuucugagcaccaauaaagccgucgugucucucuccaacggcguuagcgugcugacauuuaagguccuugaucugaagaauuacauugacaaacaacuccugccuauccugaacaagcagucuuguuccauuccgaauaucgaaaccgugauugaguuccagcagaaaaacaaucggcuccuggaaaucacgcgcgaguuuagcgugaacgcuggcgucacaacccccguuucuacauauaugcuuaccaauuccgagcugcucagccugaucaacgauaugccuauuaccaacgaccaaaagaaacuuauguccaauaacgugcagaucgugagacagcagucuuacagcauuaugugcaucauuaaggaagagguccuggccuaugugguucaacucccccuguacggggugaucgauacaccuuguuggaaacugcauacgagcccccucugcaccacaaauaccaaggaaggauccaacaucugucugacacggaccgaccgcggcugguacugcgauaaugcugggucugucuccuucuuuccucaggccgagacguguaaggugcagagcaacagaguuuucugcgacacaaugaacucucuuacccugccgagcgaagugaaucucugcaaugucgauauuuuuaaccccaaauaugacuguaagaucaugaccuccaaaacagaugugucuagcuccgucauuaccagccugggagcgaucgugucuugcuacggcaagacaaaauguacggccuccaauaagaaccgggggauuaucaagaccuucagcaauggaugcgacuauguuucuaacaaaggcguggacacagucuccgugggcaauacccuuuacuguguuaacaagcaagaggggcagagccuguaugugaaaggagagccuaucauuaacuuuuacgauccccucgucuucccuuccgacgaauuugaugcuucuaucagccaggugaaugagaagauuaaccagucccuggccuucauccgcaaaucugacgaacugcuccacaaugugaacgcuggcaagagcacaaccaauauuaugaucacgaccauuaucaucguuauuaucgucauucugcuuucccugaucgccguggggcuccugcuguauugcaaggccagaugaggacuaguguccaccugucccuccugggcugcuggauugucucguuuuccugccaaauaaacaggaucagcgcuuuacagaucuaaaaaaaaaaaaaaaaaaaaaaaaaaaaaaaaaaaaaaaaaaaaaaaaaaaaaaaaaaaaaaaaugcaucccccccccccccccccccccccccccccccaaaggcucuuuucagagccaccagaauu

SEQ ID NO: 2918 - RNA, 1874 nt, Artificial Sequence
  mRNA product Design e-1 comprising derived and/or modified sequence from HRSV(A2)__F-del_DSCav1_mut2 (opt6)
gggagaauauaagcguuggcggagcgucgguuguagcacucugcgcgcccgcucuucugcugcuguuugucuacuuccuccugcuuccccgccgccgccgccgccaucaagcuuaccauggaacuccuaauacuuaaagccaaugcaauaaccacaauacuaacagcaguaacauucugcuuugcaucaggacaaaacauaacagaagaauuuuaccaaucaacauguucagcaguaagcaaaggauaccuaggagccuuacgcacagguugguacacuuccguaauaacaauagaacucucaaauauaaaagaaaacaaaugcaacggaaccgaugcaaaaguaaaacuaauaaaacaagaauuagacaaauacaaaaacgcaguaacagaccuacaauuacuuaugcaaucaacacccgcaacaggauccggcucagcaaucuguucaggaguagcaguaugcaaaguucuccaccuagaaggcgaaguaaacaaaauaaaaucagcccuauuaucuaccaauaaagcaguaguaucacuaucaaauggaguaucuguccuaaccuucaaaguacuugaccuaaaaaauuacaucgacaaacaauuacuaccaauacuuaacaaacaaucauguucaauaccaaacauugaaacaguaauagaauuucaacaaaaaaauaacagauuauuagaaauaacccgcgaauuuucaguuaacgcaggaguaacaacaccaguauccacauacauguuaacaaauucagaacucuuaucacuuauaaacgacaugcccauaacaaacgaccaaaaaaaacucaugucuaacaauguucaaauaguucgacaacaaucauacuccauaaugugcauaauaaaagaagaaguucuagcauauguuguacaacucccacucuaugguguuauagacacaccaugcuggaaacuacauacaagccccuuaugcacuacaaacacaaaagaaggcucuaauauaugucuaacccgcacagacagaggcugguauugcgauaacgcagguucaguaucauucuuuccacaagcagaaacuugcaaaguccaauccaauagagucuucugcgacacuaugaacucacucacacucccaucugaagucaauuuauguaacgucgauaucuucaacccaaaauacgacugcaaaauaaugaccucaaaaacagacguaagcucaucagucauaacuucucuaggcgcaaucgucucauguuacggcaaaacaaaauguaccgcaucaaacaaaaaucgagguauaauaaaaaccuuuucuaacggcugcgacuacguaucaaacaaaggaguagauacuguaagugucggaaacacauuauacugcgucaacaaacaagaaggacaaucccuauauguuaaaggcgaaccuaucauuaauuucuacgacccacucgucuuuccauccgacgaauuugacgcaucaauuucccaaguaaaugaaaaaauaaaccaaucccuugcauucauaagaaaaucagaugaacuauuacacaacguaaacgcaggcaaaucaacaacaaauauaaugaucacaacaauaauaaucguaauaauaguaauccuacucucacuaauagcaguaggcuuacuauuauauugcaaagccagauaaggacuaguguccaccugucccuccugggcugcuggauugucucguuuuccugccaaauaaacaggaucagcgcuuuacagaucuaaaaaaaaaaaaaaaaaaaaaaaaaaaaaaaaaaaaaaaaaaaaaaaaaaaaaaaaaaaaaaaaugcaucccccccccccccccccccccccccccccccaaaggcucuuuucagagccaccagaauu

SEQ ID NO: 2919 - RNA, 1874 nt, Artificial Sequence
  mRNA product Design e-1 comprising derived and/or modified sequence from HRSV(A2)__F-del_DSCav1_mut2 (opt11)
gggagaauauaagcguuggcggagcgucgguuguagcacucugcgcgcccgcucuucugcugcuguuugucuacuuccuccugcuuccccgccgccgccgccgccaucaagcuuaccauggaacuucuuauccuaaaagcgaacgccauaaccacaauccuaacagcagucaccuucuguuucgccucaggacaaaacaucaccgaggaauuuuaccaauccacauguagcgcugucucaaaaggcuaccucggcgcccuccgaaccggcugguacacauccguaauaacgaucgaacucuccaacauaaaagaaaauaaaugcaacggcaccgacgccaaagucaaacuuaucaaacaagaacuagacaaauacaaaaacgccgucaccgaccuccagcuccucaugcaauccaccccagcaacaggcuccggaagcgcaaucugcucaggcgucgccguaugcaaaguacuccaccucgaaggagaagucaacaaaaucaaauccgcccuccuauccacaaacaaagcaguugucucacucuccaacgggguaagcguacugaccuucaaaguccuagaccucaaaaacuacaucgauaaacaacuccuuccaauccucaacaaacaaucaugcucuauccccaacaucgaaaccguaaucgaauuucaacaaaaaaacaaccgccuacuugaaaucacacgcgaauuuagcgucaacgcaggaguaacaacacccguguccacauauaugcucacgaacagcgaacuacuaucccugauuaacgacaugcccaucaccaacgaccaaaaaaaacuaaugagcaacaacguacaaaucguccgccaacaaagcuacucuauaaugugcaucaucaaggaagaaguccuagccuacgucguccaauuaccacucuacggcgucaucgacacacccugcuggaaacuccauacauccccccucugcaccaccaacaccaaagaaggguccaacauaugccucacucgcacagaccgcggcugguacugcgacaacgcuggcagcgucagcuucuucccccaggccgaaaccugcaaaguccaauccaacagagucuucugcgacaccaugaacucgcucacccuccccuccgaggucaaccucugcaacgucgacauauucaaccccaaauacgacugcaaaaucaugaccuccaaaaccgacgucagcucaucagucaucacaucccucggggccaucgucuccugcuacggcaaaaccaagugcaccgccucaaacaaaaaccgcggcauuaucaaaacauucuccaacggcugcgacuacgucuccaacaaaggcgucgacacagucuccgucgguaacacccucuacugcguaaauaaacaagaaggccaaucccucuacgucaaaggcgaacccaucaucaacuucuacgacccucucgucuuccccuccgacgaauuugacgccucaaucagccaaguuaacgaaaaaaucaaccaaucacucgccuucauccgcaaauccgacgaacuccuccacaacguuaacgccggcaaaucuaccacgaacaucaugaucaccaccauaaucaucguaauuaucguaauacuccuaucccucauagcaguaggccuccuacucuacugcaaagcccguuaaggacuaguguccaccugucccuccugggcugcuggauugucucguuuuccugccaaauaaacaggaucagcgcuuuacagaucuaaaaaaaaaaaaaaaaaaaaaaaaaaaaaaaaaaaaaaaaaaaaaaaaaaaaaaaaaaaaaaaaugcaucccccccccccccccccccccccccccccccaaaggcucuuuucagagccaccagaauu

SEQ ID NO: 2920 - RNA, 1856 nt, Artificial Sequence
  mRNA product Design e-2 comprising derived and/or modified sequence from HRSV(A2)__F-del_DSCav1_mut2 (opt1)
gggagacccgugacccggaaguuguacggcuacgcgacuuucccucccacaaacccucgcgcccuuccuuuccuacuugggcccggcagaaagcuuaccauggagcugcucauccugaaggccaacgccaucaccaccauccugacggcggugaccuucugcuucgccagcggccagaacaucaccgaggaguucuaccaguccacgugcagcgccgucuccaagggguaccucggcgcccugcggaccggcugguacaccuccgugaucaccaucgagcugagcaacaucaaggagaacaagugcaacgggaccgacgccaaggugaagcucaucaagcaggagcuggacaaguacaagaacgcggucacggaccugcagcuccugaugcaguccaccccggcaaccggcuccggcuccgccaucugcagcggcgucgccgugugcaaggugcugcaccucgagggggaggucaacaagaucaagagcgcccugcuguccaccaacaaggccguggugagccucuccaacggcgucagcgugcugaccuucaaggugcuggaccucaagaacuacaucgacaagcagcugcugcccauccugaacaagcagagcugcuccauccccaacaucgagacggugaucgaguuccagcagaagaacaaccggcuccuggagaucacccgcgaguucagcgugaacgccggggucaccacccccguguccacguacaugcugaccaacagcgagcuccugucccugaucaacgacaugccgaucaccaacgaccagaagaagcucaugagcaacaacgugcagaucguccggcagcaguccuacagcaucaugugcaucaucaaggaggaggugcuggcguacgugguccagcugccccucuacggcgugaucgacacccccugcuggaagcugcacacgagcccccugugcaccaccaacaccaaggagggguccaacaucugccucacgcgcaccgaccggggcugguacugcgacaacgccggcagcgucuccuucuucccgcaggccgagaccugcaaggugcagagcaaccgcguguucugcgacaccaugaacucccugacgcugcccagcgagguaaaccucugcaacgucgacaucuucaaccccaaguacgacugcaagaucaugaccuccaagaccgacgugagcuccagcgugaucaccucccugggggccaucgucagcugcuacggcaagacgaagugcaccgccagcaacaagaaccgggggaucaucaagaccuucuccaacggcugcgacuacgugagcaacaagggcguggacaccguguccgucgggaacacccuguacugcgugaacaagcaggagggccagagccucuacgugaagggggagcccaucaucaacuucuacgacccgcuggucuuccccuccgacgaguucgacgcgagcaucucccaggugaacgagaagaucaaccagagccuggccuucauccgcaaguccgacgagcugcuccacaacgugaacgccggcaagagcacgaccaacaucaugaucaccaccaucaucaucgucaucaucgugauccugcugucccucaucgccguggggcugcugcucuacugcaaggcccggugaggacuaguguccaccugucccuccugggcugcuggauugucucguuuuccugccaaauaaacaggaucagcgcuuuacagaucuaaaaaaaaaaaaaaaaaaaaaaaaaaaaaaaaaaaaaaaaaaaaaaaaaaaaaaaaaaaaaaaaugcaucccccccccccccccccccccccccccccccaaaggcucuuuucagagccaccagaauu

SEQ ID NO: 2921 - RNA, 1856 nt, Artificial Sequence
  mRNA product Design e-2 comprising derived and/or modified sequence from HRSV(A2)__F-del_DSCav1_mut2 (opt1)
gggagacccgugacccggaaguuguacggcuacgcgacuuucccucccacaaacccucgcgcccuuccuuuccuacuugggcccggcagaaagcuuaccauggagcugcucauccugaaggccaacgccaucaccaccauccugacggcggugaccuucugcuucgccagcggccagaacaucaccgaggaguucuaccaguccacgugcagcgccgucuccaagggguaccucggcgcccugcgcaccgggugguacaccagcgugaucaccaucgagcuguccaacaucaaggagaacaagugcaacggcaccgacgccaaggugaagcucaucaagcaggagcuggacaaguacaagaacgcggucacggaccugcagcuccugaugcagagcacccccgccaccggguccggcagcgccaucugcuccggcguggccgugugcaagguccugcaccucgagggggaggugaacaagaucaagagcgcgcugcuguccaccaacaaggccguggucagccucuccaacggcgugagcgugcugacguucaagguccuggaccucaagaacuacaucgacaagcagcugcugccgauccucaacaagcaguccugcagcauccccaacaucgagaccgugaucgaguuccagcagaagaacaaccggcugcuggagaucacccgcgaguucuccgugaacgccggggucaccacgcccgugagcaccuacaugcucaccaacuccgagcugcugagccucaucaacgacaugcccaucaccaacgaccagaagaagcugaugagcaacaacgugcagaucguccggcagcaguccuacagcaucaugugcaucaucaaggaggaggugcuggccuacgugguccagcucccgcuguacggcgugaucgacacgcccugcuggaagcugcacaccagcccccucugcaccaccaacacgaaggagggguccaacaucugccugacccgcaccgaccggggcugguacugcgacaacgccggcuccgugagcuucuucccccaggcggagaccugcaagguccaguccaaccgcguguucugcgacacgaugaacagccugacccucccguccgaggucaaccugugcaacguggacaucuucaaccccaaguacgacugcaagaucaugaccagcaagaccgacguguccagcuccgucaucacgagccugggggccaucguguccugcuacggcaagaccaagugcaccgccagcaacaagaaccgggggaucaucaagaccuucuccaacggcugcgacuacgugagcaacaagggcgucgacacgguguccguggggaacacccucuacugcgucaacaagcaggagggccagagccuguacgugaagggggagcccaucaucaacuucuacgacccccugguguucccgagcgacgaguucgacgccuccaucagccaggucaacgagaagaucaaccagucccucgccuucauccgcaagagcgacgagcugcugcacaacgugaacgcgggcaaguccaccaccaacaucaugaucaccacgaucaucaucgugaucaucgucauccuccugagccugaucgccguggggcuccugcuguacugcaaggcccggugaggacuaguguccaccugucccuccugggcugcuggauugucucguuuuccugccaaauaaacaggaucagcgcuuuacagaucuaaaaaaaaaaaaaaaaaaaaaaaaaaaaaaaaaaaaaaaaaaaaaaaaaaaaaaaaaaaaaaaaugcaucccccccccccccccccccccccccccccccaaaggcucuuuucagagccaccagaauu

SEQ ID NO: 2922 - RNA, 1856 nt, Artificial Sequence
  mRNA product Design e-2 comprising derived and/or modified sequence from HRSV(A2)__F-del_DSCav1_mut2 (opt2)
gggagacccgugacccggaaguuguacggcuacgcgacuuucccucccacaaacccucgcgcccuuccuuuccuacuugggcccggcagaaagcuuaccauggagcuccucauccucaaggccaacgccaucaccaccauccucaccgccgucaccuucugcuucgccuccggccagaacaucaccgaggaguucuaccaguccaccugcuccgccgucuccaagggcuaccucggcgcccuccgcaccggcugguacaccuccgucaucaccaucgagcucuccaacaucaaggagaacaagugcaacggcaccgacgccaaggucaagcucaucaagcaggagcucgacaaguacaagaacgccgucaccgaccuccagcuccucaugcaguccacccccgccaccggcuccggcuccgccaucugcuccggcgucgccgucugcaagguccuccaccucgagggcgaggucaacaagaucaaguccgcccuccucuccaccaacaaggccgucgucucccucuccaacggcgucuccguccucaccuucaagguccucgaccucaagaacuacaucgacaagcagcuccuccccauccucaacaagcaguccugcuccauccccaacaucgagaccgucaucgaguuccagcagaagaacaaccgccuccucgagaucacccgcgaguucuccgucaacgccggcgucaccacccccgucuccaccuacaugcucaccaacuccgagcuccucucccucaucaacgacaugcccaucaccaacgaccagaagaagcucauguccaacaacguccagaucguccgccagcaguccuacuccaucaugugcaucaucaaggaggagguccucgccuacgucguccagcucccccucuacggcgucaucgacacccccugcuggaagcuccacaccuccccccucugcaccaccaacaccaaggagggcuccaacaucugccucacccgcaccgaccgcggcugguacugcgacaacgccggcuccgucuccuucuucccccaggccgagaccugcaagguccaguccaaccgcgucuucugcgacaccaugaacucccucacccuccccuccgaggucaaccucugcaacgucgacaucuucaaccccaaguacgacugcaagaucaugaccuccaagaccgacgucuccuccuccgucaucaccucccucggcgccaucgucuccugcuacggcaagaccaagugcaccgccuccaacaagaaccgcggcaucaucaagaccuucuccaacggcugcgacuacgucuccaacaagggcgucgacaccgucuccgucggcaacacccucuacugcgucaacaagcaggagggccagucccucuacgucaagggcgagcccaucaucaacuucuacgacccccucgucuuccccuccgacgaguucgacgccuccaucucccaggucaacgagaagaucaaccagucccucgccuucauccgcaaguccgacgagcuccuccacaacgucaacgccggcaaguccaccaccaacaucaugaucaccaccaucaucaucgucaucaucgucauccuccucucccucaucgccgucggccuccuccucuacugcaaggcccgcugaggacuaguguccaccugucccuccugggcugcuggauugucucguuuuccugccaaauaaacaggaucagcgcuuuacagaucuaaaaaaaaaaaaaaaaaaaaaaaaaaaaaaaaaaaaaaaaaaaaaaaaaaaaaaaaaaaaaaaaugcaucccccccccccccccccccccccccccccccaaaggcucuuuucagagccaccagaauu

SEQ ID NO: 2923 - RNA, 1856 nt, Artificial Sequence
  mRNA product Design e-2 comprising derived and/or modified sequence from HRSV(A2)__F-del_DSCav1_mut2 (opt3)
gggagacccgugacccggaaguuguacggcuacgcgacuuucccucccacaaacccucgcgcccuuccuuuccuacuugggcccggcagaaagcuuaccauggagcugcucauccuuaaggccaacgcuauuaccacaauacugacugcagugacguucugcuuugccagcggccagaauaucaccgaagaguucuaccaauccacauguucugcggucucaaaaggguauuugggagcuuuaagaacugguugguacaccaguguuauuacaaucgaacugagcaacauuaaggagaauaaaugcaacggcaccgacgccaaggugaaacuaaucaagcaggaacucgauaaguauaaaaaugcaguaacugaccugcagcuucugaugcaguccacacccgccaccgggucuggaucggcuauauguucaggcguggcagucugcaagguguugcaccucgagggugagguuaacaaaaucaagagcgcccugcugaguacgaauaaagcuguggucucccucucuaacggggugagcguauuaacuuuuaagguucuggaucuuaagaauuacauugacaaacaauugcugccuauccuaaacaagcaguccuguucaauuccaaauaucgaaaccgugauagaguuccagcagaaaaacaauaggcuccuggaaauuacacgggaguuuagugucaacgccggagugacuaccccggugagcacauauaugcuuaccaauucugagcuguugucccucaucaacgauaugcccauuacgaacgaccaaaagaaacugaugucaaauaacguccagaucguucgccagcagagcuacaguaucaugugcauuauaaaggaagagguguuagcguauguagugcaacugccucucuacggcgucaucgauacuccauguuggaaacuucauacaucuccccugugcaccacuaauacaaaggaaggcuccaacauuuguuugacccgaacggaccgugggugguacugcgauaaugcaggaagcgugucguucuuuccucaggccgagaccuguaagguucagucuaacagaguguucugcgacacaaugaacucccuaacucugccaucagaagucaaucucugcaauguggauaucuuuaaccccaaauaugacuguaagauaaugaccaguaaaacagauguaagcuccucuguuauuacuagccugggugcuaucgugucaugcuacggcaagaccaaauguacagccaguaauaagaacagggggaucauuaagaccuucuccaauggaugcgacuaugucagcaacaaaggcguggacacugucucuguggguaauacgcuuuacuguguuaacaagcaagaggggcagucacuguaugugaaaggagagccuaucauuaacuuuuacgauccauugguauucccgagugacgaauuugaugcaagcauaucccaggucaaugagaagaucaaccagucucucgcuuucauucggaaaucggacgaacuguuacacaaugugaacgccggcaagagcacaaccaauaucaugaucacuaccauuauaaucguuauuaucgugauucugcuaucccucaucgcggucggccugcuuuuguauugcaaggcccgcugaggacuaguguccaccugucccuccugggcugcuggauugucucguuuuccugccaaauaaacaggaucagcgcuuuacagaucuaaaaaaaaaaaaaaaaaaaaaaaaaaaaaaaaaaaaaaaaaaaaaaaaaaaaaaaaaaaaaaaaugcaucccccccccccccccccccccccccccccccaaaggcucuuuucagagccaccagaauu

SEQ ID NO: 2924 - RNA, 1856 nt, Artificial Sequence
  mRNA product Design e-2 comprising derived and/or modified sequence from HRSV(A2)__F-del_DSCav1_mut2 (opt4)
gggagacccgugacccggaaguuguacggcuacgcgacuuucccucccacaaacccucgcgcccuuccuuuccuacuugggcccggcagaaagcuuaccauggagcugcugauccugaaggccaacgccaucaccaccauccugaccgccgugaccuucugcuucgccagcggccagaacaucaccgaggaguucuaccagagcaccugcagcgccgugagcaagggcuaccugggcgcccugagaaccggcugguacaccagcgugaucaccaucgagcugagcaacaucaaggagaacaagugcaacggcaccgacgccaaggugaagcugaucaagcaggagcuggacaaguacaagaacgccgugaccgaccugcagcugcugaugcagagcacccccgccaccggcagcggcagcgccaucugcagcggcguggccgugugcaaggugcugcaccuggagggcgaggugaacaagaucaagagcgcccugcugagcaccaacaaggccguggugagccugagcaacggcgugagcgugcugaccuucaaggugcuggaccugaagaacuacaucgacaagcagcugcugcccauccugaacaagcagagcugcagcauccccaacaucgagaccgugaucgaguuccagcagaagaacaacagacugcuggagaucaccagagaguucagcgugaacgccggcgugaccacccccgugagcaccuacaugcugaccaacagcgagcugcugagccugaucaacgacaugcccaucaccaacgaccagaagaagcugaugagcaacaacgugcagaucgugagacagcagagcuacagcaucaugugcaucaucaaggaggaggugcuggccuacguggugcagcugccccuguacggcgugaucgacacccccugcuggaagcugcacaccagcccccugugcaccaccaacaccaaggagggcagcaacaucugccugaccagaaccgacagaggcugguacugcgacaacgccggcagcgugagcuucuucccccaggccgagaccugcaaggugcagagcaacagaguguucugcgacaccaugaacagccugacccugcccagcgaggugaaccugugcaacguggacaucuucaaccccaaguacgacugcaagaucaugaccagcaagaccgacgugagcagcagcgugaucaccagccugggcgccaucgugagcugcuacggcaagaccaagugcaccgccagcaacaagaacagaggcaucaucaagaccuucagcaacggcugcgacuacgugagcaacaagggcguggacaccgugagcgugggcaacacccuguacugcgugaacaagcaggagggccagagccuguacgugaagggcgagcccaucaucaacuucuacgacccccugguguuccccagcgacgaguucgacgccagcaucagccaggugaacgagaagaucaaccagagccuggccuucaucagaaagagcgacgagcugcugcacaacgugaacgccggcaagagcaccaccaacaucaugaucaccaccaucaucaucgugaucaucgugauccugcugagccugaucgccgugggccugcugcuguacugcaaggccagaugaggacuaguguccaccugucccuccugggcugcuggauugucucguuuuccugccaaauaaacaggaucagcgcuuuacagaucuaaaaaaaaaaaaaaaaaaaaaaaaaaaaaaaaaaaaaaaaaaaaaaaaaaaaaaaaaaaaaaaaugcaucccccccccccccccccccccccccccccccaaaggcucuuuucagagccaccagaauu

SEQ ID NO: 2925 - RNA, 1856 nt, Artificial Sequence
  mRNA product Design e-2 comprising derived and/or modified sequence from HRSV(A2)__F-del_DSCav1_mut2 (opt5)
gggagacccgugacccggaaguuguacggcuacgcgacuuucccucccacaaacccucgcgcccuuccuuuccuacuugggcccggcagaaagcuuaccauggagcugcucauccugaaggccaacgcuauuaccacaauccuuacggccgugaccuucugcuuugcgagcggccagaauauuacagaagaguucuaccaauccaccuguucugcugucagcaaaggguaucugggagcccucagaacaggcugguacaccuccguuaucacaauugaacugucuaacaucaaggagaauaaaugcaacgggaccgacgccaaggugaaacuuaucaagcaggaacuggauaaguauaaaaaugcugugacggaccuccagcugcugaugcagagcacccccgccacaggauccggcucugcuauuuguagcggggucgccgugugcaagguucuccaccuggagggagaggugaacaaaaucaaguccgcgcuucugagcaccaauaaagccgucgugucucucuccaacggcguuagcgugcugacauuuaagguccuugaucugaagaauuacauugacaaacaacuccugccuauccugaacaagcagucuuguuccauuccgaauaucgaaaccgugauugaguuccagcagaaaaacaaucggcuccuggaaaucacgcgcgaguuuagcgugaacgcuggcgucacaacccccguuucuacauauaugcuuaccaauuccgagcugcucagccugaucaacgauaugccuauuaccaacgaccaaaagaaacuuauguccaauaacgugcagaucgugagacagcagucuuacagcauuaugugcaucauuaaggaagagguccuggccuaugugguucaacucccccuguacggggugaucgauacaccuuguuggaaacugcauacgagcccccucugcaccacaaauaccaaggaaggauccaacaucugucugacacggaccgaccgcggcugguacugcgauaaugcugggucugucuccuucuuuccucaggccgagacguguaaggugcagagcaacagaguuuucugcgacacaaugaacucucuuacccugccgagcgaagugaaucucugcaaugucgauauuuuuaaccccaaauaugacuguaagaucaugaccuccaaaacagaugugucuagcuccgucauuaccagccugggagcgaucgugucuugcuacggcaagacaaaauguacggccuccaauaagaaccgggggauuaucaagaccuucagcaauggaugcgacuauguuucuaacaaaggcguggacacagucuccgugggcaauacccuuuacuguguuaacaagcaagaggggcagagccuguaugugaaaggagagccuaucauuaacuuuuacgauccccucgucuucccuuccgacgaauuugaugcuucuaucagccaggugaaugagaagauuaaccagucccuggccuucauccgcaaaucugacgaacugcuccacaaugugaacgcuggcaagagcacaaccaauauuaugaucacgaccauuaucaucguuauuaucgucauucugcuuucccugaucgccguggggcuccugcuguauugcaaggccagaugaggacuaguguccaccugucccuccugggcugcuggauugucucguuuuccugccaaauaaacaggaucagcgcuuuacagaucuaaaaaaaaaaaaaaaaaaaaaaaaaaaaaaaaaaaaaaaaaaaaaaaaaaaaaaaaaaaaaaaaugcaucccccccccccccccccccccccccccccccaaaggcucuuuucagagccaccagaauu

SEQ ID NO: 2926 - RNA, 1856 nt, Artificial Sequence
  mRNA product Design e-2 comprising derived and/or modified sequence from HRSV(A2)__F-del_DSCav1_mut2 (opt6)
gggagacccgugacccggaaguuguacggcuacgcgacuuucccucccacaaacccucgcgcccuuccuuuccuacuugggcccggcagaaagcuuaccauggaacuccuaauacuuaaagccaaugcaauaaccacaauacuaacagcaguaacauucugcuuugcaucaggacaaaacauaacagaagaauuuuaccaaucaacauguucagcaguaagcaaaggauaccuaggagccuuacgcacagguugguacacuuccguaauaacaauagaacucucaaauauaaaagaaaacaaaugcaacggaaccgaugcaaaaguaaaacuaauaaaacaagaauuagacaaauacaaaaacgcaguaacagaccuacaauuacuuaugcaaucaacacccgcaacaggauccggcucagcaaucuguucaggaguagcaguaugcaaaguucuccaccuagaaggcgaaguaaacaaaauaaaaucagcccuauuaucuaccaauaaagcaguaguaucacuaucaaauggaguaucuguccuaaccuucaaaguacuugaccuaaaaaauuacaucgacaaacaauuacuaccaauacuuaacaaacaaucauguucaauaccaaacauugaaacaguaauagaauuucaacaaaaaaauaacagauuauuagaaauaacccgcgaauuuucaguuaacgcaggaguaacaacaccaguauccacauacauguuaacaaauucagaacucuuaucacuuauaaacgacaugcccauaacaaacgaccaaaaaaaacucaugucuaacaauguucaaauaguucgacaacaaucauacuccauaaugugcauaauaaaagaagaaguucuagcauauguuguacaacucccacucuaugguguuauagacacaccaugcuggaaacuacauacaagccccuuaugcacuacaaacacaaaagaaggcucuaauauaugucuaacccgcacagacagaggcugguauugcgauaacgcagguucaguaucauucuuuccacaagcagaaacuugcaaaguccaauccaauagagucuucugcgacacuaugaacucacucacacucccaucugaagucaauuuauguaacgucgauaucuucaacccaaaauacgacugcaaaauaaugaccucaaaaacagacguaagcucaucagucauaacuucucuaggcgcaaucgucucauguuacggcaaaacaaaauguaccgcaucaaacaaaaaucgagguauaauaaaaaccuuuucuaacggcugcgacuacguaucaaacaaaggaguagauacuguaagugucggaaacacauuauacugcgucaacaaacaagaaggacaaucccuauauguuaaaggcgaaccuaucauuaauuucuacgacccacucgucuuuccauccgacgaauuugacgcaucaauuucccaaguaaaugaaaaaauaaaccaaucccuugcauucauaagaaaaucagaugaacuauuacacaacguaaacgcaggcaaaucaacaacaaauauaaugaucacaacaauaauaaucguaauaauaguaauccuacucucacuaauagcaguaggcuuacuauuauauugcaaagccagauaaggacuaguguccaccugucccuccugggcugcuggauugucucguuuuccugccaaauaaacaggaucagcgcuuuacagaucuaaaaaaaaaaaaaaaaaaaaaaaaaaaaaaaaaaaaaaaaaaaaaaaaaaaaaaaaaaaaaaaaugcaucccccccccccccccccccccccccccccccaaaggcucuuuucagagccaccagaauu

SEQ ID NO: 2927 - RNA, 1856 nt, Artificial Sequence
  mRNA product Design e-2 comprising derived and/or modified sequence from HRSV(A2)__F-del_DSCav1_mut2 (opt11)
gggagacccgugacccggaaguuguacggcuacgcgacuuucccucccacaaacccucgcgcccuuccuuuccuacuugggcccggcagaaagcuuaccauggaacuucuuauccuaaaagcgaacgccauaaccacaauccuaacagcagucaccuucuguuucgccucaggacaaaacaucaccgaggaauuuuaccaauccacauguagcgcugucucaaaaggcuaccucggcgcccuccgaaccggcugguacacauccguaauaacgaucgaacucuccaacauaaaagaaaauaaaugcaacggcaccgacgccaaagucaaacuuaucaaacaagaacuagacaaauacaaaaacgccgucaccgaccuccagcuccucaugcaauccaccccagcaacaggcuccggaagcgcaaucugcucaggcgucgccguaugcaaaguacuccaccucgaaggagaagucaacaaaaucaaauccgcccuccuauccacaaacaaagcaguugucucacucuccaacgggguaagcguacugaccuucaaaguccuagaccucaaaaacuacaucgauaaacaacuccuuccaauccucaacaaacaaucaugcucuauccccaacaucgaaaccguaaucgaauuucaacaaaaaaacaaccgccuacuugaaaucacacgcgaauuuagcgucaacgcaggaguaacaacacccguguccacauauaugcucacgaacagcgaacuacuaucccugauuaacgacaugcccaucaccaacgaccaaaaaaaacuaaugagcaacaacguacaaaucguccgccaacaaagcuacucuauaaugugcaucaucaaggaagaaguccuagccuacgucguccaauuaccacucuacggcgucaucgacacacccugcuggaaacuccauacauccccccucugcaccaccaacaccaaagaaggguccaacauaugccucacucgcacagaccgcggcugguacugcgacaacgcuggcagcgucagcuucuucccccaggccgaaaccugcaaaguccaauccaacagagucuucugcgacaccaugaacucgcucacccuccccuccgaggucaaccucugcaacgucgacauauucaaccccaaauacgacugcaaaaucaugaccuccaaaaccgacgucagcucaucagucaucacaucccucggggccaucgucuccugcuacggcaaaaccaagugcaccgccucaaacaaaaaccgcggcauuaucaaaacauucuccaacggcugcgacuacgucuccaacaaaggcgucgacacagucuccgucgguaacacccucuacugcguaaauaaacaagaaggccaaucccucuacgucaaaggcgaacccaucaucaacuucuacgacccucucgucuuccccuccgacgaauuugacgccucaaucagccaaguuaacgaaaaaaucaaccaaucacucgccuucauccgcaaauccgacgaacuccuccacaacguuaacgccggcaaaucuaccacgaacaucaugaucaccaccauaaucaucguaauuaucguaauacuccuaucccucauagcaguaggccuccuacucuacugcaaagcccguuaaggacuaguguccaccugucccuccugggcugcuggauugucucguuuuccugccaaauaaacaggaucagcgcuuuacagaucuaaaaaaaaaaaaaaaaaaaaaaaaaaaaaaaaaaaaaaaaaaaaaaaaaaaaaaaaaaaaaaaaugcaucccccccccccccccccccccccccccccccaaaggcucuuuucagagccaccagaauu

SEQ ID NO: 2928 - RNA, 1826 nt, Artificial Sequence
  mRNA product Design e-3 comprising derived and/or modified sequence from HRSV(A2)__F-del_DSCav1_mut2 (opt1)
gggagacuuucccauucuguagcagaauuugguguugccuguggucuuggucccgcggagaagcuuaccauggagcugcucauccugaaggccaacgccaucaccaccauccugacggcggugaccuucugcuucgccagcggccagaacaucaccgaggaguucuaccaguccacgugcagcgccgucuccaagggguaccucggcgcccugcggaccggcugguacaccuccgugaucaccaucgagcugagcaacaucaaggagaacaagugcaacgggaccgacgccaaggugaagcucaucaagcaggagcuggacaaguacaagaacgcggucacggaccugcagcuccugaugcaguccaccccggcaaccggcuccggcuccgccaucugcagcggcgucgccgugugcaaggugcugcaccucgagggggaggucaacaagaucaagagcgcccugcuguccaccaacaaggccguggugagccucuccaacggcgucagcgugcugaccuucaaggugcuggaccucaagaacuacaucgacaagcagcugcugcccauccugaacaagcagagcugcuccauccccaacaucgagacggugaucgaguuccagcagaagaacaaccggcuccuggagaucacccgcgaguucagcgugaacgccggggucaccacccccguguccacguacaugcugaccaacagcgagcuccugucccugaucaacgacaugccgaucaccaacgaccagaagaagcucaugagcaacaacgugcagaucguccggcagcaguccuacagcaucaugugcaucaucaaggaggaggugcuggcguacgugguccagcugccccucuacggcgugaucgacacccccugcuggaagcugcacacgagcccccugugcaccaccaacaccaaggagggguccaacaucugccucacgcgcaccgaccggggcugguacugcgacaacgccggcagcgucuccuucuucccgcaggccgagaccugcaaggugcagagcaaccgcguguucugcgacaccaugaacucccugacgcugcccagcgagguaaaccucugcaacgucgacaucuucaaccccaaguacgacugcaagaucaugaccuccaagaccgacgugagcuccagcgugaucaccucccugggggccaucgucagcugcuacggcaagacgaagugcaccgccagcaacaagaaccgggggaucaucaagaccuucuccaacggcugcgacuacgugagcaacaagggcguggacaccguguccgucgggaacacccuguacugcgugaacaagcaggagggccagagccucuacgugaagggggagcccaucaucaacuucuacgacccgcuggucuuccccuccgacgaguucgacgcgagcaucucccaggugaacgagaagaucaaccagagccuggccuucauccgcaaguccgacgagcugcuccacaacgugaacgccggcaagagcacgaccaacaucaugaucaccaccaucaucaucgucaucaucgugauccugcugucccucaucgccguggggcugcugcucuacugcaaggcccggugaggacuaguguccaccugucccuccugggcugcuggauugucucguuuuccugccaaauaaacaggaucagcgcuuuacagaucuaaaaaaaaaaaaaaaaaaaaaaaaaaaaaaaaaaaaaaaaaaaaaaaaaaaaaaaaaaaaaaaaugcaucccccccccccccccccccccccccccccccaaaggcucuuuucagagccaccagaauu

SEQ ID NO: 2929 - RNA, 1826 nt, Artificial Sequence
  mRNA product Design e-3 comprising derived and/or modified sequence from HRSV(A2)__F-del_DSCav1_mut2 (opt1)
gggagacuuucccauucuguagcagaauuugguguugccuguggucuuggucccgcggagaagcuuaccauggagcugcucauccugaaggccaacgccaucaccaccauccugacggcggugaccuucugcuucgccagcggccagaacaucaccgaggaguucuaccaguccacgugcagcgccgucuccaagggguaccucggcgcccugcgcaccgggugguacaccagcgugaucaccaucgagcuguccaacaucaaggagaacaagugcaacggcaccgacgccaaggugaagcucaucaagcaggagcuggacaaguacaagaacgcggucacggaccugcagcuccugaugcagagcacccccgccaccggguccggcagcgccaucugcuccggcguggccgugugcaagguccugcaccucgagggggaggugaacaagaucaagagcgcgcugcuguccaccaacaaggccguggucagccucuccaacggcgugagcgugcugacguucaagguccuggaccucaagaacuacaucgacaagcagcugcugccgauccucaacaagcaguccugcagcauccccaacaucgagaccgugaucgaguuccagcagaagaacaaccggcugcuggagaucacccgcgaguucuccgugaacgccggggucaccacgcccgugagcaccuacaugcucaccaacuccgagcugcugagccucaucaacgacaugcccaucaccaacgaccagaagaagcugaugagcaacaacgugcagaucguccggcagcaguccuacagcaucaugugcaucaucaaggaggaggugcuggccuacgugguccagcucccgcuguacggcgugaucgacacgcccugcuggaagcugcacaccagcccccucugcaccaccaacacgaaggagggguccaacaucugccugacccgcaccgaccggggcugguacugcgacaacgccggcuccgugagcuucuucccccaggcggagaccugcaagguccaguccaaccgcguguucugcgacacgaugaacagccugacccucccguccgaggucaaccugugcaacguggacaucuucaaccccaaguacgacugcaagaucaugaccagcaagaccgacguguccagcuccgucaucacgagccugggggccaucguguccugcuacggcaagaccaagugcaccgccagcaacaagaaccgggggaucaucaagaccuucuccaacggcugcgacuacgugagcaacaagggcgucgacacgguguccguggggaacacccucuacugcgucaacaagcaggagggccagagccuguacgugaagggggagcccaucaucaacuucuacgacccccugguguucccgagcgacgaguucgacgccuccaucagccaggucaacgagaagaucaaccagucccucgccuucauccgcaagagcgacgagcugcugcacaacgugaacgcgggcaaguccaccaccaacaucaugaucaccacgaucaucaucgugaucaucgucauccuccugagccugaucgccguggggcuccugcuguacugcaaggcccggugaggacuaguguccaccugucccuccugggcugcuggauugucucguuuuccugccaaauaaacaggaucagcgcuuuacagaucuaaaaaaaaaaaaaaaaaaaaaaaaaaaaaaaaaaaaaaaaaaaaaaaaaaaaaaaaaaaaaaaaugcaucccccccccccccccccccccccccccccccaaaggcucuuuucagagccaccagaauu

SEQ ID NO: 2930 - RNA, 1826 nt, Artificial Sequence
  mRNA product Design e-3 comprising derived and/or modified sequence from HRSV(A2)__F-del_DSCav1_mut2 (opt2)
gggagacuuucccauucuguagcagaauuugguguugccuguggucuuggucccgcggagaagcuuaccauggagcuccucauccucaaggccaacgccaucaccaccauccucaccgccgucaccuucugcuucgccuccggccagaacaucaccgaggaguucuaccaguccaccugcuccgccgucuccaagggcuaccucggcgcccuccgcaccggcugguacaccuccgucaucaccaucgagcucuccaacaucaaggagaacaagugcaacggcaccgacgccaaggucaagcucaucaagcaggagcucgacaaguacaagaacgccgucaccgaccuccagcuccucaugcaguccacccccgccaccggcuccggcuccgccaucugcuccggcgucgccgucugcaagguccuccaccucgagggcgaggucaacaagaucaaguccgcccuccucuccaccaacaaggccgucgucucccucuccaacggcgucuccguccucaccuucaagguccucgaccucaagaacuacaucgacaagcagcuccuccccauccucaacaagcaguccugcuccauccccaacaucgagaccgucaucgaguuccagcagaagaacaaccgccuccucgagaucacccgcgaguucuccgucaacgccggcgucaccacccccgucuccaccuacaugcucaccaacuccgagcuccucucccucaucaacgacaugcccaucaccaacgaccagaagaagcucauguccaacaacguccagaucguccgccagcaguccuacuccaucaugugcaucaucaaggaggagguccucgccuacgucguccagcucccccucuacggcgucaucgacacccccugcuggaagcuccacaccuccccccucugcaccaccaacaccaaggagggcuccaacaucugccucacccgcaccgaccgcggcugguacugcgacaacgccggcuccgucuccuucuucccccaggccgagaccugcaagguccaguccaaccgcgucuucugcgacaccaugaacucccucacccuccccuccgaggucaaccucugcaacgucgacaucuucaaccccaaguacgacugcaagaucaugaccuccaagaccgacgucuccuccuccgucaucaccucccucggcgccaucgucuccugcuacggcaagaccaagugcaccgccuccaacaagaaccgcggcaucaucaagaccuucuccaacggcugcgacuacgucuccaacaagggcgucgacaccgucuccgucggcaacacccucuacugcgucaacaagcaggagggccagucccucuacgucaagggcgagcccaucaucaacuucuacgacccccucgucuuccccuccgacgaguucgacgccuccaucucccaggucaacgagaagaucaaccagucccucgccuucauccgcaaguccgacgagcuccuccacaacgucaacgccggcaaguccaccaccaacaucaugaucaccaccaucaucaucgucaucaucgucauccuccucucccucaucgccgucggccuccuccucuacugcaaggcccgcugaggacuaguguccaccugucccuccugggcugcuggauugucucguuuuccugccaaauaaacaggaucagcgcuuuacagaucuaaaaaaaaaaaaaaaaaaaaaaaaaaaaaaaaaaaaaaaaaaaaaaaaaaaaaaaaaaaaaaaaugcaucccccccccccccccccccccccccccccccaaaggcucuuuucagagccaccagaauu

SEQ ID NO: 2931 - RNA, 1826 nt, Artificial Sequence
  mRNA product Design e-3 comprising derived and/or modified sequence from HRSV(A2)__F-del_DSCav1_mut2 (opt3)
gggagacuuucccauucuguagcagaauuugguguugccuguggucuuggucccgcggagaagcuuaccauggagcugcucauccuuaaggccaacgcuauuaccacaauacugacugcagugacguucugcuuugccagcggccagaauaucaccgaagaguucuaccaauccacauguucugcggucucaaaaggguauuugggagcuuuaagaacugguugguacaccaguguuauuacaaucgaacugagcaacauuaaggagaauaaaugcaacggcaccgacgccaaggugaaacuaaucaagcaggaacucgauaaguauaaaaaugcaguaacugaccugcagcuucugaugcaguccacacccgccaccgggucuggaucggcuauauguucaggcguggcagucugcaagguguugcaccucgagggugagguuaacaaaaucaagagcgcccugcugaguacgaauaaagcuguggucucccucucuaacggggugagcguauuaacuuuuaagguucuggaucuuaagaauuacauugacaaacaauugcugccuauccuaaacaagcaguccuguucaauuccaaauaucgaaaccgugauagaguuccagcagaaaaacaauaggcuccuggaaauuacacgggaguuuagugucaacgccggagugacuaccccggugagcacauauaugcuuaccaauucugagcuguugucccucaucaacgauaugcccauuacgaacgaccaaaagaaacugaugucaaauaacguccagaucguucgccagcagagcuacaguaucaugugcauuauaaaggaagagguguuagcguauguagugcaacugccucucuacggcgucaucgauacuccauguuggaaacuucauacaucuccccugugcaccacuaauacaaaggaaggcuccaacauuuguuugacccgaacggaccgugggugguacugcgauaaugcaggaagcgugucguucuuuccucaggccgagaccuguaagguucagucuaacagaguguucugcgacacaaugaacucccuaacucugccaucagaagucaaucucugcaauguggauaucuuuaaccccaaauaugacuguaagauaaugaccaguaaaacagauguaagcuccucuguuauuacuagccugggugcuaucgugucaugcuacggcaagaccaaauguacagccaguaauaagaacagggggaucauuaagaccuucuccaauggaugcgacuaugucagcaacaaaggcguggacacugucucuguggguaauacgcuuuacuguguuaacaagcaagaggggcagucacuguaugugaaaggagagccuaucauuaacuuuuacgauccauugguauucccgagugacgaauuugaugcaagcauaucccaggucaaugagaagaucaaccagucucucgcuuucauucggaaaucggacgaacuguuacacaaugugaacgccggcaagagcacaaccaauaucaugaucacuaccauuauaaucguuauuaucgugauucugcuaucccucaucgcggucggccugcuuuuguauugcaaggcccgcugaggacuaguguccaccugucccuccugggcugcuggauugucucguuuuccugccaaauaaacaggaucagcgcuuuacagaucuaaaaaaaaaaaaaaaaaaaaaaaaaaaaaaaaaaaaaaaaaaaaaaaaaaaaaaaaaaaaaaaaugcaucccccccccccccccccccccccccccccccaaaggcucuuuucagagccaccagaauu

SEQ ID NO: 2932 - RNA, 1826 nt, Artificial Sequence
  mRNA product Design e-3 comprising derived and/or modified sequence from HRSV(A2)__F-del_DSCav1_mut2 (opt4)
gggagacuuucccauucuguagcagaauuugguguugccuguggucuuggucccgcggagaagcuuaccauggagcugcugauccugaaggccaacgccaucaccaccauccugaccgccgugaccuucugcuucgccagcggccagaacaucaccgaggaguucuaccagagcaccugcagcgccgugagcaagggcuaccugggcgcccugagaaccggcugguacaccagcgugaucaccaucgagcugagcaacaucaaggagaacaagugcaacggcaccgacgccaaggugaagcugaucaagcaggagcuggacaaguacaagaacgccgugaccgaccugcagcugcugaugcagagcacccccgccaccggcagcggcagcgccaucugcagcggcguggccgugugcaaggugcugcaccuggagggcgaggugaacaagaucaagagcgcccugcugagcaccaacaaggccguggugagccugagcaacggcgugagcgugcugaccuucaaggugcuggaccugaagaacuacaucgacaagcagcugcugcccauccugaacaagcagagcugcagcauccccaacaucgagaccgugaucgaguuccagcagaagaacaacagacugcuggagaucaccagagaguucagcgugaacgccggcgugaccacccccgugagcaccuacaugcugaccaacagcgagcugcugagccugaucaacgacaugcccaucaccaacgaccagaagaagcugaugagcaacaacgugcagaucgugagacagcagagcuacagcaucaugugcaucaucaaggaggaggugcuggccuacguggugcagcugccccuguacggcgugaucgacacccccugcuggaagcugcacaccagcccccugugcaccaccaacaccaaggagggcagcaacaucugccugaccagaaccgacagaggcugguacugcgacaacgccggcagcgugagcuucuucccccaggccgagaccugcaaggugcagagcaacagaguguucugcgacaccaugaacagccugacccugcccagcgaggugaaccugugcaacguggacaucuucaaccccaaguacgacugcaagaucaugaccagcaagaccgacgugagcagcagcgugaucaccagccugggcgccaucgugagcugcuacggcaagaccaagugcaccgccagcaacaagaacagaggcaucaucaagaccuucagcaacggcugcgacuacgugagcaacaagggcguggacaccgugagcgugggcaacacccuguacugcgugaacaagcaggagggccagagccuguacgugaagggcgagcccaucaucaacuucuacgacccccugguguuccccagcgacgaguucgacgccagcaucagccaggugaacgagaagaucaaccagagccuggccuucaucagaaagagcgacgagcugcugcacaacgugaacgccggcaagagcaccaccaacaucaugaucaccaccaucaucaucgugaucaucgugauccugcugagccugaucgccgugggccugcugcuguacugcaaggccagaugaggacuaguguccaccugucccuccugggcugcuggauugucucguuuuccugccaaauaaacaggaucagcgcuuuacagaucuaaaaaaaaaaaaaaaaaaaaaaaaaaaaaaaaaaaaaaaaaaaaaaaaaaaaaaaaaaaaaaaaugcaucccccccccccccccccccccccccccccccaaaggcucuuuucagagccaccagaauu

SEQ ID NO: 2933 - RNA, 1826 nt, Artificial Sequence
  mRNA product Design e-3 comprising derived and/or modified sequence from HRSV(A2)__F-del_DSCav1_mut2 (opt5)
gggagacuuucccauucuguagcagaauuugguguugccuguggucuuggucccgcggagaagcuuaccauggagcugcucauccugaaggccaacgcuauuaccacaauccuuacggccgugaccuucugcuuugcgagcggccagaauauuacagaagaguucuaccaauccaccuguucugcugucagcaaaggguaucugggagcccucagaacaggcugguacaccuccguuaucacaauugaacugucuaacaucaaggagaauaaaugcaacgggaccgacgccaaggugaaacuuaucaagcaggaacuggauaaguauaaaaaugcugugacggaccuccagcugcugaugcagagcacccccgccacaggauccggcucugcuauuuguagcggggucgccgugugcaagguucuccaccuggagggagaggugaacaaaaucaaguccgcgcuucugagcaccaauaaagccgucgugucucucuccaacggcguuagcgugcugacauuuaagguccuugaucugaagaauuacauugacaaacaacuccugccuauccugaacaagcagucuuguuccauuccgaauaucgaaaccgugauugaguuccagcagaaaaacaaucggcuccuggaaaucacgcgcgaguuuagcgugaacgcuggcgucacaacccccguuucuacauauaugcuuaccaauuccgagcugcucagccugaucaacgauaugccuauuaccaacgaccaaaagaaacuuauguccaauaacgugcagaucgugagacagcagucuuacagcauuaugugcaucauuaaggaagagguccuggccuaugugguucaacucccccuguacggggugaucgauacaccuuguuggaaacugcauacgagcccccucugcaccacaaauaccaaggaaggauccaacaucugucugacacggaccgaccgcggcugguacugcgauaaugcugggucugucuccuucuuuccucaggccgagacguguaaggugcagagcaacagaguuuucugcgacacaaugaacucucuuacccugccgagcgaagugaaucucugcaaugucgauauuuuuaaccccaaauaugacuguaagaucaugaccuccaaaacagaugugucuagcuccgucauuaccagccugggagcgaucgugucuugcuacggcaagacaaaauguacggccuccaauaagaaccgggggauuaucaagaccuucagcaauggaugcgacuauguuucuaacaaaggcguggacacagucuccgugggcaauacccuuuacuguguuaacaagcaagaggggcagagccuguaugugaaaggagagccuaucauuaacuuuuacgauccccucgucuucccuuccgacgaauuugaugcuucuaucagccaggugaaugagaagauuaaccagucccuggccuucauccgcaaaucugacgaacugcuccacaaugugaacgcuggcaagagcacaaccaauauuaugaucacgaccauuaucaucguuauuaucgucauucugcuuucccugaucgccguggggcuccugcuguauugcaaggccagaugaggacuaguguccaccugucccuccugggcugcuggauugucucguuuuccugccaaauaaacaggaucagcgcuuuacagaucuaaaaaaaaaaaaaaaaaaaaaaaaaaaaaaaaaaaaaaaaaaaaaaaaaaaaaaaaaaaaaaaaugcaucccccccccccccccccccccccccccccccaaaggcucuuuucagagccaccagaauu

SEQ ID NO: 2934 - RNA, 1826 nt, Artificial Sequence
  mRNA product Design e-3 comprising derived and/or modified sequence from HRSV(A2)__F-del_DSCav1_mut2 (opt6)
gggagacuuucccauucuguagcagaauuugguguugccuguggucuuggucccgcggagaagcuuaccauggaacuccuaauacuuaaagccaaugcaauaaccacaauacuaacagcaguaacauucugcuuugcaucaggacaaaacauaacagaagaauuuuaccaaucaacauguucagcaguaagcaaaggauaccuaggagccuuacgcacagguugguacacuuccguaauaacaauagaacucucaaauauaaaagaaaacaaaugcaacggaaccgaugcaaaaguaaaacuaauaaaacaagaauuagacaaauacaaaaacgcaguaacagaccuacaauuacuuaugcaaucaacacccgcaacaggauccggcucagcaaucuguucaggaguagcaguaugcaaaguucuccaccuagaaggcgaaguaaacaaaauaaaaucagcccuauuaucuaccaauaaagcaguaguaucacuaucaaauggaguaucuguccuaaccuucaaaguacuugaccuaaaaaauuacaucgacaaacaauuacuaccaauacuuaacaaacaaucauguucaauaccaaacauugaaacaguaauagaauuucaacaaaaaaauaacagauuauuagaaauaacccgcgaauuuucaguuaacgcaggaguaacaacaccaguauccacauacauguuaacaaauucagaacucuuaucacuuauaaacgacaugcccauaacaaacgaccaaaaaaaacucaugucuaacaauguucaaauaguucgacaacaaucauacuccauaaugugcauaauaaaagaagaaguucuagcauauguuguacaacucccacucuaugguguuauagacacaccaugcuggaaacuacauacaagccccuuaugcacuacaaacacaaaagaaggcucuaauauaugucuaacccgcacagacagaggcugguauugcgauaacgcagguucaguaucauucuuuccacaagcagaaacuugcaaaguccaauccaauagagucuucugcgacacuaugaacucacucacacucccaucugaagucaauuuauguaacgucgauaucuucaacccaaaauacgacugcaaaauaaugaccucaaaaacagacguaagcucaucagucauaacuucucuaggcgcaaucgucucauguuacggcaaaacaaaauguaccgcaucaaacaaaaaucgagguauaauaaaaaccuuuucuaacggcugcgacuacguaucaaacaaaggaguagauacuguaagugucggaaacacauuauacugcgucaacaaacaagaaggacaaucccuauauguuaaaggcgaaccuaucauuaauuucuacgacccacucgucuuuccauccgacgaauuugacgcaucaauuucccaaguaaaugaaaaaauaaaccaaucccuugcauucauaagaaaaucagaugaacuauuacacaacguaaacgcaggcaaaucaacaacaaauauaaugaucacaacaauaauaaucguaauaauaguaauccuacucucacuaauagcaguaggcuuacuauuauauugcaaagccagauaaggacuaguguccaccugucccuccugggcugcuggauugucucguuuuccugccaaauaaacaggaucagcgcuuuacagaucuaaaaaaaaaaaaaaaaaaaaaaaaaaaaaaaaaaaaaaaaaaaaaaaaaaaaaaaaaaaaaaaaugcaucccccccccccccccccccccccccccccccaaaggcucuuuucagagccaccagaauu

SEQ ID NO: 2935 - RNA, 1826 nt, Artificial Sequence
  mRNA product Design e-3 comprising derived and/or modified sequence from HRSV(A2)__F-del_DSCav1_mut2 (opt11)
gggagacuuucccauucuguagcagaauuugguguugccuguggucuuggucccgcggagaagcuuaccauggaacuucuuauccuaaaagcgaacgccauaaccacaauccuaacagcagucaccuucuguuucgccucaggacaaaacaucaccgaggaauuuuaccaauccacauguagcgcugucucaaaaggcuaccucggcgcccuccgaaccggcugguacacauccguaauaacgaucgaacucuccaacauaaaagaaaauaaaugcaacggcaccgacgccaaagucaaacuuaucaaacaagaacuagacaaauacaaaaacgccgucaccgaccuccagcuccucaugcaauccaccccagcaacaggcuccggaagcgcaaucugcucaggcgucgccguaugcaaaguacuccaccucgaaggagaagucaacaaaaucaaauccgcccuccuauccacaaacaaagcaguugucucacucuccaacgggguaagcguacugaccuucaaaguccuagaccucaaaaacuacaucgauaaacaacuccuuccaauccucaacaaacaaucaugcucuauccccaacaucgaaaccguaaucgaauuucaacaaaaaaacaaccgccuacuugaaaucacacgcgaauuuagcgucaacgcaggaguaacaacacccguguccacauauaugcucacgaacagcgaacuacuaucccugauuaacgacaugcccaucaccaacgaccaaaaaaaacuaaugagcaacaacguacaaaucguccgccaacaaagcuacucuauaaugugcaucaucaaggaagaaguccuagccuacgucguccaauuaccacucuacggcgucaucgacacacccugcuggaaacuccauacauccccccucugcaccaccaacaccaaagaaggguccaacauaugccucacucgcacagaccgcggcugguacugcgacaacgcuggcagcgucagcuucuucccccaggccgaaaccugcaaaguccaauccaacagagucuucugcgacaccaugaacucgcucacccuccccuccgaggucaaccucugcaacgucgacauauucaaccccaaauacgacugcaaaaucaugaccuccaaaaccgacgucagcucaucagucaucacaucccucggggccaucgucuccugcuacggcaaaaccaagugcaccgccucaaacaaaaaccgcggcauuaucaaaacauucuccaacggcugcgacuacgucuccaacaaaggcgucgacacagucuccgucgguaacacccucuacugcguaaauaaacaagaaggccaaucccucuacgucaaaggcgaacccaucaucaacuucuacgacccucucgucuuccccuccgacgaauuugacgccucaaucagccaaguuaacgaaaaaaucaaccaaucacucgccuucauccgcaaauccgacgaacuccuccacaacguuaacgccggcaaaucuaccacgaacaucaugaucaccaccauaaucaucguaauuaucguaauacuccuaucccucauagcaguaggccuccuacucuacugcaaagcccguuaaggacuaguguccaccugucccuccugggcugcuggauugucucguuuuccugccaaauaaacaggaucagcgcuuuacagaucuaaaaaaaaaaaaaaaaaaaaaaaaaaaaaaaaaaaaaaaaaaaaaaaaaaaaaaaaaaaaaaaaugcaucccccccccccccccccccccccccccccccaaaggcucuuuucagagccaccagaauu

SEQ ID NO: 2936 - RNA, 1880 nt, Artificial Sequence
  mRNA product Design e-4 comprising derived and/or modified sequence from HRSV(A2)__F-del_DSCav1_mut2 (opt1)
gggagacuccugucgggcggaaguaggaggaguagaguuuaaaaacaguacucuuuuuccgguucgggacguaguugaagcaacgacaagccggauaaccgcucuugagacaggaagcuuaccauggagcugcucauccugaaggccaacgccaucaccaccauccugacggcggugaccuucugcuucgccagcggccagaacaucaccgaggaguucuaccaguccacgugcagcgccgucuccaagggguaccucggcgcccugcggaccggcugguacaccuccgugaucaccaucgagcugagcaacaucaaggagaacaagugcaacgggaccgacgccaaggugaagcucaucaagcaggagcuggacaaguacaagaacgcggucacggaccugcagcuccugaugcaguccaccccggcaaccggcuccggcuccgccaucugcagcggcgucgccgugugcaaggugcugcaccucgagggggaggucaacaagaucaagagcgcccugcuguccaccaacaaggccguggugagccucuccaacggcgucagcgugcugaccuucaaggugcuggaccucaagaacuacaucgacaagcagcugcugcccauccugaacaagcagagcugcuccauccccaacaucgagacggugaucgaguuccagcagaagaacaaccggcuccuggagaucacccgcgaguucagcgugaacgccggggucaccacccccguguccacguacaugcugaccaacagcgagcuccugucccugaucaacgacaugccgaucaccaacgaccagaagaagcucaugagcaacaacgugcagaucguccggcagcaguccuacagcaucaugugcaucaucaaggaggaggugcuggcguacgugguccagcugccccucuacggcgugaucgacacccccugcuggaagcugcacacgagcccccugugcaccaccaacaccaaggagggguccaacaucugccucacgcgcaccgaccggggcugguacugcgacaacgccggcagcgucuccuucuucccgcaggccgagaccugcaaggugcagagcaaccgcguguucugcgacaccaugaacucccugacgcugcccagcgagguaaaccucugcaacgucgacaucuucaaccccaaguacgacugcaagaucaugaccuccaagaccgacgugagcuccagcgugaucaccucccugggggccaucgucagcugcuacggcaagacgaagugcaccgccagcaacaagaaccgggggaucaucaagaccuucuccaacggcugcgacuacgugagcaacaagggcguggacaccguguccgucgggaacacccuguacugcgugaacaagcaggagggccagagccucuacgugaagggggagcccaucaucaacuucuacgacccgcuggucuuccccuccgacgaguucgacgcgagcaucucccaggugaacgagaagaucaaccagagccuggccuucauccgcaaguccgacgagcugcuccacaacgugaacgccggcaagagcacgaccaacaucaugaucaccaccaucaucaucgucaucaucgugauccugcugucccucaucgccguggggcugcugcucuacugcaaggcccggugaggacuaguguccaccugucccuccugggcugcuggauugucucguuuuccugccaaauaaacaggaucagcgcuuuacagaucuaaaaaaaaaaaaaaaaaaaaaaaaaaaaaaaaaaaaaaaaaaaaaaaaaaaaaaaaaaaaaaaaugcaucccccccccccccccccccccccccccccccaaaggcucuuuucagagccaccagaauu

SEQ ID NO: 2937 - RNA, 1880 nt, Artificial Sequence
  mRNA product Design e-4 comprising derived and/or modified sequence from HRSV(A2)__F-del_DSCav1_mut2 (opt1)
gggagacuccugucgggcggaaguaggaggaguagaguuuaaaaacaguacucuuuuuccgguucgggacguaguugaagcaacgacaagccggauaaccgcucuugagacaggaagcuuaccauggagcugcucauccugaaggccaacgccaucaccaccauccugacggcggugaccuucugcuucgccagcggccagaacaucaccgaggaguucuaccaguccacgugcagcgccgucuccaagggguaccucggcgcccugcgcaccgggugguacaccagcgugaucaccaucgagcuguccaacaucaaggagaacaagugcaacggcaccgacgccaaggugaagcucaucaagcaggagcuggacaaguacaagaacgcggucacggaccugcagcuccugaugcagagcacccccgccaccggguccggcagcgccaucugcuccggcguggccgugugcaagguccugcaccucgagggggaggugaacaagaucaagagcgcgcugcuguccaccaacaaggccguggucagccucuccaacggcgugagcgugcugacguucaagguccuggaccucaagaacuacaucgacaagcagcugcugccgauccucaacaagcaguccugcagcauccccaacaucgagaccgugaucgaguuccagcagaagaacaaccggcugcuggagaucacccgcgaguucuccgugaacgccggggucaccacgcccgugagcaccuacaugcucaccaacuccgagcugcugagccucaucaacgacaugcccaucaccaacgaccagaagaagcugaugagcaacaacgugcagaucguccggcagcaguccuacagcaucaugugcaucaucaaggaggaggugcuggccuacgugguccagcucccgcuguacggcgugaucgacacgcccugcuggaagcugcacaccagcccccucugcaccaccaacacgaaggagggguccaacaucugccugacccgcaccgaccggggcugguacugcgacaacgccggcuccgugagcuucuucccccaggcggagaccugcaagguccaguccaaccgcguguucugcgacacgaugaacagccugacccucccguccgaggucaaccugugcaacguggacaucuucaaccccaaguacgacugcaagaucaugaccagcaagaccgacguguccagcuccgucaucacgagccugggggccaucguguccugcuacggcaagaccaagugcaccgccagcaacaagaaccgggggaucaucaagaccuucuccaacggcugcgacuacgugagcaacaagggcgucgacacgguguccguggggaacacccucuacugcgucaacaagcaggagggccagagccuguacgugaagggggagcccaucaucaacuucuacgacccccugguguucccgagcgacgaguucgacgccuccaucagccaggucaacgagaagaucaaccagucccucgccuucauccgcaagagcgacgagcugcugcacaacgugaacgcgggcaaguccaccaccaacaucaugaucaccacgaucaucaucgugaucaucgucauccuccugagccugaucgccguggggcuccugcuguacugcaaggcccggugaggacuaguguccaccugucccuccugggcugcuggauugucucguuuuccugccaaauaaacaggaucagcgcuuuacagaucuaaaaaaaaaaaaaaaaaaaaaaaaaaaaaaaaaaaaaaaaaaaaaaaaaaaaaaaaaaaaaaaaugcaucccccccccccccccccccccccccccccccaaaggcucuuuucagagccaccagaauu

SEQ ID NO: 2938 - RNA, 1880 nt, Artificial Sequence
  mRNA product Design e-4 comprising derived and/or modified sequence from HRSV(A2)__F-del_DSCav1_mut2 (opt2)
gggagacuccugucgggcggaaguaggaggaguagaguuuaaaaacaguacucuuuuuccgguucgggacguaguugaagcaacgacaagccggauaaccgcucuugagacaggaagcuuaccauggagcuccucauccucaaggccaacgccaucaccaccauccucaccgccgucaccuucugcuucgccuccggccagaacaucaccgaggaguucuaccaguccaccugcuccgccgucuccaagggcuaccucggcgcccuccgcaccggcugguacaccuccgucaucaccaucgagcucuccaacaucaaggagaacaagugcaacggcaccgacgccaaggucaagcucaucaagcaggagcucgacaaguacaagaacgccgucaccgaccuccagcuccucaugcaguccacccccgccaccggcuccggcuccgccaucugcuccggcgucgccgucugcaagguccuccaccucgagggcgaggucaacaagaucaaguccgcccuccucuccaccaacaaggccgucgucucccucuccaacggcgucuccguccucaccuucaagguccucgaccucaagaacuacaucgacaagcagcuccuccccauccucaacaagcaguccugcuccauccccaacaucgagaccgucaucgaguuccagcagaagaacaaccgccuccucgagaucacccgcgaguucuccgucaacgccggcgucaccacccccgucuccaccuacaugcucaccaacuccgagcuccucucccucaucaacgacaugcccaucaccaacgaccagaagaagcucauguccaacaacguccagaucguccgccagcaguccuacuccaucaugugcaucaucaaggaggagguccucgccuacgucguccagcucccccucuacggcgucaucgacacccccugcuggaagcuccacaccuccccccucugcaccaccaacaccaaggagggcuccaacaucugccucacccgcaccgaccgcggcugguacugcgacaacgccggcuccgucuccuucuucccccaggccgagaccugcaagguccaguccaaccgcgucuucugcgacaccaugaacucccucacccuccccuccgaggucaaccucugcaacgucgacaucuucaaccccaaguacgacugcaagaucaugaccuccaagaccgacgucuccuccuccgucaucaccucccucggcgccaucgucuccugcuacggcaagaccaagugcaccgccuccaacaagaaccgcggcaucaucaagaccuucuccaacggcugcgacuacgucuccaacaagggcgucgacaccgucuccgucggcaacacccucuacugcgucaacaagcaggagggccagucccucuacgucaagggcgagcccaucaucaacuucuacgacccccucgucuuccccuccgacgaguucgacgccuccaucucccaggucaacgagaagaucaaccagucccucgccuucauccgcaaguccgacgagcuccuccacaacgucaacgccggcaaguccaccaccaacaucaugaucaccaccaucaucaucgucaucaucgucauccuccucucccucaucgccgucggccuccuccucuacugcaaggcccgcugaggacuaguguccaccugucccuccugggcugcuggauugucucguuuuccugccaaauaaacaggaucagcgcuuuacagaucuaaaaaaaaaaaaaaaaaaaaaaaaaaaaaaaaaaaaaaaaaaaaaaaaaaaaaaaaaaaaaaaaugcaucccccccccccccccccccccccccccccccaaaggcucuuuucagagccaccagaauu

SEQ ID NO: 2939 - RNA, 1880 nt, Artificial Sequence
  mRNA product Design e-4 comprising derived and/or modified sequence from HRSV(A2)__F-del_DSCav1_mut2 (opt3)
gggagacuccugucgggcggaaguaggaggaguagaguuuaaaaacaguacucuuuuuccgguucgggacguaguugaagcaacgacaagccggauaaccgcucuugagacaggaagcuuaccauggagcugcucauccuuaaggccaacgcuauuaccacaauacugacugcagugacguucugcuuugccagcggccagaauaucaccgaagaguucuaccaauccacauguucugcggucucaaaaggguauuugggagcuuuaagaacugguugguacaccaguguuauuacaaucgaacugagcaacauuaaggagaauaaaugcaacggcaccgacgccaaggugaaacuaaucaagcaggaacucgauaaguauaaaaaugcaguaacugaccugcagcuucugaugcaguccacacccgccaccgggucuggaucggcuauauguucaggcguggcagucugcaagguguugcaccucgagggugagguuaacaaaaucaagagcgcccugcugaguacgaauaaagcuguggucucccucucuaacggggugagcguauuaacuuuuaagguucuggaucuuaagaauuacauugacaaacaauugcugccuauccuaaacaagcaguccuguucaauuccaaauaucgaaaccgugauagaguuccagcagaaaaacaauaggcuccuggaaauuacacgggaguuuagugucaacgccggagugacuaccccggugagcacauauaugcuuaccaauucugagcuguugucccucaucaacgauaugcccauuacgaacgaccaaaagaaacugaugucaaauaacguccagaucguucgccagcagagcuacaguaucaugugcauuauaaaggaagagguguuagcguauguagugcaacugccucucuacggcgucaucgauacuccauguuggaaacuucauacaucuccccugugcaccacuaauacaaaggaaggcuccaacauuuguuugacccgaacggaccgugggugguacugcgauaaugcaggaagcgugucguucuuuccucaggccgagaccuguaagguucagucuaacagaguguucugcgacacaaugaacucccuaacucugccaucagaagucaaucucugcaauguggauaucuuuaaccccaaauaugacuguaagauaaugaccaguaaaacagauguaagcuccucuguuauuacuagccugggugcuaucgugucaugcuacggcaagaccaaauguacagccaguaauaagaacagggggaucauuaagaccuucuccaauggaugcgacuaugucagcaacaaaggcguggacacugucucuguggguaauacgcuuuacuguguuaacaagcaagaggggcagucacuguaugugaaaggagagccuaucauuaacuuuuacgauccauugguauucccgagugacgaauuugaugcaagcauaucccaggucaaugagaagaucaaccagucucucgcuuucauucggaaaucggacgaacuguuacacaaugugaacgccggcaagagcacaaccaauaucaugaucacuaccauuauaaucguuauuaucgugauucugcuaucccucaucgcggucggccugcuuuuguauugcaaggcccgcugaggacuaguguccaccugucccuccugggcugcuggauugucucguuuuccugccaaauaaacaggaucagcgcuuuacagaucuaaaaaaaaaaaaaaaaaaaaaaaaaaaaaaaaaaaaaaaaaaaaaaaaaaaaaaaaaaaaaaaaugcaucccccccccccccccccccccccccccccccaaaggcucuuuucagagccaccagaauu

SEQ ID NO: 2940 - RNA, 1880 nt, Artificial Sequence
  mRNA product Design e-4 comprising derived and/or modified sequence from HRSV(A2)__F-del_DSCav1_mut2 (opt4)
gggagacuccugucgggcggaaguaggaggaguagaguuuaaaaacaguacucuuuuuccgguucgggacguaguugaagcaacgacaagccggauaaccgcucuugagacaggaagcuuaccauggagcugcugauccugaaggccaacgccaucaccaccauccugaccgccgugaccuucugcuucgccagcggccagaacaucaccgaggaguucuaccagagcaccugcagcgccgugagcaagggcuaccugggcgcccugagaaccggcugguacaccagcgugaucaccaucgagcugagcaacaucaaggagaacaagugcaacggcaccgacgccaaggugaagcugaucaagcaggagcuggacaaguacaagaacgccgugaccgaccugcagcugcugaugcagagcacccccgccaccggcagcggcagcgccaucugcagcggcguggccgugugcaaggugcugcaccuggagggcgaggugaacaagaucaagagcgcccugcugagcaccaacaaggccguggugagccugagcaacggcgugagcgugcugaccuucaaggugcuggaccugaagaacuacaucgacaagcagcugcugcccauccugaacaagcagagcugcagcauccccaacaucgagaccgugaucgaguuccagcagaagaacaacagacugcuggagaucaccagagaguucagcgugaacgccggcgugaccacccccgugagcaccuacaugcugaccaacagcgagcugcugagccugaucaacgacaugcccaucaccaacgaccagaagaagcugaugagcaacaacgugcagaucgugagacagcagagcuacagcaucaugugcaucaucaaggaggaggugcuggccuacguggugcagcugccccuguacggcgugaucgacacccccugcuggaagcugcacaccagcccccugugcaccaccaacaccaaggagggcagcaacaucugccugaccagaaccgacagaggcugguacugcgacaacgccggcagcgugagcuucuucccccaggccgagaccugcaaggugcagagcaacagaguguucugcgacaccaugaacagccugacccugcccagcgaggugaaccugugcaacguggacaucuucaaccccaaguacgacugcaagaucaugaccagcaagaccgacgugagcagcagcgugaucaccagccugggcgccaucgugagcugcuacggcaagaccaagugcaccgccagcaacaagaacagaggcaucaucaagaccuucagcaacggcugcgacuacgugagcaacaagggcguggacaccgugagcgugggcaacacccuguacugcgugaacaagcaggagggccagagccuguacgugaagggcgagcccaucaucaacuucuacgacccccugguguuccccagcgacgaguucgacgccagcaucagccaggugaacgagaagaucaaccagagccuggccuucaucagaaagagcgacgagcugcugcacaacgugaacgccggcaagagcaccaccaacaucaugaucaccaccaucaucaucgugaucaucgugauccugcugagccugaucgccgugggccugcugcuguacugcaaggccagaugaggacuaguguccaccugucccuccugggcugcuggauugucucguuuuccugccaaauaaacaggaucagcgcuuuacagaucuaaaaaaaaaaaaaaaaaaaaaaaaaaaaaaaaaaaaaaaaaaaaaaaaaaaaaaaaaaaaaaaaugcaucccccccccccccccccccccccccccccccaaaggcucuuuucagagccaccagaauu

SEQ ID NO: 2941 - RNA, 1880 nt, Artificial Sequence
  mRNA product Design e-4 comprising derived and/or modified sequence from HRSV(A2)__F-del_DSCav1_mut2 (opt5)
gggagacuccugucgggcggaaguaggaggaguagaguuuaaaaacaguacucuuuuuccgguucgggacguaguugaagcaacgacaagccggauaaccgcucuugagacaggaagcuuaccauggagcugcucauccugaaggccaacgcuauuaccacaauccuuacggccgugaccuucugcuuugcgagcggccagaauauuacagaagaguucuaccaauccaccuguucugcugucagcaaaggguaucugggagcccucagaacaggcugguacaccuccguuaucacaauugaacugucuaacaucaaggagaauaaaugcaacgggaccgacgccaaggugaaacuuaucaagcaggaacuggauaaguauaaaaaugcugugacggaccuccagcugcugaugcagagcacccccgccacaggauccggcucugcuauuuguagcggggucgccgugugcaagguucuccaccuggagggagaggugaacaaaaucaaguccgcgcuucugagcaccaauaaagccgucgugucucucuccaacggcguuagcgugcugacauuuaagguccuugaucugaagaauuacauugacaaacaacuccugccuauccugaacaagcagucuuguuccauuccgaauaucgaaaccgugauugaguuccagcagaaaaacaaucggcuccuggaaaucacgcgcgaguuuagcgugaacgcuggcgucacaacccccguuucuacauauaugcuuaccaauuccgagcugcucagccugaucaacgauaugccuauuaccaacgaccaaaagaaacuuauguccaauaacgugcagaucgugagacagcagucuuacagcauuaugugcaucauuaaggaagagguccuggccuaugugguucaacucccccuguacggggugaucgauacaccuuguuggaaacugcauacgagcccccucugcaccacaaauaccaaggaaggauccaacaucugucugacacggaccgaccgcggcugguacugcgauaaugcugggucugucuccuucuuuccucaggccgagacguguaaggugcagagcaacagaguuuucugcgacacaaugaacucucuuacccugccgagcgaagugaaucucugcaaugucgauauuuuuaaccccaaauaugacuguaagaucaugaccuccaaaacagaugugucuagcuccgucauuaccagccugggagcgaucgugucuugcuacggcaagacaaaauguacggccuccaauaagaaccgggggauuaucaagaccuucagcaauggaugcgacuauguuucuaacaaaggcguggacacagucuccgugggcaauacccuuuacuguguuaacaagcaagaggggcagagccuguaugugaaaggagagccuaucauuaacuuuuacgauccccucgucuucccuuccgacgaauuugaugcuucuaucagccaggugaaugagaagauuaaccagucccuggccuucauccgcaaaucugacgaacugcuccacaaugugaacgcuggcaagagcacaaccaauauuaugaucacgaccauuaucaucguuauuaucgucauucugcuuucccugaucgccguggggcuccugcuguauugcaaggccagaugaggacuaguguccaccugucccuccugggcugcuggauugucucguuuuccugccaaauaaacaggaucagcgcuuuacagaucuaaaaaaaaaaaaaaaaaaaaaaaaaaaaaaaaaaaaaaaaaaaaaaaaaaaaaaaaaaaaaaaaugcaucccccccccccccccccccccccccccccccaaaggcucuuuucagagccaccagaauu

SEQ ID NO: 2942 - RNA, 1880 nt, Artificial Sequence
  mRNA product Design e-4 comprising derived and/or modified sequence from HRSV(A2)__F-del_DSCav1_mut2 (opt6)
gggagacuccugucgggcggaaguaggaggaguagaguuuaaaaacaguacucuuuuuccgguucgggacguaguugaagcaacgacaagccggauaaccgcucuugagacaggaagcuuaccauggaacuccuaauacuuaaagccaaugcaauaaccacaauacuaacagcaguaacauucugcuuugcaucaggacaaaacauaacagaagaauuuuaccaaucaacauguucagcaguaagcaaaggauaccuaggagccuuacgcacagguugguacacuuccguaauaacaauagaacucucaaauauaaaagaaaacaaaugcaacggaaccgaugcaaaaguaaaacuaauaaaacaagaauuagacaaauacaaaaacgcaguaacagaccuacaauuacuuaugcaaucaacacccgcaacaggauccggcucagcaaucuguucaggaguagcaguaugcaaaguucuccaccuagaaggcgaaguaaacaaaauaaaaucagcccuauuaucuaccaauaaagcaguaguaucacuaucaaauggaguaucuguccuaaccuucaaaguacuugaccuaaaaaauuacaucgacaaacaauuacuaccaauacuuaacaaacaaucauguucaauaccaaacauugaaacaguaauagaauuucaacaaaaaaauaacagauuauuagaaauaacccgcgaauuuucaguuaacgcaggaguaacaacaccaguauccacauacauguuaacaaauucagaacucuuaucacuuauaaacgacaugcccauaacaaacgaccaaaaaaaacucaugucuaacaauguucaaauaguucgacaacaaucauacuccauaaugugcauaauaaaagaagaaguucuagcauauguuguacaacucccacucuaugguguuauagacacaccaugcuggaaacuacauacaagccccuuaugcacuacaaacacaaaagaaggcucuaauauaugucuaacccgcacagacagaggcugguauugcgauaacgcagguucaguaucauucuuuccacaagcagaaacuugcaaaguccaauccaauagagucuucugcgacacuaugaacucacucacacucccaucugaagucaauuuauguaacgucgauaucuucaacccaaaauacgacugcaaaauaaugaccucaaaaacagacguaagcucaucagucauaacuucucuaggcgcaaucgucucauguuacggcaaaacaaaauguaccgcaucaaacaaaaaucgagguauaauaaaaaccuuuucuaacggcugcgacuacguaucaaacaaaggaguagauacuguaagugucggaaacacauuauacugcgucaacaaacaagaaggacaaucccuauauguuaaaggcgaaccuaucauuaauuucuacgacccacucgucuuuccauccgacgaauuugacgcaucaauuucccaaguaaaugaaaaaauaaaccaaucccuugcauucauaagaaaaucagaugaacuauuacacaacguaaacgcaggcaaaucaacaacaaauauaaugaucacaacaauaauaaucguaauaauaguaauccuacucucacuaauagcaguaggcuuacuauuauauugcaaagccagauaaggacuaguguccaccugucccuccugggcugcuggauugucucguuuuccugccaaauaaacaggaucagcgcuuuacagaucuaaaaaaaaaaaaaaaaaaaaaaaaaaaaaaaaaaaaaaaaaaaaaaaaaaaaaaaaaaaaaaaaugcaucccccccccccccccccccccccccccccccaaaggcucuuuucagagccaccagaauu

SEQ ID NO: 2943 - RNA, 1880 nt, Artificial Sequence
  mRNA product Design e-4 comprising derived and/or modified sequence from HRSV(A2)__F-del_DSCav1_mut2 (opt11)
gggagacuccugucgggcggaaguaggaggaguagaguuuaaaaacaguacucuuuuuccgguucgggacguaguugaagcaacgacaagccggauaaccgcucuugagacaggaagcuuaccauggaacuucuuauccuaaaagcgaacgccauaaccacaauccuaacagcagucaccuucuguuucgccucaggacaaaacaucaccgaggaauuuuaccaauccacauguagcgcugucucaaaaggcuaccucggcgcccuccgaaccggcugguacacauccguaauaacgaucgaacucuccaacauaaaagaaaauaaaugcaacggcaccgacgccaaagucaaacuuaucaaacaagaacuagacaaauacaaaaacgccgucaccgaccuccagcuccucaugcaauccaccccagcaacaggcuccggaagcgcaaucugcucaggcgucgccguaugcaaaguacuccaccucgaaggagaagucaacaaaaucaaauccgcccuccuauccacaaacaaagcaguugucucacucuccaacgggguaagcguacugaccuucaaaguccuagaccucaaaaacuacaucgauaaacaacuccuuccaauccucaacaaacaaucaugcucuauccccaacaucgaaaccguaaucgaauuucaacaaaaaaacaaccgccuacuugaaaucacacgcgaauuuagcgucaacgcaggaguaacaacacccguguccacauauaugcucacgaacagcgaacuacuaucccugauuaacgacaugcccaucaccaacgaccaaaaaaaacuaaugagcaacaacguacaaaucguccgccaacaaagcuacucuauaaugugcaucaucaaggaagaaguccuagccuacgucguccaauuaccacucuacggcgucaucgacacacccugcuggaaacuccauacauccccccucugcaccaccaacaccaaagaaggguccaacauaugccucacucgcacagaccgcggcugguacugcgacaacgcuggcagcgucagcuucuucccccaggccgaaaccugcaaaguccaauccaacagagucuucugcgacaccaugaacucgcucacccuccccuccgaggucaaccucugcaacgucgacauauucaaccccaaauacgacugcaaaaucaugaccuccaaaaccgacgucagcucaucagucaucacaucccucggggccaucgucuccugcuacggcaaaaccaagugcaccgccucaaacaaaaaccgcggcauuaucaaaacauucuccaacggcugcgacuacgucuccaacaaaggcgucgacacagucuccgucgguaacacccucuacugcguaaauaaacaagaaggccaaucccucuacgucaaaggcgaacccaucaucaacuucuacgacccucucgucuuccccuccgacgaauuugacgccucaaucagccaaguuaacgaaaaaaucaaccaaucacucgccuucauccgcaaauccgacgaacuccuccacaacguuaacgccggcaaaucuaccacgaacaucaugaucaccaccauaaucaucguaauuaucguaauacuccuaucccucauagcaguaggccuccuacucuacugcaaagcccguuaaggacuaguguccaccugucccuccugggcugcuggauugucucguuuuccugccaaauaaacaggaucagcgcuuuacagaucuaaaaaaaaaaaaaaaaaaaaaaaaaaaaaaaaaaaaaaaaaaaaaaaaaaaaaaaaaaaaaaaaugcaucccccccccccccccccccccccccccccccaaaggcucuuuucagagccaccagaauu

SEQ ID NO: 2944 - RNA, 1847 nt, Artificial Sequence
  mRNA product Design e-5 comprising derived and/or modified sequence from HRSV(A2)__F-del_DSCav1_mut2 (opt1)
gggagagcggcucggccauuuugucccagucaguccggaggcugcggcugcagaaguaccgccugcggaguaacugcaaagaagcuuaccauggagcugcucauccugaaggccaacgccaucaccaccauccugacggcggugaccuucugcuucgccagcggccagaacaucaccgaggaguucuaccaguccacgugcagcgccgucuccaagggguaccucggcgcccugcggaccggcugguacaccuccgugaucaccaucgagcugagcaacaucaaggagaacaagugcaacgggaccgacgccaaggugaagcucaucaagcaggagcuggacaaguacaagaacgcggucacggaccugcagcuccugaugcaguccaccccggcaaccggcuccggcuccgccaucugcagcggcgucgccgugugcaaggugcugcaccucgagggggaggucaacaagaucaagagcgcccugcuguccaccaacaaggccguggugagccucuccaacggcgucagcgugcugaccuucaaggugcuggaccucaagaacuacaucgacaagcagcugcugcccauccugaacaagcagagcugcuccauccccaacaucgagacggugaucgaguuccagcagaagaacaaccggcuccuggagaucacccgcgaguucagcgugaacgccggggucaccacccccguguccacguacaugcugaccaacagcgagcuccugucccugaucaacgacaugccgaucaccaacgaccagaagaagcucaugagcaacaacgugcagaucguccggcagcaguccuacagcaucaugugcaucaucaaggaggaggugcuggcguacgugguccagcugccccucuacggcgugaucgacacccccugcuggaagcugcacacgagcccccugugcaccaccaacaccaaggagggguccaacaucugccucacgcgcaccgaccggggcugguacugcgacaacgccggcagcgucuccuucuucccgcaggccgagaccugcaaggugcagagcaaccgcguguucugcgacaccaugaacucccugacgcugcccagcgagguaaaccucugcaacgucgacaucuucaaccccaaguacgacugcaagaucaugaccuccaagaccgacgugagcuccagcgugaucaccucccugggggccaucgucagcugcuacggcaagacgaagugcaccgccagcaacaagaaccgggggaucaucaagaccuucuccaacggcugcgacuacgugagcaacaagggcguggacaccguguccgucgggaacacccuguacugcgugaacaagcaggagggccagagccucuacgugaagggggagcccaucaucaacuucuacgacccgcuggucuuccccuccgacgaguucgacgcgagcaucucccaggugaacgagaagaucaaccagagccuggccuucauccgcaaguccgacgagcugcuccacaacgugaacgccggcaagagcacgaccaacaucaugaucaccaccaucaucaucgucaucaucgugauccugcugucccucaucgccguggggcugcugcucuacugcaaggcccggugaggacuaguguccaccugucccuccugggcugcuggauugucucguuuuccugccaaauaaacaggaucagcgcuuuacagaucuaaaaaaaaaaaaaaaaaaaaaaaaaaaaaaaaaaaaaaaaaaaaaaaaaaaaaaaaaaaaaaaaugcaucccccccccccccccccccccccccccccccaaaggcucuuuucagagccaccagaauu

SEQ ID NO: 2945 - RNA, 1847 nt, Artificial Sequence
  mRNA product Design e-5 comprising derived and/or modified sequence from HRSV(A2)__F-del_DSCav1_mut2 (opt1)
gggagagcggcucggccauuuugucccagucaguccggaggcugcggcugcagaaguaccgccugcggaguaacugcaaagaagcuuaccauggagcugcucauccugaaggccaacgccaucaccaccauccugacggcggugaccuucugcuucgccagcggccagaacaucaccgaggaguucuaccaguccacgugcagcgccgucuccaagggguaccucggcgcccugcgcaccgggugguacaccagcgugaucaccaucgagcuguccaacaucaaggagaacaagugcaacggcaccgacgccaaggugaagcucaucaagcaggagcuggacaaguacaagaacgcggucacggaccugcagcuccugaugcagagcacccccgccaccggguccggcagcgccaucugcuccggcguggccgugugcaagguccugcaccucgagggggaggugaacaagaucaagagcgcgcugcuguccaccaacaaggccguggucagccucuccaacggcgugagcgugcugacguucaagguccuggaccucaagaacuacaucgacaagcagcugcugccgauccucaacaagcaguccugcagcauccccaacaucgagaccgugaucgaguuccagcagaagaacaaccggcugcuggagaucacccgcgaguucuccgugaacgccggggucaccacgcccgugagcaccuacaugcucaccaacuccgagcugcugagccucaucaacgacaugcccaucaccaacgaccagaagaagcugaugagcaacaacgugcagaucguccggcagcaguccuacagcaucaugugcaucaucaaggaggaggugcuggccuacgugguccagcucccgcuguacggcgugaucgacacgcccugcuggaagcugcacaccagcccccucugcaccaccaacacgaaggagggguccaacaucugccugacccgcaccgaccggggcugguacugcgacaacgccggcuccgugagcuucuucccccaggcggagaccugcaagguccaguccaaccgcguguucugcgacacgaugaacagccugacccucccguccgaggucaaccugugcaacguggacaucuucaaccccaaguacgacugcaagaucaugaccagcaagaccgacguguccagcuccgucaucacgagccugggggccaucguguccugcuacggcaagaccaagugcaccgccagcaacaagaaccgggggaucaucaagaccuucuccaacggcugcgacuacgugagcaacaagggcgucgacacgguguccguggggaacacccucuacugcgucaacaagcaggagggccagagccuguacgugaagggggagcccaucaucaacuucuacgacccccugguguucccgagcgacgaguucgacgccuccaucagccaggucaacgagaagaucaaccagucccucgccuucauccgcaagagcgacgagcugcugcacaacgugaacgcgggcaaguccaccaccaacaucaugaucaccacgaucaucaucgugaucaucgucauccuccugagccugaucgccguggggcuccugcuguacugcaaggcccggugaggacuaguguccaccugucccuccugggcugcuggauugucucguuuuccugccaaauaaacaggaucagcgcuuuacagaucuaaaaaaaaaaaaaaaaaaaaaaaaaaaaaaaaaaaaaaaaaaaaaaaaaaaaaaaaaaaaaaaaugcaucccccccccccccccccccccccccccccccaaaggcucuuuucagagccaccagaauu

SEQ ID NO: 2946 - RNA, 1847 nt, Artificial Sequence
  mRNA product Design e-5 comprising derived and/or modified sequence from HRSV(A2)__F-del_DSCav1_mut2 (opt2)
gggagagcggcucggccauuuugucccagucaguccggaggcugcggcugcagaaguaccgccugcggaguaacugcaaagaagcuuaccauggagcuccucauccucaaggccaacgccaucaccaccauccucaccgccgucaccuucugcuucgccuccggccagaacaucaccgaggaguucuaccaguccaccugcuccgccgucuccaagggcuaccucggcgcccuccgcaccggcugguacaccuccgucaucaccaucgagcucuccaacaucaaggagaacaagugcaacggcaccgacgccaaggucaagcucaucaagcaggagcucgacaaguacaagaacgccgucaccgaccuccagcuccucaugcaguccacccccgccaccggcuccggcuccgccaucugcuccggcgucgccgucugcaagguccuccaccucgagggcgaggucaacaagaucaaguccgcccuccucuccaccaacaaggccgucgucucccucuccaacggcgucuccguccucaccuucaagguccucgaccucaagaacuacaucgacaagcagcuccuccccauccucaacaagcaguccugcuccauccccaacaucgagaccgucaucgaguuccagcagaagaacaaccgccuccucgagaucacccgcgaguucuccgucaacgccggcgucaccacccccgucuccaccuacaugcucaccaacuccgagcuccucucccucaucaacgacaugcccaucaccaacgaccagaagaagcucauguccaacaacguccagaucguccgccagcaguccuacuccaucaugugcaucaucaaggaggagguccucgccuacgucguccagcucccccucuacggcgucaucgacacccccugcuggaagcuccacaccuccccccucugcaccaccaacaccaaggagggcuccaacaucugccucacccgcaccgaccgcggcugguacugcgacaacgccggcuccgucuccuucuucccccaggccgagaccugcaagguccaguccaaccgcgucuucugcgacaccaugaacucccucacccuccccuccgaggucaaccucugcaacgucgacaucuucaaccccaaguacgacugcaagaucaugaccuccaagaccgacgucuccuccuccgucaucaccucccucggcgccaucgucuccugcuacggcaagaccaagugcaccgccuccaacaagaaccgcggcaucaucaagaccuucuccaacggcugcgacuacgucuccaacaagggcgucgacaccgucuccgucggcaacacccucuacugcgucaacaagcaggagggccagucccucuacgucaagggcgagcccaucaucaacuucuacgacccccucgucuuccccuccgacgaguucgacgccuccaucucccaggucaacgagaagaucaaccagucccucgccuucauccgcaaguccgacgagcuccuccacaacgucaacgccggcaaguccaccaccaacaucaugaucaccaccaucaucaucgucaucaucgucauccuccucucccucaucgccgucggccuccuccucuacugcaaggcccgcugaggacuaguguccaccugucccuccugggcugcuggauugucucguuuuccugccaaauaaacaggaucagcgcuuuacagaucuaaaaaaaaaaaaaaaaaaaaaaaaaaaaaaaaaaaaaaaaaaaaaaaaaaaaaaaaaaaaaaaaugcaucccccccccccccccccccccccccccccccaaaggcucuuuucagagccaccagaauu

SEQ ID NO: 2947 - RNA, 1847 nt, Artificial Sequence
  mRNA product Design e-5 comprising derived and/or modified sequence from HRSV(A2)__F-del_DSCav1_mut2 (opt3)
gggagagcggcucggccauuuugucccagucaguccggaggcugcggcugcagaaguaccgccugcggaguaacugcaaagaagcuuaccauggagcugcucauccuuaaggccaacgcuauuaccacaauacugacugcagugacguucugcuuugccagcggccagaauaucaccgaagaguucuaccaauccacauguucugcggucucaaaaggguauuugggagcuuuaagaacugguugguacaccaguguuauuacaaucgaacugagcaacauuaaggagaauaaaugcaacggcaccgacgccaaggugaaacuaaucaagcaggaacucgauaaguauaaaaaugcaguaacugaccugcagcuucugaugcaguccacacccgccaccgggucuggaucggcuauauguucaggcguggcagucugcaagguguugcaccucgagggugagguuaacaaaaucaagagcgcccugcugaguacgaauaaagcuguggucucccucucuaacggggugagcguauuaacuuuuaagguucuggaucuuaagaauuacauugacaaacaauugcugccuauccuaaacaagcaguccuguucaauuccaaauaucgaaaccgugauagaguuccagcagaaaaacaauaggcuccuggaaauuacacgggaguuuagugucaacgccggagugacuaccccggugagcacauauaugcuuaccaauucugagcuguugucccucaucaacgauaugcccauuacgaacgaccaaaagaaacugaugucaaauaacguccagaucguucgccagcagagcuacaguaucaugugcauuauaaaggaagagguguuagcguauguagugcaacugccucucuacggcgucaucgauacuccauguuggaaacuucauacaucuccccugugcaccacuaauacaaaggaaggcuccaacauuuguuugacccgaacggaccgugggugguacugcgauaaugcaggaagcgugucguucuuuccucaggccgagaccuguaagguucagucuaacagaguguucugcgacacaaugaacucccuaacucugccaucagaagucaaucucugcaauguggauaucuuuaaccccaaauaugacuguaagauaaugaccaguaaaacagauguaagcuccucuguuauuacuagccugggugcuaucgugucaugcuacggcaagaccaaauguacagccaguaauaagaacagggggaucauuaagaccuucuccaauggaugcgacuaugucagcaacaaaggcguggacacugucucuguggguaauacgcuuuacuguguuaacaagcaagaggggcagucacuguaugugaaaggagagccuaucauuaacuuuuacgauccauugguauucccgagugacgaauuugaugcaagcauaucccaggucaaugagaagaucaaccagucucucgcuuucauucggaaaucggacgaacuguuacacaaugugaacgccggcaagagcacaaccaauaucaugaucacuaccauuauaaucguuauuaucgugauucugcuaucccucaucgcggucggccugcuuuuguauugcaaggcccgcugaggacuaguguccaccugucccuccugggcugcuggauugucucguuuuccugccaaauaaacaggaucagcgcuuuacagaucuaaaaaaaaaaaaaaaaaaaaaaaaaaaaaaaaaaaaaaaaaaaaaaaaaaaaaaaaaaaaaaaaugcaucccccccccccccccccccccccccccccccaaaggcucuuuucagagccaccagaauu

SEQ ID NO: 2948 - RNA, 1847 nt, Artificial Sequence
  mRNA product Design e-5 comprising derived and/or modified sequence from HRSV(A2)__F-del_DSCav1_mut2 (opt4)
gggagagcggcucggccauuuugucccagucaguccggaggcugcggcugcagaaguaccgccugcggaguaacugcaaagaagcuuaccauggagcugcugauccugaaggccaacgccaucaccaccauccugaccgccgugaccuucugcuucgccagcggccagaacaucaccgaggaguucuaccagagcaccugcagcgccgugagcaagggcuaccugggcgcccugagaaccggcugguacaccagcgugaucaccaucgagcugagcaacaucaaggagaacaagugcaacggcaccgacgccaaggugaagcugaucaagcaggagcuggacaaguacaagaacgccgugaccgaccugcagcugcugaugcagagcacccccgccaccggcagcggcagcgccaucugcagcggcguggccgugugcaaggugcugcaccuggagggcgaggugaacaagaucaagagcgcccugcugagcaccaacaaggccguggugagccugagcaacggcgugagcgugcugaccuucaaggugcuggaccugaagaacuacaucgacaagcagcugcugcccauccugaacaagcagagcugcagcauccccaacaucgagaccgugaucgaguuccagcagaagaacaacagacugcuggagaucaccagagaguucagcgugaacgccggcgugaccacccccgugagcaccuacaugcugaccaacagcgagcugcugagccugaucaacgacaugcccaucaccaacgaccagaagaagcugaugagcaacaacgugcagaucgugagacagcagagcuacagcaucaugugcaucaucaaggaggaggugcuggccuacguggugcagcugccccuguacggcgugaucgacacccccugcuggaagcugcacaccagcccccugugcaccaccaacaccaaggagggcagcaacaucugccugaccagaaccgacagaggcugguacugcgacaacgccggcagcgugagcuucuucccccaggccgagaccugcaaggugcagagcaacagaguguucugcgacaccaugaacagccugacccugcccagcgaggugaaccugugcaacguggacaucuucaaccccaaguacgacugcaagaucaugaccagcaagaccgacgugagcagcagcgugaucaccagccugggcgccaucgugagcugcuacggcaagaccaagugcaccgccagcaacaagaacagaggcaucaucaagaccuucagcaacggcugcgacuacgugagcaacaagggcguggacaccgugagcgugggcaacacccuguacugcgugaacaagcaggagggccagagccuguacgugaagggcgagcccaucaucaacuucuacgacccccugguguuccccagcgacgaguucgacgccagcaucagccaggugaacgagaagaucaaccagagccuggccuucaucagaaagagcgacgagcugcugcacaacgugaacgccggcaagagcaccaccaacaucaugaucaccaccaucaucaucgugaucaucgugauccugcugagccugaucgccgugggccugcugcuguacugcaaggccagaugaggacuaguguccaccugucccuccugggcugcuggauugucucguuuuccugccaaauaaacaggaucagcgcuuuacagaucuaaaaaaaaaaaaaaaaaaaaaaaaaaaaaaaaaaaaaaaaaaaaaaaaaaaaaaaaaaaaaaaaugcaucccccccccccccccccccccccccccccccaaaggcucuuuucagagccaccagaauu

SEQ ID NO: 2949 - RNA, 1847 nt, Artificial Sequence
  mRNA product Design e-5 comprising derived and/or modified sequence from HRSV(A2)__F-del_DSCav1_mut2 (opt5)
gggagagcggcucggccauuuugucccagucaguccggaggcugcggcugcagaaguaccgccugcggaguaacugcaaagaagcuuaccauggagcugcucauccugaaggccaacgcuauuaccacaauccuuacggccgugaccuucugcuuugcgagcggccagaauauuacagaagaguucuaccaauccaccuguucugcugucagcaaaggguaucugggagcccucagaacaggcugguacaccuccguuaucacaauugaacugucuaacaucaaggagaauaaaugcaacgggaccgacgccaaggugaaacuuaucaagcaggaacuggauaaguauaaaaaugcugugacggaccuccagcugcugaugcagagcacccccgccacaggauccggcucugcuauuuguagcggggucgccgugugcaagguucuccaccuggagggagaggugaacaaaaucaaguccgcgcuucugagcaccaauaaagccgucgugucucucuccaacggcguuagcgugcugacauuuaagguccuugaucugaagaauuacauugacaaacaacuccugccuauccugaacaagcagucuuguuccauuccgaauaucgaaaccgugauugaguuccagcagaaaaacaaucggcuccuggaaaucacgcgcgaguuuagcgugaacgcuggcgucacaacccccguuucuacauauaugcuuaccaauuccgagcugcucagccugaucaacgauaugccuauuaccaacgaccaaaagaaacuuauguccaauaacgugcagaucgugagacagcagucuuacagcauuaugugcaucauuaaggaagagguccuggccuaugugguucaacucccccuguacggggugaucgauacaccuuguuggaaacugcauacgagcccccucugcaccacaaauaccaaggaaggauccaacaucugucugacacggaccgaccgcggcugguacugcgauaaugcugggucugucuccuucuuuccucaggccgagacguguaaggugcagagcaacagaguuuucugcgacacaaugaacucucuuacccugccgagcgaagugaaucucugcaaugucgauauuuuuaaccccaaauaugacuguaagaucaugaccuccaaaacagaugugucuagcuccgucauuaccagccugggagcgaucgugucuugcuacggcaagacaaaauguacggccuccaauaagaaccgggggauuaucaagaccuucagcaauggaugcgacuauguuucuaacaaaggcguggacacagucuccgugggcaauacccuuuacuguguuaacaagcaagaggggcagagccuguaugugaaaggagagccuaucauuaacuuuuacgauccccucgucuucccuuccgacgaauuugaugcuucuaucagccaggugaaugagaagauuaaccagucccuggccuucauccgcaaaucugacgaacugcuccacaaugugaacgcuggcaagagcacaaccaauauuaugaucacgaccauuaucaucguuauuaucgucauucugcuuucccugaucgccguggggcuccugcuguauugcaaggccagaugaggacuaguguccaccugucccuccugggcugcuggauugucucguuuuccugccaaauaaacaggaucagcgcuuuacagaucuaaaaaaaaaaaaaaaaaaaaaaaaaaaaaaaaaaaaaaaaaaaaaaaaaaaaaaaaaaaaaaaaugcaucccccccccccccccccccccccccccccccaaaggcucuuuucagagccaccagaauu

SEQ ID NO: 2950 - RNA, 1847 nt, Artificial Sequence
  mRNA product Design e-5 comprising derived and/or modified sequence from HRSV(A2)__F-del_DSCav1_mut2 (opt6)
gggagagcggcucggccauuuugucccagucaguccggaggcugcggcugcagaaguaccgccugcggaguaacugcaaagaagcuuaccauggaacuccuaauacuuaaagccaaugcaauaaccacaauacuaacagcaguaacauucugcuuugcaucaggacaaaacauaacagaagaauuuuaccaaucaacauguucagcaguaagcaaaggauaccuaggagccuuacgcacagguugguacacuuccguaauaacaauagaacucucaaauauaaaagaaaacaaaugcaacggaaccgaugcaaaaguaaaacuaauaaaacaagaauuagacaaauacaaaaacgcaguaacagaccuacaauuacuuaugcaaucaacacccgcaacaggauccggcucagcaaucuguucaggaguagcaguaugcaaaguucuccaccuagaaggcgaaguaaacaaaauaaaaucagcccuauuaucuaccaauaaagcaguaguaucacuaucaaauggaguaucuguccuaaccuucaaaguacuugaccuaaaaaauuacaucgacaaacaauuacuaccaauacuuaacaaacaaucauguucaauaccaaacauugaaacaguaauagaauuucaacaaaaaaauaacagauuauuagaaauaacccgcgaauuuucaguuaacgcaggaguaacaacaccaguauccacauacauguuaacaaauucagaacucuuaucacuuauaaacgacaugcccauaacaaacgaccaaaaaaaacucaugucuaacaauguucaaauaguucgacaacaaucauacuccauaaugugcauaauaaaagaagaaguucuagcauauguuguacaacucccacucuaugguguuauagacacaccaugcuggaaacuacauacaagccccuuaugcacuacaaacacaaaagaaggcucuaauauaugucuaacccgcacagacagaggcugguauugcgauaacgcagguucaguaucauucuuuccacaagcagaaacuugcaaaguccaauccaauagagucuucugcgacacuaugaacucacucacacucccaucugaagucaauuuauguaacgucgauaucuucaacccaaaauacgacugcaaaauaaugaccucaaaaacagacguaagcucaucagucauaacuucucuaggcgcaaucgucucauguuacggcaaaacaaaauguaccgcaucaaacaaaaaucgagguauaauaaaaaccuuuucuaacggcugcgacuacguaucaaacaaaggaguagauacuguaagugucggaaacacauuauacugcgucaacaaacaagaaggacaaucccuauauguuaaaggcgaaccuaucauuaauuucuacgacccacucgucuuuccauccgacgaauuugacgcaucaauuucccaaguaaaugaaaaaauaaaccaaucccuugcauucauaagaaaaucagaugaacuauuacacaacguaaacgcaggcaaaucaacaacaaauauaaugaucacaacaauaauaaucguaauaauaguaauccuacucucacuaauagcaguaggcuuacuauuauauugcaaagccagauaaggacuaguguccaccugucccuccugggcugcuggauugucucguuuuccugccaaauaaacaggaucagcgcuuuacagaucuaaaaaaaaaaaaaaaaaaaaaaaaaaaaaaaaaaaaaaaaaaaaaaaaaaaaaaaaaaaaaaaaugcaucccccccccccccccccccccccccccccccaaaggcucuuuucagagccaccagaauu

SEQ ID NO: 2951 - RNA, 1847 nt, Artificial Sequence
  mRNA product Design e-5 comprising derived and/or modified sequence from HRSV(A2)__F-del_DSCav1_mut2 (opt11)
gggagagcggcucggccauuuugucccagucaguccggaggcugcggcugcagaaguaccgccugcggaguaacugcaaagaagcuuaccauggaacuucuuauccuaaaagcgaacgccauaaccacaauccuaacagcagucaccuucuguuucgccucaggacaaaacaucaccgaggaauuuuaccaauccacauguagcgcugucucaaaaggcuaccucggcgcccuccgaaccggcugguacacauccguaauaacgaucgaacucuccaacauaaaagaaaauaaaugcaacggcaccgacgccaaagucaaacuuaucaaacaagaacuagacaaauacaaaaacgccgucaccgaccuccagcuccucaugcaauccaccccagcaacaggcuccggaagcgcaaucugcucaggcgucgccguaugcaaaguacuccaccucgaaggagaagucaacaaaaucaaauccgcccuccuauccacaaacaaagcaguugucucacucuccaacgggguaagcguacugaccuucaaaguccuagaccucaaaaacuacaucgauaaacaacuccuuccaauccucaacaaacaaucaugcucuauccccaacaucgaaaccguaaucgaauuucaacaaaaaaacaaccgccuacuugaaaucacacgcgaauuuagcgucaacgcaggaguaacaacacccguguccacauauaugcucacgaacagcgaacuacuaucccugauuaacgacaugcccaucaccaacgaccaaaaaaaacuaaugagcaacaacguacaaaucguccgccaacaaagcuacucuauaaugugcaucaucaaggaagaaguccuagccuacgucguccaauuaccacucuacggcgucaucgacacacccugcuggaaacuccauacauccccccucugcaccaccaacaccaaagaaggguccaacauaugccucacucgcacagaccgcggcugguacugcgacaacgcuggcagcgucagcuucuucccccaggccgaaaccugcaaaguccaauccaacagagucuucugcgacaccaugaacucgcucacccuccccuccgaggucaaccucugcaacgucgacauauucaaccccaaauacgacugcaaaaucaugaccuccaaaaccgacgucagcucaucagucaucacaucccucggggccaucgucuccugcuacggcaaaaccaagugcaccgccucaaacaaaaaccgcggcauuaucaaaacauucuccaacggcugcgacuacgucuccaacaaaggcgucgacacagucuccgucgguaacacccucuacugcguaaauaaacaagaaggccaaucccucuacgucaaaggcgaacccaucaucaacuucuacgacccucucgucuuccccuccgacgaauuugacgccucaaucagccaaguuaacgaaaaaaucaaccaaucacucgccuucauccgcaaauccgacgaacuccuccacaacguuaacgccggcaaaucuaccacgaacaucaugaucaccaccauaaucaucguaauuaucguaauacuccuaucccucauagcaguaggccuccuacucuacugcaaagcccguuaaggacuaguguccaccugucccuccugggcugcuggauugucucguuuuccugccaaauaaacaggaucagcgcuuuacagaucuaaaaaaaaaaaaaaaaaaaaaaaaaaaaaaaaaaaaaaaaaaaaaaaaaaaaaaaaaaaaaaaaugcaucccccccccccccccccccccccccccccccaaaggcucuuuucagagccaccagaauu

SEQ ID NO: 2952 - RNA, 1914 nt, Artificial Sequence
  mRNA product Design e-6 comprising derived and/or modified sequence from HRSV(A2)__F-del_DSCav1_mut2 (opt1)
gggagagcggcucggccauuuugucccagucaguccggaggcugcggcugcagaaguaccgccugcggaguaacugcaaagaagcuuaccauggagcugcucauccugaaggccaacgccaucaccaccauccugacggcggugaccuucugcuucgccagcggccagaacaucaccgaggaguucuaccaguccacgugcagcgccgucuccaagggguaccucggcgcccugcggaccggcugguacaccuccgugaucaccaucgagcugagcaacaucaaggagaacaagugcaacgggaccgacgccaaggugaagcucaucaagcaggagcuggacaaguacaagaacgcggucacggaccugcagcuccugaugcaguccaccccggcaaccggcuccggcuccgccaucugcagcggcgucgccgugugcaaggugcugcaccucgagggggaggucaacaagaucaagagcgcccugcuguccaccaacaaggccguggugagccucuccaacggcgucagcgugcugaccuucaaggugcuggaccucaagaacuacaucgacaagcagcugcugcccauccugaacaagcagagcugcuccauccccaacaucgagacggugaucgaguuccagcagaagaacaaccggcuccuggagaucacccgcgaguucagcgugaacgccggggucaccacccccguguccacguacaugcugaccaacagcgagcuccugucccugaucaacgacaugccgaucaccaacgaccagaagaagcucaugagcaacaacgugcagaucguccggcagcaguccuacagcaucaugugcaucaucaaggaggaggugcuggcguacgugguccagcugccccucuacggcgugaucgacacccccugcuggaagcugcacacgagcccccugugcaccaccaacaccaaggagggguccaacaucugccucacgcgcaccgaccggggcugguacugcgacaacgccggcagcgucuccuucuucccgcaggccgagaccugcaaggugcagagcaaccgcguguucugcgacaccaugaacucccugacgcugcccagcgagguaaaccucugcaacgucgacaucuucaaccccaaguacgacugcaagaucaugaccuccaagaccgacgugagcuccagcgugaucaccucccugggggccaucgucagcugcuacggcaagacgaagugcaccgccagcaacaagaaccgggggaucaucaagaccuucuccaacggcugcgacuacgugagcaacaagggcguggacaccguguccgucgggaacacccuguacugcgugaacaagcaggagggccagagccucuacgugaagggggagcccaucaucaacuucuacgacccgcuggucuuccccuccgacgaguucgacgcgagcaucucccaggugaacgagaagaucaaccagagccuggccuucauccgcaaguccgacgagcugcuccacaacgugaacgccggcaagagcacgaccaacaucaugaucaccaccaucaucaucgucaucaucgugauccugcugucccucaucgccguggggcugcugcucuacugcaaggcccggugaggacuaguacuggcugcaucucccuuuccucuguccuccauccuucucccaggauggugaagggggaccugguacccagugauccccaccccaggauccuaaaucaugacuuaccugcuaauaaaaacucauuggaaaagugagaagaucuaaaaaaaaaaaaaaaaaaaaaaaaaaaaaaaaaaaaaaaaaaaaaaaaaaaaaaaaaaaaaaaaugcaucccccccccccccccccccccccccccccccaaaggcucuuuucagagccaccagaauu

SEQ ID NO: 2953 - RNA, 1914 nt, Artificial Sequence
  mRNA product Design e-6 comprising derived and/or modified sequence from HRSV(A2)__F-del_DSCav1_mut2 (opt1)
gggagagcggcucggccauuuugucccagucaguccggaggcugcggcugcagaaguaccgccugcggaguaacugcaaagaagcuuaccauggagcugcucauccugaaggccaacgccaucaccaccauccugacggcggugaccuucugcuucgccagcggccagaacaucaccgaggaguucuaccaguccacgugcagcgccgucuccaagggguaccucggcgcccugcgcaccgggugguacaccagcgugaucaccaucgagcuguccaacaucaaggagaacaagugcaacggcaccgacgccaaggugaagcucaucaagcaggagcuggacaaguacaagaacgcggucacggaccugcagcuccugaugcagagcacccccgccaccggguccggcagcgccaucugcuccggcguggccgugugcaagguccugcaccucgagggggaggugaacaagaucaagagcgcgcugcuguccaccaacaaggccguggucagccucuccaacggcgugagcgugcugacguucaagguccuggaccucaagaacuacaucgacaagcagcugcugccgauccucaacaagcaguccugcagcauccccaacaucgagaccgugaucgaguuccagcagaagaacaaccggcugcuggagaucacccgcgaguucuccgugaacgccggggucaccacgcccgugagcaccuacaugcucaccaacuccgagcugcugagccucaucaacgacaugcccaucaccaacgaccagaagaagcugaugagcaacaacgugcagaucguccggcagcaguccuacagcaucaugugcaucaucaaggaggaggugcuggccuacgugguccagcucccgcuguacggcgugaucgacacgcccugcuggaagcugcacaccagcccccucugcaccaccaacacgaaggagggguccaacaucugccugacccgcaccgaccggggcugguacugcgacaacgccggcuccgugagcuucuucccccaggcggagaccugcaagguccaguccaaccgcguguucugcgacacgaugaacagccugacccucccguccgaggucaaccugugcaacguggacaucuucaaccccaaguacgacugcaagaucaugaccagcaagaccgacguguccagcuccgucaucacgagccugggggccaucguguccugcuacggcaagaccaagugcaccgccagcaacaagaaccgggggaucaucaagaccuucuccaacggcugcgacuacgugagcaacaagggcgucgacacgguguccguggggaacacccucuacugcgucaacaagcaggagggccagagccuguacgugaagggggagcccaucaucaacuucuacgacccccugguguucccgagcgacgaguucgacgccuccaucagccaggucaacgagaagaucaaccagucccucgccuucauccgcaagagcgacgagcugcugcacaacgugaacgcgggcaaguccaccaccaacaucaugaucaccacgaucaucaucgugaucaucgucauccuccugagccugaucgccguggggcuccugcuguacugcaaggcccggugaggacuaguacuggcugcaucucccuuuccucuguccuccauccuucucccaggauggugaagggggaccugguacccagugauccccaccccaggauccuaaaucaugacuuaccugcuaauaaaaacucauuggaaaagugagaagaucuaaaaaaaaaaaaaaaaaaaaaaaaaaaaaaaaaaaaaaaaaaaaaaaaaaaaaaaaaaaaaaaaugcaucccccccccccccccccccccccccccccccaaaggcucuuuucagagccaccagaauu

SEQ ID NO: 2954 - RNA, 1914 nt, Artificial Sequence
  mRNA product Design e-6 comprising derived and/or modified sequence from HRSV(A2)__F-del_DSCav1_mut2 (opt2)
gggagagcggcucggccauuuugucccagucaguccggaggcugcggcugcagaaguaccgccugcggaguaacugcaaagaagcuuaccauggagcuccucauccucaaggccaacgccaucaccaccauccucaccgccgucaccuucugcuucgccuccggccagaacaucaccgaggaguucuaccaguccaccugcuccgccgucuccaagggcuaccucggcgcccuccgcaccggcugguacaccuccgucaucaccaucgagcucuccaacaucaaggagaacaagugcaacggcaccgacgccaaggucaagcucaucaagcaggagcucgacaaguacaagaacgccgucaccgaccuccagcuccucaugcaguccacccccgccaccggcuccggcuccgccaucugcuccggcgucgccgucugcaagguccuccaccucgagggcgaggucaacaagaucaaguccgcccuccucuccaccaacaaggccgucgucucccucuccaacggcgucuccguccucaccuucaagguccucgaccucaagaacuacaucgacaagcagcuccuccccauccucaacaagcaguccugcuccauccccaacaucgagaccgucaucgaguuccagcagaagaacaaccgccuccucgagaucacccgcgaguucuccgucaacgccggcgucaccacccccgucuccaccuacaugcucaccaacuccgagcuccucucccucaucaacgacaugcccaucaccaacgaccagaagaagcucauguccaacaacguccagaucguccgccagcaguccuacuccaucaugugcaucaucaaggaggagguccucgccuacgucguccagcucccccucuacggcgucaucgacacccccugcuggaagcuccacaccuccccccucugcaccaccaacaccaaggagggcuccaacaucugccucacccgcaccgaccgcggcugguacugcgacaacgccggcuccgucuccuucuucccccaggccgagaccugcaagguccaguccaaccgcgucuucugcgacaccaugaacucccucacccuccccuccgaggucaaccucugcaacgucgacaucuucaaccccaaguacgacugcaagaucaugaccuccaagaccgacgucuccuccuccgucaucaccucccucggcgccaucgucuccugcuacggcaagaccaagugcaccgccuccaacaagaaccgcggcaucaucaagaccuucuccaacggcugcgacuacgucuccaacaagggcgucgacaccgucuccgucggcaacacccucuacugcgucaacaagcaggagggccagucccucuacgucaagggcgagcccaucaucaacuucuacgacccccucgucuuccccuccgacgaguucgacgccuccaucucccaggucaacgagaagaucaaccagucccucgccuucauccgcaaguccgacgagcuccuccacaacgucaacgccggcaaguccaccaccaacaucaugaucaccaccaucaucaucgucaucaucgucauccuccucucccucaucgccgucggccuccuccucuacugcaaggcccgcugaggacuaguacuggcugcaucucccuuuccucuguccuccauccuucucccaggauggugaagggggaccugguacccagugauccccaccccaggauccuaaaucaugacuuaccugcuaauaaaaacucauuggaaaagugagaagaucuaaaaaaaaaaaaaaaaaaaaaaaaaaaaaaaaaaaaaaaaaaaaaaaaaaaaaaaaaaaaaaaaugcaucccccccccccccccccccccccccccccccaaaggcucuuuucagagccaccagaauu

SEQ ID NO: 2955 - RNA, 1914 nt, Artificial Sequence
  mRNA product Design e-6 comprising derived and/or modified sequence from HRSV(A2)__F-del_DSCav1_mut2 (opt3)
gggagagcggcucggccauuuugucccagucaguccggaggcugcggcugcagaaguaccgccugcggaguaacugcaaagaagcuuaccauggagcugcucauccuuaaggccaacgcuauuaccacaauacugacugcagugacguucugcuuugccagcggccagaauaucaccgaagaguucuaccaauccacauguucugcggucucaaaaggguauuugggagcuuuaagaacugguugguacaccaguguuauuacaaucgaacugagcaacauuaaggagaauaaaugcaacggcaccgacgccaaggugaaacuaaucaagcaggaacucgauaaguauaaaaaugcaguaacugaccugcagcuucugaugcaguccacacccgccaccgggucuggaucggcuauauguucaggcguggcagucugcaagguguugcaccucgagggugagguuaacaaaaucaagagcgcccugcugaguacgaauaaagcuguggucucccucucuaacggggugagcguauuaacuuuuaagguucuggaucuuaagaauuacauugacaaacaauugcugccuauccuaaacaagcaguccuguucaauuccaaauaucgaaaccgugauagaguuccagcagaaaaacaauaggcuccuggaaauuacacgggaguuuagugucaacgccggagugacuaccccggugagcacauauaugcuuaccaauucugagcuguugucccucaucaacgauaugcccauuacgaacgaccaaaagaaacugaugucaaauaacguccagaucguucgccagcagagcuacaguaucaugugcauuauaaaggaagagguguuagcguauguagugcaacugccucucuacggcgucaucgauacuccauguuggaaacuucauacaucuccccugugcaccacuaauacaaaggaaggcuccaacauuuguuugacccgaacggaccgugggugguacugcgauaaugcaggaagcgugucguucuuuccucaggccgagaccuguaagguucagucuaacagaguguucugcgacacaaugaacucccuaacucugccaucagaagucaaucucugcaauguggauaucuuuaaccccaaauaugacuguaagauaaugaccaguaaaacagauguaagcuccucuguuauuacuagccugggugcuaucgugucaugcuacggcaagaccaaauguacagccaguaauaagaacagggggaucauuaagaccuucuccaauggaugcgacuaugucagcaacaaaggcguggacacugucucuguggguaauacgcuuuacuguguuaacaagcaagaggggcagucacuguaugugaaaggagagccuaucauuaacuuuuacgauccauugguauucccgagugacgaauuugaugcaagcauaucccaggucaaugagaagaucaaccagucucucgcuuucauucggaaaucggacgaacuguuacacaaugugaacgccggcaagagcacaaccaauaucaugaucacuaccauuauaaucguuauuaucgugauucugcuaucccucaucgcggucggccugcuuuuguauugcaaggcccgcugaggacuaguacuggcugcaucucccuuuccucuguccuccauccuucucccaggauggugaagggggaccugguacccagugauccccaccccaggauccuaaaucaugacuuaccugcuaauaaaaacucauuggaaaagugagaagaucuaaaaaaaaaaaaaaaaaaaaaaaaaaaaaaaaaaaaaaaaaaaaaaaaaaaaaaaaaaaaaaaaugcaucccccccccccccccccccccccccccccccaaaggcucuuuucagagccaccagaauu

SEQ ID NO: 2956 - RNA, 1914 nt, Artificial Sequence
  mRNA product Design e-6 comprising derived and/or modified sequence from HRSV(A2)__F-del_DSCav1_mut2 (opt4)
gggagagcggcucggccauuuugucccagucaguccggaggcugcggcugcagaaguaccgccugcggaguaacugcaaagaagcuuaccauggagcugcugauccugaaggccaacgccaucaccaccauccugaccgccgugaccuucugcuucgccagcggccagaacaucaccgaggaguucuaccagagcaccugcagcgccgugagcaagggcuaccugggcgcccugagaaccggcugguacaccagcgugaucaccaucgagcugagcaacaucaaggagaacaagugcaacggcaccgacgccaaggugaagcugaucaagcaggagcuggacaaguacaagaacgccgugaccgaccugcagcugcugaugcagagcacccccgccaccggcagcggcagcgccaucugcagcggcguggccgugugcaaggugcugcaccuggagggcgaggugaacaagaucaagagcgcccugcugagcaccaacaaggccguggugagccugagcaacggcgugagcgugcugaccuucaaggugcuggaccugaagaacuacaucgacaagcagcugcugcccauccugaacaagcagagcugcagcauccccaacaucgagaccgugaucgaguuccagcagaagaacaacagacugcuggagaucaccagagaguucagcgugaacgccggcgugaccacccccgugagcaccuacaugcugaccaacagcgagcugcugagccugaucaacgacaugcccaucaccaacgaccagaagaagcugaugagcaacaacgugcagaucgugagacagcagagcuacagcaucaugugcaucaucaaggaggaggugcuggccuacguggugcagcugccccuguacggcgugaucgacacccccugcuggaagcugcacaccagcccccugugcaccaccaacaccaaggagggcagcaacaucugccugaccagaaccgacagaggcugguacugcgacaacgccggcagcgugagcuucuucccccaggccgagaccugcaaggugcagagcaacagaguguucugcgacaccaugaacagccugacccugcccagcgaggugaaccugugcaacguggacaucuucaaccccaaguacgacugcaagaucaugaccagcaagaccgacgugagcagcagcgugaucaccagccugggcgccaucgugagcugcuacggcaagaccaagugcaccgccagcaacaagaacagaggcaucaucaagaccuucagcaacggcugcgacuacgugagcaacaagggcguggacaccgugagcgugggcaacacccuguacugcgugaacaagcaggagggccagagccuguacgugaagggcgagcccaucaucaacuucuacgacccccugguguuccccagcgacgaguucgacgccagcaucagccaggugaacgagaagaucaaccagagccuggccuucaucagaaagagcgacgagcugcugcacaacgugaacgccggcaagagcaccaccaacaucaugaucaccaccaucaucaucgugaucaucgugauccugcugagccugaucgccgugggccugcugcuguacugcaaggccagaugaggacuaguacuggcugcaucucccuuuccucuguccuccauccuucucccaggauggugaagggggaccugguacccagugauccccaccccaggauccuaaaucaugacuuaccugcuaauaaaaacucauuggaaaagugagaagaucuaaaaaaaaaaaaaaaaaaaaaaaaaaaaaaaaaaaaaaaaaaaaaaaaaaaaaaaaaaaaaaaaugcaucccccccccccccccccccccccccccccccaaaggcucuuuucagagccaccagaauu

SEQ ID NO: 2957 - RNA, 1914 nt, Artificial Sequence
  mRNA product Design e-6 comprising derived and/or modified sequence from HRSV(A2)__F-del_DSCav1_mut2 (opt5)
gggagagcggcucggccauuuugucccagucaguccggaggcugcggcugcagaaguaccgccugcggaguaacugcaaagaagcuuaccauggagcugcucauccugaaggccaacgcuauuaccacaauccuuacggccgugaccuucugcuuugcgagcggccagaauauuacagaagaguucuaccaauccaccuguucugcugucagcaaaggguaucugggagcccucagaacaggcugguacaccuccguuaucacaauugaacugucuaacaucaaggagaauaaaugcaacgggaccgacgccaaggugaaacuuaucaagcaggaacuggauaaguauaaaaaugcugugacggaccuccagcugcugaugcagagcacccccgccacaggauccggcucugcuauuuguagcggggucgccgugugcaagguucuccaccuggagggagaggugaacaaaaucaaguccgcgcuucugagcaccaauaaagccgucgugucucucuccaacggcguuagcgugcugacauuuaagguccuugaucugaagaauuacauugacaaacaacuccugccuauccugaacaagcagucuuguuccauuccgaauaucgaaaccgugauugaguuccagcagaaaaacaaucggcuccuggaaaucacgcgcgaguuuagcgugaacgcuggcgucacaacccccguuucuacauauaugcuuaccaauuccgagcugcucagccugaucaacgauaugccuauuaccaacgaccaaaagaaacuuauguccaauaacgugcagaucgugagacagcagucuuacagcauuaugugcaucauuaaggaagagguccuggccuaugugguucaacucccccuguacggggugaucgauacaccuuguuggaaacugcauacgagcccccucugcaccacaaauaccaaggaaggauccaacaucugucugacacggaccgaccgcggcugguacugcgauaaugcugggucugucuccuucuuuccucaggccgagacguguaaggugcagagcaacagaguuuucugcgacacaaugaacucucuuacccugccgagcgaagugaaucucugcaaugucgauauuuuuaaccccaaauaugacuguaagaucaugaccuccaaaacagaugugucuagcuccgucauuaccagccugggagcgaucgugucuugcuacggcaagacaaaauguacggccuccaauaagaaccgggggauuaucaagaccuucagcaauggaugcgacuauguuucuaacaaaggcguggacacagucuccgugggcaauacccuuuacuguguuaacaagcaagaggggcagagccuguaugugaaaggagagccuaucauuaacuuuuacgauccccucgucuucccuuccgacgaauuugaugcuucuaucagccaggugaaugagaagauuaaccagucccuggccuucauccgcaaaucugacgaacugcuccacaaugugaacgcuggcaagagcacaaccaauauuaugaucacgaccauuaucaucguuauuaucgucauucugcuuucccugaucgccguggggcuccugcuguauugcaaggccagaugaggacuaguacuggcugcaucucccuuuccucuguccuccauccuucucccaggauggugaagggggaccugguacccagugauccccaccccaggauccuaaaucaugacuuaccugcuaauaaaaacucauuggaaaagugagaagaucuaaaaaaaaaaaaaaaaaaaaaaaaaaaaaaaaaaaaaaaaaaaaaaaaaaaaaaaaaaaaaaaaugcaucccccccccccccccccccccccccccccccaaaggcucuuuucagagccaccagaauu

SEQ ID NO: 2958 - RNA, 1914 nt, Artificial Sequence
  mRNA product Design e-6 comprising derived and/or modified sequence from HRSV(A2)__F-del_DSCav1_mut2 (opt6)
gggagagcggcucggccauuuugucccagucaguccggaggcugcggcugcagaaguaccgccugcggaguaacugcaaagaagcuuaccauggaacuccuaauacuuaaagccaaugcaauaaccacaauacuaacagcaguaacauucugcuuugcaucaggacaaaacauaacagaagaauuuuaccaaucaacauguucagcaguaagcaaaggauaccuaggagccuuacgcacagguugguacacuuccguaauaacaauagaacucucaaauauaaaagaaaacaaaugcaacggaaccgaugcaaaaguaaaacuaauaaaacaagaauuagacaaauacaaaaacgcaguaacagaccuacaauuacuuaugcaaucaacacccgcaacaggauccggcucagcaaucuguucaggaguagcaguaugcaaaguucuccaccuagaaggcgaaguaaacaaaauaaaaucagcccuauuaucuaccaauaaagcaguaguaucacuaucaaauggaguaucuguccuaaccuucaaaguacuugaccuaaaaaauuacaucgacaaacaauuacuaccaauacuuaacaaacaaucauguucaauaccaaacauugaaacaguaauagaauuucaacaaaaaaauaacagauuauuagaaauaacccgcgaauuuucaguuaacgcaggaguaacaacaccaguauccacauacauguuaacaaauucagaacucuuaucacuuauaaacgacaugcccauaacaaacgaccaaaaaaaacucaugucuaacaauguucaaauaguucgacaacaaucauacuccauaaugugcauaauaaaagaagaaguucuagcauauguuguacaacucccacucuaugguguuauagacacaccaugcuggaaacuacauacaagccccuuaugcacuacaaacacaaaagaaggcucuaauauaugucuaacccgcacagacagaggcugguauugcgauaacgcagguucaguaucauucuuuccacaagcagaaacuugcaaaguccaauccaauagagucuucugcgacacuaugaacucacucacacucccaucugaagucaauuuauguaacgucgauaucuucaacccaaaauacgacugcaaaauaaugaccucaaaaacagacguaagcucaucagucauaacuucucuaggcgcaaucgucucauguuacggcaaaacaaaauguaccgcaucaaacaaaaaucgagguauaauaaaaaccuuuucuaacggcugcgacuacguaucaaacaaaggaguagauacuguaagugucggaaacacauuauacugcgucaacaaacaagaaggacaaucccuauauguuaaaggcgaaccuaucauuaauuucuacgacccacucgucuuuccauccgacgaauuugacgcaucaauuucccaaguaaaugaaaaaauaaaccaaucccuugcauucauaagaaaaucagaugaacuauuacacaacguaaacgcaggcaaaucaacaacaaauauaaugaucacaacaauaauaaucguaauaauaguaauccuacucucacuaauagcaguaggcuuacuauuauauugcaaagccagauaaggacuaguacuggcugcaucucccuuuccucuguccuccauccuucucccaggauggugaagggggaccugguacccagugauccccaccccaggauccuaaaucaugacuuaccugcuaauaaaaacucauuggaaaagugagaagaucuaaaaaaaaaaaaaaaaaaaaaaaaaaaaaaaaaaaaaaaaaaaaaaaaaaaaaaaaaaaaaaaaugcaucccccccccccccccccccccccccccccccaaaggcucuuuucagagccaccagaauu

SEQ ID NO: 2959 - RNA, 1914 nt, Artificial Sequence
  mRNA product Design e-6 comprising derived and/or modified sequence from HRSV(A2)__F-del_DSCav1_mut2 (opt11)
gggagagcggcucggccauuuugucccagucaguccggaggcugcggcugcagaaguaccgccugcggaguaacugcaaagaagcuuaccauggaacuucuuauccuaaaagcgaacgccauaaccacaauccuaacagcagucaccuucuguuucgccucaggacaaaacaucaccgaggaauuuuaccaauccacauguagcgcugucucaaaaggcuaccucggcgcccuccgaaccggcugguacacauccguaauaacgaucgaacucuccaacauaaaagaaaauaaaugcaacggcaccgacgccaaagucaaacuuaucaaacaagaacuagacaaauacaaaaacgccgucaccgaccuccagcuccucaugcaauccaccccagcaacaggcuccggaagcgcaaucugcucaggcgucgccguaugcaaaguacuccaccucgaaggagaagucaacaaaaucaaauccgcccuccuauccacaaacaaagcaguugucucacucuccaacgggguaagcguacugaccuucaaaguccuagaccucaaaaacuacaucgauaaacaacuccuuccaauccucaacaaacaaucaugcucuauccccaacaucgaaaccguaaucgaauuucaacaaaaaaacaaccgccuacuugaaaucacacgcgaauuuagcgucaacgcaggaguaacaacacccguguccacauauaugcucacgaacagcgaacuacuaucccugauuaacgacaugcccaucaccaacgaccaaaaaaaacuaaugagcaacaacguacaaaucguccgccaacaaagcuacucuauaaugugcaucaucaaggaagaaguccuagccuacgucguccaauuaccacucuacggcgucaucgacacacccugcuggaaacuccauacauccccccucugcaccaccaacaccaaagaaggguccaacauaugccucacucgcacagaccgcggcugguacugcgacaacgcuggcagcgucagcuucuucccccaggccgaaaccugcaaaguccaauccaacagagucuucugcgacaccaugaacucgcucacccuccccuccgaggucaaccucugcaacgucgacauauucaaccccaaauacgacugcaaaaucaugaccuccaaaaccgacgucagcucaucagucaucacaucccucggggccaucgucuccugcuacggcaaaaccaagugcaccgccucaaacaaaaaccgcggcauuaucaaaacauucuccaacggcugcgacuacgucuccaacaaaggcgucgacacagucuccgucgguaacacccucuacugcguaaauaaacaagaaggccaaucccucuacgucaaaggcgaacccaucaucaacuucuacgacccucucgucuuccccuccgacgaauuugacgccucaaucagccaaguuaacgaaaaaaucaaccaaucacucgccuucauccgcaaauccgacgaacuccuccacaacguuaacgccggcaaaucuaccacgaacaucaugaucaccaccauaaucaucguaauuaucguaauacuccuaucccucauagcaguaggccuccuacucuacugcaaagcccguuaaggacuaguacuggcugcaucucccuuuccucuguccuccauccuucucccaggauggugaagggggaccugguacccagugauccccaccccaggauccuaaaucaugacuuaccugcuaauaaaaacucauuggaaaagugagaagaucuaaaaaaaaaaaaaaaaaaaaaaaaaaaaaaaaaaaaaaaaaaaaaaaaaaaaaaaaaaaaaaaaugcaucccccccccccccccccccccccccccccccaaaggcucuuuucagagccaccagaauu

SEQ ID NO: 2960 - RNA, 2130 nt, Artificial Sequence
  mRNA product Design f-1 comprising derived and/or modified sequence from HRSV(A2)__F-del_DSCav1_mut2 (opt1)
gggagagcggcucggccauuuugucccagucaguccggaggcugcggcugcagaaguaccgccugcggaguaacugcaaagaagcuuaccauggagcugcucauccugaaggccaacgccaucaccaccauccugacggcggugaccuucugcuucgccagcggccagaacaucaccgaggaguucuaccaguccacgugcagcgccgucuccaagggguaccucggcgcccugcggaccggcugguacaccuccgugaucaccaucgagcugagcaacaucaaggagaacaagugcaacgggaccgacgccaaggugaagcucaucaagcaggagcuggacaaguacaagaacgcggucacggaccugcagcuccugaugcaguccaccccggcaaccggcuccggcuccgccaucugcagcggcgucgccgugugcaaggugcugcaccucgagggggaggucaacaagaucaagagcgcccugcuguccaccaacaaggccguggugagccucuccaacggcgucagcgugcugaccuucaaggugcuggaccucaagaacuacaucgacaagcagcugcugcccauccugaacaagcagagcugcuccauccccaacaucgagacggugaucgaguuccagcagaagaacaaccggcuccuggagaucacccgcgaguucagcgugaacgccggggucaccacccccguguccacguacaugcugaccaacagcgagcuccugucccugaucaacgacaugccgaucaccaacgaccagaagaagcucaugagcaacaacgugcagaucguccggcagcaguccuacagcaucaugugcaucaucaaggaggaggugcuggcguacgugguccagcugccccucuacggcgugaucgacacccccugcuggaagcugcacacgagcccccugugcaccaccaacaccaaggagggguccaacaucugccucacgcgcaccgaccggggcugguacugcgacaacgccggcagcgucuccuucuucccgcaggccgagaccugcaaggugcagagcaaccgcguguucugcgacaccaugaacucccugacgcugcccagcgagguaaaccucugcaacgucgacaucuucaaccccaaguacgacugcaagaucaugaccuccaagaccgacgugagcuccagcgugaucaccucccugggggccaucgucagcugcuacggcaagacgaagugcaccgccagcaacaagaaccgggggaucaucaagaccuucuccaacggcugcgacuacgugagcaacaagggcguggacaccguguccgucgggaacacccuguacugcgugaacaagcaggagggccagagccucuacgugaagggggagcccaucaucaacuucuacgacccgcuggucuuccccuccgacgaguucgacgcgagcaucucccaggugaacgagaagaucaaccagagccuggccuucauccgcaaguccgacgagcugcuccacaacgugaacgccggcaagagcacgaccaacaucaugaucaccaccaucaucaucgucaucaucgugauccugcugucccucaucgccguggggcugcugcucuacugcaaggcccggugaggacuagugaagggaacacccaaauuuaauucagccuuaagcacaauuaauuaagagugaaacguaauuguacaagcaguuggucacccaccauagggcaugaucaacaccgcaaccuuuccuuuuucccccagugauucugaaaaaccccucuucccuucagcuugcuuagauguuccaaauuuaguaagcuuaaggcggccuacagaagaaaaagaaaaaaaaggccacaaaaguucccucucacuuucaguaaauaaaauaaaagcagcaacagaaauaaagaaauaaaugaaauucaaaaugaaauaaauauuguguugugcagcauuaaaaaaucaauaaaaauuaaaaaugagcaagaucuaaaaaaaaaaaaaaaaaaaaaaaaaaaaaaaaaaaaaaaaaaaaaaaaaaaaaaaaaaaaaaaaugcaucccccccccccccccccccccccccccccccaaaggcucuuuucagagccaccagaauu

SEQ ID NO: 2961 - RNA, 2130 nt, Artificial Sequence
  mRNA product Design f-1 comprising derived and/or modified sequence from HRSV(A2)__F-del_DSCav1_mut2 (opt1)
gggagagcggcucggccauuuugucccagucaguccggaggcugcggcugcagaaguaccgccugcggaguaacugcaaagaagcuuaccauggagcugcucauccugaaggccaacgccaucaccaccauccugacggcggugaccuucugcuucgccagcggccagaacaucaccgaggaguucuaccaguccacgugcagcgccgucuccaagggguaccucggcgcccugcgcaccgggugguacaccagcgugaucaccaucgagcuguccaacaucaaggagaacaagugcaacggcaccgacgccaaggugaagcucaucaagcaggagcuggacaaguacaagaacgcggucacggaccugcagcuccugaugcagagcacccccgccaccggguccggcagcgccaucugcuccggcguggccgugugcaagguccugcaccucgagggggaggugaacaagaucaagagcgcgcugcuguccaccaacaaggccguggucagccucuccaacggcgugagcgugcugacguucaagguccuggaccucaagaacuacaucgacaagcagcugcugccgauccucaacaagcaguccugcagcauccccaacaucgagaccgugaucgaguuccagcagaagaacaaccggcugcuggagaucacccgcgaguucuccgugaacgccggggucaccacgcccgugagcaccuacaugcucaccaacuccgagcugcugagccucaucaacgacaugcccaucaccaacgaccagaagaagcugaugagcaacaacgugcagaucguccggcagcaguccuacagcaucaugugcaucaucaaggaggaggugcuggccuacgugguccagcucccgcuguacggcgugaucgacacgcccugcuggaagcugcacaccagcccccucugcaccaccaacacgaaggagggguccaacaucugccugacccgcaccgaccggggcugguacugcgacaacgccggcuccgugagcuucuucccccaggcggagaccugcaagguccaguccaaccgcguguucugcgacacgaugaacagccugacccucccguccgaggucaaccugugcaacguggacaucuucaaccccaaguacgacugcaagaucaugaccagcaagaccgacguguccagcuccgucaucacgagccugggggccaucguguccugcuacggcaagaccaagugcaccgccagcaacaagaaccgggggaucaucaagaccuucuccaacggcugcgacuacgugagcaacaagggcgucgacacgguguccguggggaacacccucuacugcgucaacaagcaggagggccagagccuguacgugaagggggagcccaucaucaacuucuacgacccccugguguucccgagcgacgaguucgacgccuccaucagccaggucaacgagaagaucaaccagucccucgccuucauccgcaagagcgacgagcugcugcacaacgugaacgcgggcaaguccaccaccaacaucaugaucaccacgaucaucaucgugaucaucgucauccuccugagccugaucgccguggggcuccugcuguacugcaaggcccggugaggacuagugaagggaacacccaaauuuaauucagccuuaagcacaauuaauuaagagugaaacguaauuguacaagcaguuggucacccaccauagggcaugaucaacaccgcaaccuuuccuuuuucccccagugauucugaaaaaccccucuucccuucagcuugcuuagauguuccaaauuuaguaagcuuaaggcggccuacagaagaaaaagaaaaaaaaggccacaaaaguucccucucacuuucaguaaauaaaauaaaagcagcaacagaaauaaagaaauaaaugaaauucaaaaugaaauaaauauuguguugugcagcauuaaaaaaucaauaaaaauuaaaaaugagcaagaucuaaaaaaaaaaaaaaaaaaaaaaaaaaaaaaaaaaaaaaaaaaaaaaaaaaaaaaaaaaaaaaaaugcaucccccccccccccccccccccccccccccccaaaggcucuuuucagagccaccagaauu

SEQ ID NO: 2962 - RNA, 2130 nt, Artificial Sequence
  mRNA product Design f-1 comprising derived and/or modified sequence from HRSV(A2)__F-del_DSCav1_mut2 (opt2)
gggagagcggcucggccauuuugucccagucaguccggaggcugcggcugcagaaguaccgccugcggaguaacugcaaagaagcuuaccauggagcuccucauccucaaggccaacgccaucaccaccauccucaccgccgucaccuucugcuucgccuccggccagaacaucaccgaggaguucuaccaguccaccugcuccgccgucuccaagggcuaccucggcgcccuccgcaccggcugguacaccuccgucaucaccaucgagcucuccaacaucaaggagaacaagugcaacggcaccgacgccaaggucaagcucaucaagcaggagcucgacaaguacaagaacgccgucaccgaccuccagcuccucaugcaguccacccccgccaccggcuccggcuccgccaucugcuccggcgucgccgucugcaagguccuccaccucgagggcgaggucaacaagaucaaguccgcccuccucuccaccaacaaggccgucgucucccucuccaacggcgucuccguccucaccuucaagguccucgaccucaagaacuacaucgacaagcagcuccuccccauccucaacaagcaguccugcuccauccccaacaucgagaccgucaucgaguuccagcagaagaacaaccgccuccucgagaucacccgcgaguucuccgucaacgccggcgucaccacccccgucuccaccuacaugcucaccaacuccgagcuccucucccucaucaacgacaugcccaucaccaacgaccagaagaagcucauguccaacaacguccagaucguccgccagcaguccuacuccaucaugugcaucaucaaggaggagguccucgccuacgucguccagcucccccucuacggcgucaucgacacccccugcuggaagcuccacaccuccccccucugcaccaccaacaccaaggagggcuccaacaucugccucacccgcaccgaccgcggcugguacugcgacaacgccggcuccgucuccuucuucccccaggccgagaccugcaagguccaguccaaccgcgucuucugcgacaccaugaacucccucacccuccccuccgaggucaaccucugcaacgucgacaucuucaaccccaaguacgacugcaagaucaugaccuccaagaccgacgucuccuccuccgucaucaccucccucggcgccaucgucuccugcuacggcaagaccaagugcaccgccuccaacaagaaccgcggcaucaucaagaccuucuccaacggcugcgacuacgucuccaacaagggcgucgacaccgucuccgucggcaacacccucuacugcgucaacaagcaggagggccagucccucuacgucaagggcgagcccaucaucaacuucuacgacccccucgucuuccccuccgacgaguucgacgccuccaucucccaggucaacgagaagaucaaccagucccucgccuucauccgcaaguccgacgagcuccuccacaacgucaacgccggcaaguccaccaccaacaucaugaucaccaccaucaucaucgucaucaucgucauccuccucucccucaucgccgucggccuccuccucuacugcaaggcccgcugaggacuagugaagggaacacccaaauuuaauucagccuuaagcacaauuaauuaagagugaaacguaauuguacaagcaguuggucacccaccauagggcaugaucaacaccgcaaccuuuccuuuuucccccagugauucugaaaaaccccucuucccuucagcuugcuuagauguuccaaauuuaguaagcuuaaggcggccuacagaagaaaaagaaaaaaaaggccacaaaaguucccucucacuuucaguaaauaaaauaaaagcagcaacagaaauaaagaaauaaaugaaauucaaaaugaaauaaauauuguguugugcagcauuaaaaaaucaauaaaaauuaaaaaugagcaagaucuaaaaaaaaaaaaaaaaaaaaaaaaaaaaaaaaaaaaaaaaaaaaaaaaaaaaaaaaaaaaaaaaugcaucccccccccccccccccccccccccccccccaaaggcucuuuucagagccaccagaauu

SEQ ID NO: 2963 - RNA, 2130 nt, Artificial Sequence
  mRNA product Design f-1 comprising derived and/or modified sequence from HRSV(A2)__F-del_DSCav1_mut2 (opt3)
gggagagcggcucggccauuuugucccagucaguccggaggcugcggcugcagaaguaccgccugcggaguaacugcaaagaagcuuaccauggagcugcucauccuuaaggccaacgcuauuaccacaauacugacugcagugacguucugcuuugccagcggccagaauaucaccgaagaguucuaccaauccacauguucugcggucucaaaaggguauuugggagcuuuaagaacugguugguacaccaguguuauuacaaucgaacugagcaacauuaaggagaauaaaugcaacggcaccgacgccaaggugaaacuaaucaagcaggaacucgauaaguauaaaaaugcaguaacugaccugcagcuucugaugcaguccacacccgccaccgggucuggaucggcuauauguucaggcguggcagucugcaagguguugcaccucgagggugagguuaacaaaaucaagagcgcccugcugaguacgaauaaagcuguggucucccucucuaacggggugagcguauuaacuuuuaagguucuggaucuuaagaauuacauugacaaacaauugcugccuauccuaaacaagcaguccuguucaauuccaaauaucgaaaccgugauagaguuccagcagaaaaacaauaggcuccuggaaauuacacgggaguuuagugucaacgccggagugacuaccccggugagcacauauaugcuuaccaauucugagcuguugucccucaucaacgauaugcccauuacgaacgaccaaaagaaacugaugucaaauaacguccagaucguucgccagcagagcuacaguaucaugugcauuauaaaggaagagguguuagcguauguagugcaacugccucucuacggcgucaucgauacuccauguuggaaacuucauacaucuccccugugcaccacuaauacaaaggaaggcuccaacauuuguuugacccgaacggaccgugggugguacugcgauaaugcaggaagcgugucguucuuuccucaggccgagaccuguaagguucagucuaacagaguguucugcgacacaaugaacucccuaacucugccaucagaagucaaucucugcaauguggauaucuuuaaccccaaauaugacuguaagauaaugaccaguaaaacagauguaagcuccucuguuauuacuagccugggugcuaucgugucaugcuacggcaagaccaaauguacagccaguaauaagaacagggggaucauuaagaccuucuccaauggaugcgacuaugucagcaacaaaggcguggacacugucucuguggguaauacgcuuuacuguguuaacaagcaagaggggcagucacuguaugugaaaggagagccuaucauuaacuuuuacgauccauugguauucccgagugacgaauuugaugcaagcauaucccaggucaaugagaagaucaaccagucucucgcuuucauucggaaaucggacgaacuguuacacaaugugaacgccggcaagagcacaaccaauaucaugaucacuaccauuauaaucguuauuaucgugauucugcuaucccucaucgcggucggccugcuuuuguauugcaaggcccgcugaggacuagugaagggaacacccaaauuuaauucagccuuaagcacaauuaauuaagagugaaacguaauuguacaagcaguuggucacccaccauagggcaugaucaacaccgcaaccuuuccuuuuucccccagugauucugaaaaaccccucuucccuucagcuugcuuagauguuccaaauuuaguaagcuuaaggcggccuacagaagaaaaagaaaaaaaaggccacaaaaguucccucucacuuucaguaaauaaaauaaaagcagcaacagaaauaaagaaauaaaugaaauucaaaaugaaauaaauauuguguugugcagcauuaaaaaaucaauaaaaauuaaaaaugagcaagaucuaaaaaaaaaaaaaaaaaaaaaaaaaaaaaaaaaaaaaaaaaaaaaaaaaaaaaaaaaaaaaaaaugcaucccccccccccccccccccccccccccccccaaaggcucuuuucagagccaccagaauu

SEQ ID NO: 2964 - RNA, 2130 nt, Artificial Sequence
  mRNA product Design f-1 comprising derived and/or modified sequence from HRSV(A2)__F-del_DSCav1_mut2 (opt4)
gggagagcggcucggccauuuugucccagucaguccggaggcugcggcugcagaaguaccgccugcggaguaacugcaaagaagcuuaccauggagcugcugauccugaaggccaacgccaucaccaccauccugaccgccgugaccuucugcuucgccagcggccagaacaucaccgaggaguucuaccagagcaccugcagcgccgugagcaagggcuaccugggcgcccugagaaccggcugguacaccagcgugaucaccaucgagcugagcaacaucaaggagaacaagugcaacggcaccgacgccaaggugaagcugaucaagcaggagcuggacaaguacaagaacgccgugaccgaccugcagcugcugaugcagagcacccccgccaccggcagcggcagcgccaucugcagcggcguggccgugugcaaggugcugcaccuggagggcgaggugaacaagaucaagagcgcccugcugagcaccaacaaggccguggugagccugagcaacggcgugagcgugcugaccuucaaggugcuggaccugaagaacuacaucgacaagcagcugcugcccauccugaacaagcagagcugcagcauccccaacaucgagaccgugaucgaguuccagcagaagaacaacagacugcuggagaucaccagagaguucagcgugaacgccggcgugaccacccccgugagcaccuacaugcugaccaacagcgagcugcugagccugaucaacgacaugcccaucaccaacgaccagaagaagcugaugagcaacaacgugcagaucgugagacagcagagcuacagcaucaugugcaucaucaaggaggaggugcuggccuacguggugcagcugccccuguacggcgugaucgacacccccugcuggaagcugcacaccagcccccugugcaccaccaacaccaaggagggcagcaacaucugccugaccagaaccgacagaggcugguacugcgacaacgccggcagcgugagcuucuucccccaggccgagaccugcaaggugcagagcaacagaguguucugcgacaccaugaacagccugacccugcccagcgaggugaaccugugcaacguggacaucuucaaccccaaguacgacugcaagaucaugaccagcaagaccgacgugagcagcagcgugaucaccagccugggcgccaucgugagcugcuacggcaagaccaagugcaccgccagcaacaagaacagaggcaucaucaagaccuucagcaacggcugcgacuacgugagcaacaagggcguggacaccgugagcgugggcaacacccuguacugcgugaacaagcaggagggccagagccuguacgugaagggcgagcccaucaucaacuucuacgacccccugguguuccccagcgacgaguucgacgccagcaucagccaggugaacgagaagaucaaccagagccuggccuucaucagaaagagcgacgagcugcugcacaacgugaacgccggcaagagcaccaccaacaucaugaucaccaccaucaucaucgugaucaucgugauccugcugagccugaucgccgugggccugcugcuguacugcaaggccagaugaggacuagugaagggaacacccaaauuuaauucagccuuaagcacaauuaauuaagagugaaacguaauuguacaagcaguuggucacccaccauagggcaugaucaacaccgcaaccuuuccuuuuucccccagugauucugaaaaaccccucuucccuucagcuugcuuagauguuccaaauuuaguaagcuuaaggcggccuacagaagaaaaagaaaaaaaaggccacaaaaguucccucucacuuucaguaaauaaaauaaaagcagcaacagaaauaaagaaauaaaugaaauucaaaaugaaauaaauauuguguugugcagcauuaaaaaaucaauaaaaauuaaaaaugagcaagaucuaaaaaaaaaaaaaaaaaaaaaaaaaaaaaaaaaaaaaaaaaaaaaaaaaaaaaaaaaaaaaaaaugcaucccccccccccccccccccccccccccccccaaaggcucuuuucagagccaccagaauu

SEQ ID NO: 2965 - RNA, 2130 nt, Artificial Sequence
  mRNA product Design f-1 comprising derived and/or modified sequence from HRSV(A2)__F-del_DSCav1_mut2 (opt5)
gggagagcggcucggccauuuugucccagucaguccggaggcugcggcugcagaaguaccgccugcggaguaacugcaaagaagcuuaccauggagcugcucauccugaaggccaacgcuauuaccacaauccuuacggccgugaccuucugcuuugcgagcggccagaauauuacagaagaguucuaccaauccaccuguucugcugucagcaaaggguaucugggagcccucagaacaggcugguacaccuccguuaucacaauugaacugucuaacaucaaggagaauaaaugcaacgggaccgacgccaaggugaaacuuaucaagcaggaacuggauaaguauaaaaaugcugugacggaccuccagcugcugaugcagagcacccccgccacaggauccggcucugcuauuuguagcggggucgccgugugcaagguucuccaccuggagggagaggugaacaaaaucaaguccgcgcuucugagcaccaauaaagccgucgugucucucuccaacggcguuagcgugcugacauuuaagguccuugaucugaagaauuacauugacaaacaacuccugccuauccugaacaagcagucuuguuccauuccgaauaucgaaaccgugauugaguuccagcagaaaaacaaucggcuccuggaaaucacgcgcgaguuuagcgugaacgcuggcgucacaacccccguuucuacauauaugcuuaccaauuccgagcugcucagccugaucaacgauaugccuauuaccaacgaccaaaagaaacuuauguccaauaacgugcagaucgugagacagcagucuuacagcauuaugugcaucauuaaggaagagguccuggccuaugugguucaacucccccuguacggggugaucgauacaccuuguuggaaacugcauacgagcccccucugcaccacaaauaccaaggaaggauccaacaucugucugacacggaccgaccgcggcugguacugcgauaaugcugggucugucuccuucuuuccucaggccgagacguguaaggugcagagcaacagaguuuucugcgacacaaugaacucucuuacccugccgagcgaagugaaucucugcaaugucgauauuuuuaaccccaaauaugacuguaagaucaugaccuccaaaacagaugugucuagcuccgucauuaccagccugggagcgaucgugucuugcuacggcaagacaaaauguacggccuccaauaagaaccgggggauuaucaagaccuucagcaauggaugcgacuauguuucuaacaaaggcguggacacagucuccgugggcaauacccuuuacuguguuaacaagcaagaggggcagagccuguaugugaaaggagagccuaucauuaacuuuuacgauccccucgucuucccuuccgacgaauuugaugcuucuaucagccaggugaaugagaagauuaaccagucccuggccuucauccgcaaaucugacgaacugcuccacaaugugaacgcuggcaagagcacaaccaauauuaugaucacgaccauuaucaucguuauuaucgucauucugcuuucccugaucgccguggggcuccugcuguauugcaaggccagaugaggacuagugaagggaacacccaaauuuaauucagccuuaagcacaauuaauuaagagugaaacguaauuguacaagcaguuggucacccaccauagggcaugaucaacaccgcaaccuuuccuuuuucccccagugauucugaaaaaccccucuucccuucagcuugcuuagauguuccaaauuuaguaagcuuaaggcggccuacagaagaaaaagaaaaaaaaggccacaaaaguucccucucacuuucaguaaauaaaauaaaagcagcaacagaaauaaagaaauaaaugaaauucaaaaugaaauaaauauuguguugugcagcauuaaaaaaucaauaaaaauuaaaaaugagcaagaucuaaaaaaaaaaaaaaaaaaaaaaaaaaaaaaaaaaaaaaaaaaaaaaaaaaaaaaaaaaaaaaaaugcaucccccccccccccccccccccccccccccccaaaggcucuuuucagagccaccagaauu

SEQ ID NO: 2966 - RNA, 2130 nt, Artificial Sequence
  mRNA product Design f-1 comprising derived and/or modified sequence from HRSV(A2)__F-del_DSCav1_mut2 (opt6)
gggagagcggcucggccauuuugucccagucaguccggaggcugcggcugcagaaguaccgccugcggaguaacugcaaagaagcuuaccauggaacuccuaauacuuaaagccaaugcaauaaccacaauacuaacagcaguaacauucugcuuugcaucaggacaaaacauaacagaagaauuuuaccaaucaacauguucagcaguaagcaaaggauaccuaggagccuuacgcacagguugguacacuuccguaauaacaauagaacucucaaauauaaaagaaaacaaaugcaacggaaccgaugcaaaaguaaaacuaauaaaacaagaauuagacaaauacaaaaacgcaguaacagaccuacaauuacuuaugcaaucaacacccgcaacaggauccggcucagcaaucuguucaggaguagcaguaugcaaaguucuccaccuagaaggcgaaguaaacaaaauaaaaucagcccuauuaucuaccaauaaagcaguaguaucacuaucaaauggaguaucuguccuaaccuucaaaguacuugaccuaaaaaauuacaucgacaaacaauuacuaccaauacuuaacaaacaaucauguucaauaccaaacauugaaacaguaauagaauuucaacaaaaaaauaacagauuauuagaaauaacccgcgaauuuucaguuaacgcaggaguaacaacaccaguauccacauacauguuaacaaauucagaacucuuaucacuuauaaacgacaugcccauaacaaacgaccaaaaaaaacucaugucuaacaauguucaaauaguucgacaacaaucauacuccauaaugugcauaauaaaagaagaaguucuagcauauguuguacaacucccacucuaugguguuauagacacaccaugcuggaaacuacauacaagccccuuaugcacuacaaacacaaaagaaggcucuaauauaugucuaacccgcacagacagaggcugguauugcgauaacgcagguucaguaucauucuuuccacaagcagaaacuugcaaaguccaauccaauagagucuucugcgacacuaugaacucacucacacucccaucugaagucaauuuauguaacgucgauaucuucaacccaaaauacgacugcaaaauaaugaccucaaaaacagacguaagcucaucagucauaacuucucuaggcgcaaucgucucauguuacggcaaaacaaaauguaccgcaucaaacaaaaaucgagguauaauaaaaaccuuuucuaacggcugcgacuacguaucaaacaaaggaguagauacuguaagugucggaaacacauuauacugcgucaacaaacaagaaggacaaucccuauauguuaaaggcgaaccuaucauuaauuucuacgacccacucgucuuuccauccgacgaauuugacgcaucaauuucccaaguaaaugaaaaaauaaaccaaucccuugcauucauaagaaaaucagaugaacuauuacacaacguaaacgcaggcaaaucaacaacaaauauaaugaucacaacaauaauaaucguaauaauaguaauccuacucucacuaauagcaguaggcuuacuauuauauugcaaagccagauaaggacuagugaagggaacacccaaauuuaauucagccuuaagcacaauuaauuaagagugaaacguaauuguacaagcaguuggucacccaccauagggcaugaucaacaccgcaaccuuuccuuuuucccccagugauucugaaaaaccccucuucccuucagcuugcuuagauguuccaaauuuaguaagcuuaaggcggccuacagaagaaaaagaaaaaaaaggccacaaaaguucccucucacuuucaguaaauaaaauaaaagcagcaacagaaauaaagaaauaaaugaaauucaaaaugaaauaaauauuguguugugcagcauuaaaaaaucaauaaaaauuaaaaaugagcaagaucuaaaaaaaaaaaaaaaaaaaaaaaaaaaaaaaaaaaaaaaaaaaaaaaaaaaaaaaaaaaaaaaaugcaucccccccccccccccccccccccccccccccaaaggcucuuuucagagccaccagaauu

SEQ ID NO: 2967 - RNA, 2130 nt, Artificial Sequence
  mRNA product Design f-1 comprising derived and/or modified sequence from HRSV(A2)__F-del_DSCav1_mut2 (opt11)
gggagagcggcucggccauuuugucccagucaguccggaggcugcggcugcagaaguaccgccugcggaguaacugcaaagaagcuuaccauggaacuucuuauccuaaaagcgaacgccauaaccacaauccuaacagcagucaccuucuguuucgccucaggacaaaacaucaccgaggaauuuuaccaauccacauguagcgcugucucaaaaggcuaccucggcgcccuccgaaccggcugguacacauccguaauaacgaucgaacucuccaacauaaaagaaaauaaaugcaacggcaccgacgccaaagucaaacuuaucaaacaagaacuagacaaauacaaaaacgccgucaccgaccuccagcuccucaugcaauccaccccagcaacaggcuccggaagcgcaaucugcucaggcgucgccguaugcaaaguacuccaccucgaaggagaagucaacaaaaucaaauccgcccuccuauccacaaacaaagcaguugucucacucuccaacgggguaagcguacugaccuucaaaguccuagaccucaaaaacuacaucgauaaacaacuccuuccaauccucaacaaacaaucaugcucuauccccaacaucgaaaccguaaucgaauuucaacaaaaaaacaaccgccuacuugaaaucacacgcgaauuuagcgucaacgcaggaguaacaacacccguguccacauauaugcucacgaacagcgaacuacuaucccugauuaacgacaugcccaucaccaacgaccaaaaaaaacuaaugagcaacaacguacaaaucguccgccaacaaagcuacucuauaaugugcaucaucaaggaagaaguccuagccuacgucguccaauuaccacucuacggcgucaucgacacacccugcuggaaacuccauacauccccccucugcaccaccaacaccaaagaaggguccaacauaugccucacucgcacagaccgcggcugguacugcgacaacgcuggcagcgucagcuucuucccccaggccgaaaccugcaaaguccaauccaacagagucuucugcgacaccaugaacucgcucacccuccccuccgaggucaaccucugcaacgucgacauauucaaccccaaauacgacugcaaaaucaugaccuccaaaaccgacgucagcucaucagucaucacaucccucggggccaucgucuccugcuacggcaaaaccaagugcaccgccucaaacaaaaaccgcggcauuaucaaaacauucuccaacggcugcgacuacgucuccaacaaaggcgucgacacagucuccgucgguaacacccucuacugcguaaauaaacaagaaggccaaucccucuacgucaaaggcgaacccaucaucaacuucuacgacccucucgucuuccccuccgacgaauuugacgccucaaucagccaaguuaacgaaaaaaucaaccaaucacucgccuucauccgcaaauccgacgaacuccuccacaacguuaacgccggcaaaucuaccacgaacaucaugaucaccaccauaaucaucguaauuaucguaauacuccuaucccucauagcaguaggccuccuacucuacugcaaagcccguuaaggacuagugaagggaacacccaaauuuaauucagccuuaagcacaauuaauuaagagugaaacguaauuguacaagcaguuggucacccaccauagggcaugaucaacaccgcaaccuuuccuuuuucccccagugauucugaaaaaccccucuucccuucagcuugcuuagauguuccaaauuuaguaagcuuaaggcggccuacagaagaaaaagaaaaaaaaggccacaaaaguucccucucacuuucaguaaauaaaauaaaagcagcaacagaaauaaagaaauaaaugaaauucaaaaugaaauaaauauuguguugugcagcauuaaaaaaucaauaaaaauuaaaaaugagcaagaucuaaaaaaaaaaaaaaaaaaaaaaaaaaaaaaaaaaaaaaaaaaaaaaaaaaaaaaaaaaaaaaaaugcaucccccccccccccccccccccccccccccccaaaggcucuuuucagagccaccagaauu

SEQ ID NO: 2968 - RNA, 1910 nt, Artificial Sequence
  mRNA product Design f-2 comprising derived and/or modified sequence from HRSV(A2)__F-del_DSCav1_mut2 (opt1)
gggagagcggcucggccauuuugucccagucaguccggaggcugcggcugcagaaguaccgccugcggaguaacugcaaagaagcuuaccauggagcugcucauccugaaggccaacgccaucaccaccauccugacggcggugaccuucugcuucgccagcggccagaacaucaccgaggaguucuaccaguccacgugcagcgccgucuccaagggguaccucggcgcccugcggaccggcugguacaccuccgugaucaccaucgagcugagcaacaucaaggagaacaagugcaacgggaccgacgccaaggugaagcucaucaagcaggagcuggacaaguacaagaacgcggucacggaccugcagcuccugaugcaguccaccccggcaaccggcuccggcuccgccaucugcagcggcgucgccgugugcaaggugcugcaccucgagggggaggucaacaagaucaagagcgcccugcuguccaccaacaaggccguggugagccucuccaacggcgucagcgugcugaccuucaaggugcuggaccucaagaacuacaucgacaagcagcugcugcccauccugaacaagcagagcugcuccauccccaacaucgagacggugaucgaguuccagcagaagaacaaccggcuccuggagaucacccgcgaguucagcgugaacgccggggucaccacccccguguccacguacaugcugaccaacagcgagcuccugucccugaucaacgacaugccgaucaccaacgaccagaagaagcucaugagcaacaacgugcagaucguccggcagcaguccuacagcaucaugugcaucaucaaggaggaggugcuggcguacgugguccagcugccccucuacggcgugaucgacacccccugcuggaagcugcacacgagcccccugugcaccaccaacaccaaggagggguccaacaucugccucacgcgcaccgaccggggcugguacugcgacaacgccggcagcgucuccuucuucccgcaggccgagaccugcaaggugcagagcaaccgcguguucugcgacaccaugaacucccugacgcugcccagcgagguaaaccucugcaacgucgacaucuucaaccccaaguacgacugcaagaucaugaccuccaagaccgacgugagcuccagcgugaucaccucccugggggccaucgucagcugcuacggcaagacgaagugcaccgccagcaacaagaaccgggggaucaucaagaccuucuccaacggcugcgacuacgugagcaacaagggcguggacaccguguccgucgggaacacccuguacugcgugaacaagcaggagggccagagccucuacgugaagggggagcccaucaucaacuucuacgacccgcuggucuuccccuccgacgaguucgacgcgagcaucucccaggugaacgagaagaucaaccagagccuggccuucauccgcaaguccgacgagcugcuccacaacgugaacgccggcaagagcacgaccaacaucaugaucaccaccaucaucaucgucaucaucgugauccugcugucccucaucgccguggggcugcugcucuacugcaaggcccggugaggacuaguggaagcauuuuccuggcugauuaaaagaaauuacucagcuauggucaucuguuccuguuagaaggcuaugcagcauauuauauacuaugcgcauguuaugaaaugcauaauaaaaaauuuuaaaaaaucuaaaagaucuaaaaaaaaaaaaaaaaaaaaaaaaaaaaaaaaaaaaaaaaaaaaaaaaaaaaaaaaaaaaaaaaugcaucccccccccccccccccccccccccccccccaaaggcucuuuucagagccaccagaauu

SEQ ID NO: 2969 - RNA, 1910 nt, Artificial Sequence
  mRNA product Design f-2 comprising derived and/or modified sequence from HRSV(A2)__F-del_DSCav1_mut2 (opt1)
gggagagcggcucggccauuuugucccagucaguccggaggcugcggcugcagaaguaccgccugcggaguaacugcaaagaagcuuaccauggagcugcucauccugaaggccaacgccaucaccaccauccugacggcggugaccuucugcuucgccagcggccagaacaucaccgaggaguucuaccaguccacgugcagcgccgucuccaagggguaccucggcgcccugcgcaccgggugguacaccagcgugaucaccaucgagcuguccaacaucaaggagaacaagugcaacggcaccgacgccaaggugaagcucaucaagcaggagcuggacaaguacaagaacgcggucacggaccugcagcuccugaugcagagcacccccgccaccggguccggcagcgccaucugcuccggcguggccgugugcaagguccugcaccucgagggggaggugaacaagaucaagagcgcgcugcuguccaccaacaaggccguggucagccucuccaacggcgugagcgugcugacguucaagguccuggaccucaagaacuacaucgacaagcagcugcugccgauccucaacaagcaguccugcagcauccccaacaucgagaccgugaucgaguuccagcagaagaacaaccggcugcuggagaucacccgcgaguucuccgugaacgccggggucaccacgcccgugagcaccuacaugcucaccaacuccgagcugcugagccucaucaacgacaugcccaucaccaacgaccagaagaagcugaugagcaacaacgugcagaucguccggcagcaguccuacagcaucaugugcaucaucaaggaggaggugcuggccuacgugguccagcucccgcuguacggcgugaucgacacgcccugcuggaagcugcacaccagcccccucugcaccaccaacacgaaggagggguccaacaucugccugacccgcaccgaccggggcugguacugcgacaacgccggcuccgugagcuucuucccccaggcggagaccugcaagguccaguccaaccgcguguucugcgacacgaugaacagccugacccucccguccgaggucaaccugugcaacguggacaucuucaaccccaaguacgacugcaagaucaugaccagcaagaccgacguguccagcuccgucaucacgagccugggggccaucguguccugcuacggcaagaccaagugcaccgccagcaacaagaaccgggggaucaucaagaccuucuccaacggcugcgacuacgugagcaacaagggcgucgacacgguguccguggggaacacccucuacugcgucaacaagcaggagggccagagccuguacgugaagggggagcccaucaucaacuucuacgacccccugguguucccgagcgacgaguucgacgccuccaucagccaggucaacgagaagaucaaccagucccucgccuucauccgcaagagcgacgagcugcugcacaacgugaacgcgggcaaguccaccaccaacaucaugaucaccacgaucaucaucgugaucaucgucauccuccugagccugaucgccguggggcuccugcuguacugcaaggcccggugaggacuaguggaagcauuuuccuggcugauuaaaagaaauuacucagcuauggucaucuguuccuguuagaaggcuaugcagcauauuauauacuaugcgcauguuaugaaaugcauaauaaaaaauuuuaaaaaaucuaaaagaucuaaaaaaaaaaaaaaaaaaaaaaaaaaaaaaaaaaaaaaaaaaaaaaaaaaaaaaaaaaaaaaaaugcaucccccccccccccccccccccccccccccccaaaggcucuuuucagagccaccagaauu

SEQ ID NO: 2970 - RNA, 1910 nt, Artificial Sequence
  mRNA product Design f-2 comprising derived and/or modified sequence from HRSV(A2)__F-del_DSCav1_mut2 (opt2)
gggagagcggcucggccauuuugucccagucaguccggaggcugcggcugcagaaguaccgccugcggaguaacugcaaagaagcuuaccauggagcuccucauccucaaggccaacgccaucaccaccauccucaccgccgucaccuucugcuucgccuccggccagaacaucaccgaggaguucuaccaguccaccugcuccgccgucuccaagggcuaccucggcgcccuccgcaccggcugguacaccuccgucaucaccaucgagcucuccaacaucaaggagaacaagugcaacggcaccgacgccaaggucaagcucaucaagcaggagcucgacaaguacaagaacgccgucaccgaccuccagcuccucaugcaguccacccccgccaccggcuccggcuccgccaucugcuccggcgucgccgucugcaagguccuccaccucgagggcgaggucaacaagaucaaguccgcccuccucuccaccaacaaggccgucgucucccucuccaacggcgucuccguccucaccuucaagguccucgaccucaagaacuacaucgacaagcagcuccuccccauccucaacaagcaguccugcuccauccccaacaucgagaccgucaucgaguuccagcagaagaacaaccgccuccucgagaucacccgcgaguucuccgucaacgccggcgucaccacccccgucuccaccuacaugcucaccaacuccgagcuccucucccucaucaacgacaugcccaucaccaacgaccagaagaagcucauguccaacaacguccagaucguccgccagcaguccuacuccaucaugugcaucaucaaggaggagguccucgccuacgucguccagcucccccucuacggcgucaucgacacccccugcuggaagcuccacaccuccccccucugcaccaccaacaccaaggagggcuccaacaucugccucacccgcaccgaccgcggcugguacugcgacaacgccggcuccgucuccuucuucccccaggccgagaccugcaagguccaguccaaccgcgucuucugcgacaccaugaacucccucacccuccccuccgaggucaaccucugcaacgucgacaucuucaaccccaaguacgacugcaagaucaugaccuccaagaccgacgucuccuccuccgucaucaccucccucggcgccaucgucuccugcuacggcaagaccaagugcaccgccuccaacaagaaccgcggcaucaucaagaccuucuccaacggcugcgacuacgucuccaacaagggcgucgacaccgucuccgucggcaacacccucuacugcgucaacaagcaggagggccagucccucuacgucaagggcgagcccaucaucaacuucuacgacccccucgucuuccccuccgacgaguucgacgccuccaucucccaggucaacgagaagaucaaccagucccucgccuucauccgcaaguccgacgagcuccuccacaacgucaacgccggcaaguccaccaccaacaucaugaucaccaccaucaucaucgucaucaucgucauccuccucucccucaucgccgucggccuccuccucuacugcaaggcccgcugaggacuaguggaagcauuuuccuggcugauuaaaagaaauuacucagcuauggucaucuguuccuguuagaaggcuaugcagcauauuauauacuaugcgcauguuaugaaaugcauaauaaaaaauuuuaaaaaaucuaaaagaucuaaaaaaaaaaaaaaaaaaaaaaaaaaaaaaaaaaaaaaaaaaaaaaaaaaaaaaaaaaaaaaaaugcaucccccccccccccccccccccccccccccccaaaggcucuuuucagagccaccagaauu

SEQ ID NO: 2971 - RNA, 1910 nt, Artificial Sequence
  mRNA product Design f-2 comprising derived and/or modified sequence from HRSV(A2)__F-del_DSCav1_mut2 (opt3)
gggagagcggcucggccauuuugucccagucaguccggaggcugcggcugcagaaguaccgccugcggaguaacugcaaagaagcuuaccauggagcugcucauccuuaaggccaacgcuauuaccacaauacugacugcagugacguucugcuuugccagcggccagaauaucaccgaagaguucuaccaauccacauguucugcggucucaaaaggguauuugggagcuuuaagaacugguugguacaccaguguuauuacaaucgaacugagcaacauuaaggagaauaaaugcaacggcaccgacgccaaggugaaacuaaucaagcaggaacucgauaaguauaaaaaugcaguaacugaccugcagcuucugaugcaguccacacccgccaccgggucuggaucggcuauauguucaggcguggcagucugcaagguguugcaccucgagggugagguuaacaaaaucaagagcgcccugcugaguacgaauaaagcuguggucucccucucuaacggggugagcguauuaacuuuuaagguucuggaucuuaagaauuacauugacaaacaauugcugccuauccuaaacaagcaguccuguucaauuccaaauaucgaaaccgugauagaguuccagcagaaaaacaauaggcuccuggaaauuacacgggaguuuagugucaacgccggagugacuaccccggugagcacauauaugcuuaccaauucugagcuguugucccucaucaacgauaugcccauuacgaacgaccaaaagaaacugaugucaaauaacguccagaucguucgccagcagagcuacaguaucaugugcauuauaaaggaagagguguuagcguauguagugcaacugccucucuacggcgucaucgauacuccauguuggaaacuucauacaucuccccugugcaccacuaauacaaaggaaggcuccaacauuuguuugacccgaacggaccgugggugguacugcgauaaugcaggaagcgugucguucuuuccucaggccgagaccuguaagguucagucuaacagaguguucugcgacacaaugaacucccuaacucugccaucagaagucaaucucugcaauguggauaucuuuaaccccaaauaugacuguaagauaaugaccaguaaaacagauguaagcuccucuguuauuacuagccugggugcuaucgugucaugcuacggcaagaccaaauguacagccaguaauaagaacagggggaucauuaagaccuucuccaauggaugcgacuaugucagcaacaaaggcguggacacugucucuguggguaauacgcuuuacuguguuaacaagcaagaggggcagucacuguaugugaaaggagagccuaucauuaacuuuuacgauccauugguauucccgagugacgaauuugaugcaagcauaucccaggucaaugagaagaucaaccagucucucgcuuucauucggaaaucggacgaacuguuacacaaugugaacgccggcaagagcacaaccaauaucaugaucacuaccauuauaaucguuauuaucgugauucugcuaucccucaucgcggucggccugcuuuuguauugcaaggcccgcugaggacuaguggaagcauuuuccuggcugauuaaaagaaauuacucagcuauggucaucuguuccuguuagaaggcuaugcagcauauuauauacuaugcgcauguuaugaaaugcauaauaaaaaauuuuaaaaaaucuaaaagaucuaaaaaaaaaaaaaaaaaaaaaaaaaaaaaaaaaaaaaaaaaaaaaaaaaaaaaaaaaaaaaaaaugcaucccccccccccccccccccccccccccccccaaaggcucuuuucagagccaccagaauu

SEQ ID NO: 2972 - RNA, 1910 nt, Artificial Sequence
  mRNA product Design f-2 comprising derived and/or modified sequence from HRSV(A2)__F-del_DSCav1_mut2 (opt4)
gggagagcggcucggccauuuugucccagucaguccggaggcugcggcugcagaaguaccgccugcggaguaacugcaaagaagcuuaccauggagcugcugauccugaaggccaacgccaucaccaccauccugaccgccgugaccuucugcuucgccagcggccagaacaucaccgaggaguucuaccagagcaccugcagcgccgugagcaagggcuaccugggcgcccugagaaccggcugguacaccagcgugaucaccaucgagcugagcaacaucaaggagaacaagugcaacggcaccgacgccaaggugaagcugaucaagcaggagcuggacaaguacaagaacgccgugaccgaccugcagcugcugaugcagagcacccccgccaccggcagcggcagcgccaucugcagcggcguggccgugugcaaggugcugcaccuggagggcgaggugaacaagaucaagagcgcccugcugagcaccaacaaggccguggugagccugagcaacggcgugagcgugcugaccuucaaggugcuggaccugaagaacuacaucgacaagcagcugcugcccauccugaacaagcagagcugcagcauccccaacaucgagaccgugaucgaguuccagcagaagaacaacagacugcuggagaucaccagagaguucagcgugaacgccggcgugaccacccccgugagcaccuacaugcugaccaacagcgagcugcugagccugaucaacgacaugcccaucaccaacgaccagaagaagcugaugagcaacaacgugcagaucgugagacagcagagcuacagcaucaugugcaucaucaaggaggaggugcuggccuacguggugcagcugccccuguacggcgugaucgacacccccugcuggaagcugcacaccagcccccugugcaccaccaacaccaaggagggcagcaacaucugccugaccagaaccgacagaggcugguacugcgacaacgccggcagcgugagcuucuucccccaggccgagaccugcaaggugcagagcaacagaguguucugcgacaccaugaacagccugacccugcccagcgaggugaaccugugcaacguggacaucuucaaccccaaguacgacugcaagaucaugaccagcaagaccgacgugagcagcagcgugaucaccagccugggcgccaucgugagcugcuacggcaagaccaagugcaccgccagcaacaagaacagaggcaucaucaagaccuucagcaacggcugcgacuacgugagcaacaagggcguggacaccgugagcgugggcaacacccuguacugcgugaacaagcaggagggccagagccuguacgugaagggcgagcccaucaucaacuucuacgacccccugguguuccccagcgacgaguucgacgccagcaucagccaggugaacgagaagaucaaccagagccuggccuucaucagaaagagcgacgagcugcugcacaacgugaacgccggcaagagcaccaccaacaucaugaucaccaccaucaucaucgugaucaucgugauccugcugagccugaucgccgugggccugcugcuguacugcaaggccagaugaggacuaguggaagcauuuuccuggcugauuaaaagaaauuacucagcuauggucaucuguuccuguuagaaggcuaugcagcauauuauauacuaugcgcauguuaugaaaugcauaauaaaaaauuuuaaaaaaucuaaaagaucuaaaaaaaaaaaaaaaaaaaaaaaaaaaaaaaaaaaaaaaaaaaaaaaaaaaaaaaaaaaaaaaaugcaucccccccccccccccccccccccccccccccaaaggcucuuuucagagccaccagaauu

SEQ ID NO: 2973 - RNA, 1910 nt, Artificial Sequence
  mRNA product Design f-2 comprising derived and/or modified sequence from HRSV(A2)__F-del_DSCav1_mut2 (opt5)
gggagagcggcucggccauuuugucccagucaguccggaggcugcggcugcagaaguaccgccugcggaguaacugcaaagaagcuuaccauggagcugcucauccugaaggccaacgcuauuaccacaauccuuacggccgugaccuucugcuuugcgagcggccagaauauuacagaagaguucuaccaauccaccuguucugcugucagcaaaggguaucugggagcccucagaacaggcugguacaccuccguuaucacaauugaacugucuaacaucaaggagaauaaaugcaacgggaccgacgccaaggugaaacuuaucaagcaggaacuggauaaguauaaaaaugcugugacggaccuccagcugcugaugcagagcacccccgccacaggauccggcucugcuauuuguagcggggucgccgugugcaagguucuccaccuggagggagaggugaacaaaaucaaguccgcgcuucugagcaccaauaaagccgucgugucucucuccaacggcguuagcgugcugacauuuaagguccuugaucugaagaauuacauugacaaacaacuccugccuauccugaacaagcagucuuguuccauuccgaauaucgaaaccgugauugaguuccagcagaaaaacaaucggcuccuggaaaucacgcgcgaguuuagcgugaacgcuggcgucacaacccccguuucuacauauaugcuuaccaauuccgagcugcucagccugaucaacgauaugccuauuaccaacgaccaaaagaaacuuauguccaauaacgugcagaucgugagacagcagucuuacagcauuaugugcaucauuaaggaagagguccuggccuaugugguucaacucccccuguacggggugaucgauacaccuuguuggaaacugcauacgagcccccucugcaccacaaauaccaaggaaggauccaacaucugucugacacggaccgaccgcggcugguacugcgauaaugcugggucugucuccuucuuuccucaggccgagacguguaaggugcagagcaacagaguuuucugcgacacaaugaacucucuuacccugccgagcgaagugaaucucugcaaugucgauauuuuuaaccccaaauaugacuguaagaucaugaccuccaaaacagaugugucuagcuccgucauuaccagccugggagcgaucgugucuugcuacggcaagacaaaauguacggccuccaauaagaaccgggggauuaucaagaccuucagcaauggaugcgacuauguuucuaacaaaggcguggacacagucuccgugggcaauacccuuuacuguguuaacaagcaagaggggcagagccuguaugugaaaggagagccuaucauuaacuuuuacgauccccucgucuucccuuccgacgaauuugaugcuucuaucagccaggugaaugagaagauuaaccagucccuggccuucauccgcaaaucugacgaacugcuccacaaugugaacgcuggcaagagcacaaccaauauuaugaucacgaccauuaucaucguuauuaucgucauucugcuuucccugaucgccguggggcuccugcuguauugcaaggccagaugaggacuaguggaagcauuuuccuggcugauuaaaagaaauuacucagcuauggucaucuguuccuguuagaaggcuaugcagcauauuauauacuaugcgcauguuaugaaaugcauaauaaaaaauuuuaaaaaaucuaaaagaucuaaaaaaaaaaaaaaaaaaaaaaaaaaaaaaaaaaaaaaaaaaaaaaaaaaaaaaaaaaaaaaaaugcaucccccccccccccccccccccccccccccccaaaggcucuuuucagagccaccagaauu

SEQ ID NO: 2974 - RNA, 1910 nt, Artificial Sequence
  mRNA product Design f-2 comprising derived and/or modified sequence from HRSV(A2)__F-del_DSCav1_mut2 (opt6)
gggagagcggcucggccauuuugucccagucaguccggaggcugcggcugcagaaguaccgccugcggaguaacugcaaagaagcuuaccauggaacuccuaauacuuaaagccaaugcaauaaccacaauacuaacagcaguaacauucugcuuugcaucaggacaaaacauaacagaagaauuuuaccaaucaacauguucagcaguaagcaaaggauaccuaggagccuuacgcacagguugguacacuuccguaauaacaauagaacucucaaauauaaaagaaaacaaaugcaacggaaccgaugcaaaaguaaaacuaauaaaacaagaauuagacaaauacaaaaacgcaguaacagaccuacaauuacuuaugcaaucaacacccgcaacaggauccggcucagcaaucuguucaggaguagcaguaugcaaaguucuccaccuagaaggcgaaguaaacaaaauaaaaucagcccuauuaucuaccaauaaagcaguaguaucacuaucaaauggaguaucuguccuaaccuucaaaguacuugaccuaaaaaauuacaucgacaaacaauuacuaccaauacuuaacaaacaaucauguucaauaccaaacauugaaacaguaauagaauuucaacaaaaaaauaacagauuauuagaaauaacccgcgaauuuucaguuaacgcaggaguaacaacaccaguauccacauacauguuaacaaauucagaacucuuaucacuuauaaacgacaugcccauaacaaacgaccaaaaaaaacucaugucuaacaauguucaaauaguucgacaacaaucauacuccauaaugugcauaauaaaagaagaaguucuagcauauguuguacaacucccacucuaugguguuauagacacaccaugcuggaaacuacauacaagccccuuaugcacuacaaacacaaaagaaggcucuaauauaugucuaacccgcacagacagaggcugguauugcgauaacgcagguucaguaucauucuuuccacaagcagaaacuugcaaaguccaauccaauagagucuucugcgacacuaugaacucacucacacucccaucugaagucaauuuauguaacgucgauaucuucaacccaaaauacgacugcaaaauaaugaccucaaaaacagacguaagcucaucagucauaacuucucuaggcgcaaucgucucauguuacggcaaaacaaaauguaccgcaucaaacaaaaaucgagguauaauaaaaaccuuuucuaacggcugcgacuacguaucaaacaaaggaguagauacuguaagugucggaaacacauuauacugcgucaacaaacaagaaggacaaucccuauauguuaaaggcgaaccuaucauuaauuucuacgacccacucgucuuuccauccgacgaauuugacgcaucaauuucccaaguaaaugaaaaaauaaaccaaucccuugcauucauaagaaaaucagaugaacuauuacacaacguaaacgcaggcaaaucaacaacaaauauaaugaucacaacaauaauaaucguaauaauaguaauccuacucucacuaauagcaguaggcuuacuauuauauugcaaagccagauaaggacuaguggaagcauuuuccuggcugauuaaaagaaauuacucagcuauggucaucuguuccuguuagaaggcuaugcagcauauuauauacuaugcgcauguuaugaaaugcauaauaaaaaauuuuaaaaaaucuaaaagaucuaaaaaaaaaaaaaaaaaaaaaaaaaaaaaaaaaaaaaaaaaaaaaaaaaaaaaaaaaaaaaaaaugcaucccccccccccccccccccccccccccccccaaaggcucuuuucagagccaccagaauu

SEQ ID NO: 2975 - RNA, 1910 nt, Artificial Sequence
  mRNA product Design f-2 comprising derived and/or modified sequence from HRSV(A2)__F-del_DSCav1_mut2 (opt11)
gggagagcggcucggccauuuugucccagucaguccggaggcugcggcugcagaaguaccgccugcggaguaacugcaaagaagcuuaccauggaacuucuuauccuaaaagcgaacgccauaaccacaauccuaacagcagucaccuucuguuucgccucaggacaaaacaucaccgaggaauuuuaccaauccacauguagcgcugucucaaaaggcuaccucggcgcccuccgaaccggcugguacacauccguaauaacgaucgaacucuccaacauaaaagaaaauaaaugcaacggcaccgacgccaaagucaaacuuaucaaacaagaacuagacaaauacaaaaacgccgucaccgaccuccagcuccucaugcaauccaccccagcaacaggcuccggaagcgcaaucugcucaggcgucgccguaugcaaaguacuccaccucgaaggagaagucaacaaaaucaaauccgcccuccuauccacaaacaaagcaguugucucacucuccaacgggguaagcguacugaccuucaaaguccuagaccucaaaaacuacaucgauaaacaacuccuuccaauccucaacaaacaaucaugcucuauccccaacaucgaaaccguaaucgaauuucaacaaaaaaacaaccgccuacuugaaaucacacgcgaauuuagcgucaacgcaggaguaacaacacccguguccacauauaugcucacgaacagcgaacuacuaucccugauuaacgacaugcccaucaccaacgaccaaaaaaaacuaaugagcaacaacguacaaaucguccgccaacaaagcuacucuauaaugugcaucaucaaggaagaaguccuagccuacgucguccaauuaccacucuacggcgucaucgacacacccugcuggaaacuccauacauccccccucugcaccaccaacaccaaagaaggguccaacauaugccucacucgcacagaccgcggcugguacugcgacaacgcuggcagcgucagcuucuucccccaggccgaaaccugcaaaguccaauccaacagagucuucugcgacaccaugaacucgcucacccuccccuccgaggucaaccucugcaacgucgacauauucaaccccaaauacgacugcaaaaucaugaccuccaaaaccgacgucagcucaucagucaucacaucccucggggccaucgucuccugcuacggcaaaaccaagugcaccgccucaaacaaaaaccgcggcauuaucaaaacauucuccaacggcugcgacuacgucuccaacaaaggcgucgacacagucuccgucgguaacacccucuacugcguaaauaaacaagaaggccaaucccucuacgucaaaggcgaacccaucaucaacuucuacgacccucucgucuuccccuccgacgaauuugacgccucaaucagccaaguuaacgaaaaaaucaaccaaucacucgccuucauccgcaaauccgacgaacuccuccacaacguuaacgccggcaaaucuaccacgaacaucaugaucaccaccauaaucaucguaauuaucguaauacuccuaucccucauagcaguaggccuccuacucuacugcaaagcccguuaaggacuaguggaagcauuuuccuggcugauuaaaagaaauuacucagcuauggucaucuguuccuguuagaaggcuaugcagcauauuauauacuaugcgcauguuaugaaaugcauaauaaaaaauuuuaaaaaaucuaaaagaucuaaaaaaaaaaaaaaaaaaaaaaaaaaaaaaaaaaaaaaaaaaaaaaaaaaaaaaaaaaaaaaaaugcaucccccccccccccccccccccccccccccccaaaggcucuuuucagagccaccagaauu

SEQ ID NO: 2976 - RNA, 1901 nt, Artificial Sequence
  mRNA product Design f-3 comprising derived and/or modified sequence from HRSV(A2)__F-del_DSCav1_mut2 (opt1)
gggagagucccgcagucggcguccagcggcucugcuuguucgugugugugucguugcaggccuuauucaagcuuaccauggagcugcucauccugaaggccaacgccaucaccaccauccugacggcggugaccuucugcuucgccagcggccagaacaucaccgaggaguucuaccaguccacgugcagcgccgucuccaagggguaccucggcgcccugcggaccggcugguacaccuccgugaucaccaucgagcugagcaacaucaaggagaacaagugcaacgggaccgacgccaaggugaagcucaucaagcaggagcuggacaaguacaagaacgcggucacggaccugcagcuccugaugcaguccaccccggcaaccggcuccggcuccgccaucugcagcggcgucgccgugugcaaggugcugcaccucgagggggaggucaacaagaucaagagcgcccugcuguccaccaacaaggccguggugagccucuccaacggcgucagcgugcugaccuucaaggugcuggaccucaagaacuacaucgacaagcagcugcugcccauccugaacaagcagagcugcuccauccccaacaucgagacggugaucgaguuccagcagaagaacaaccggcuccuggagaucacccgcgaguucagcgugaacgccggggucaccacccccguguccacguacaugcugaccaacagcgagcuccugucccugaucaacgacaugccgaucaccaacgaccagaagaagcucaugagcaacaacgugcagaucguccggcagcaguccuacagcaucaugugcaucaucaaggaggaggugcuggcguacgugguccagcugccccucuacggcgugaucgacacccccugcuggaagcugcacacgagcccccugugcaccaccaacaccaaggagggguccaacaucugccucacgcgcaccgaccggggcugguacugcgacaacgccggcagcgucuccuucuucccgcaggccgagaccugcaaggugcagagcaaccgcguguucugcgacaccaugaacucccugacgcugcccagcgagguaaaccucugcaacgucgacaucuucaaccccaaguacgacugcaagaucaugaccuccaagaccgacgugagcuccagcgugaucaccucccugggggccaucgucagcugcuacggcaagacgaagugcaccgccagcaacaagaaccgggggaucaucaagaccuucuccaacggcugcgacuacgugagcaacaagggcguggacaccguguccgucgggaacacccuguacugcgugaacaagcaggagggccagagccucuacgugaagggggagcccaucaucaacuucuacgacccgcuggucuuccccuccgacgaguucgacgcgagcaucucccaggugaacgagaagaucaaccagagccuggccuucauccgcaaguccgacgagcugcuccacaacgugaacgccggcaagagcacgaccaacaucaugaucaccaccaucaucaucgucaucaucgugauccugcugucccucaucgccguggggcugcugcucuacugcaaggcccggugaggacuaguacuggcugcaucucccuuuccucuguccuccauccuucucccaggauggugaagggggaccugguacccagugauccccaccccaggauccuaaaucaugacuuaccugcuaauaaaaacucauuggaaaagugagaagaucuaaaaaaaaaaaaaaaaaaaaaaaaaaaaaaaaaaaaaaaaaaaaaaaaaaaaaaaaaaaaaaaaugcaucccccccccccccccccccccccccccccccaaaggcucuuuucagagccaccagaauu

SEQ ID NO: 2977 - RNA, 1901 nt, Artificial Sequence
  mRNA product Design f-3 comprising derived and/or modified sequence from HRSV(A2)__F-del_DSCav1_mut2 (opt1)
gggagagucccgcagucggcguccagcggcucugcuuguucgugugugugucguugcaggccuuauucaagcuuaccauggagcugcucauccugaaggccaacgccaucaccaccauccugacggcggugaccuucugcuucgccagcggccagaacaucaccgaggaguucuaccaguccacgugcagcgccgucuccaagggguaccucggcgcccugcgcaccgggugguacaccagcgugaucaccaucgagcuguccaacaucaaggagaacaagugcaacggcaccgacgccaaggugaagcucaucaagcaggagcuggacaaguacaagaacgcggucacggaccugcagcuccugaugcagagcacccccgccaccggguccggcagcgccaucugcuccggcguggccgugugcaagguccugcaccucgagggggaggugaacaagaucaagagcgcgcugcuguccaccaacaaggccguggucagccucuccaacggcgugagcgugcugacguucaagguccuggaccucaagaacuacaucgacaagcagcugcugccgauccucaacaagcaguccugcagcauccccaacaucgagaccgugaucgaguuccagcagaagaacaaccggcugcuggagaucacccgcgaguucuccgugaacgccggggucaccacgcccgugagcaccuacaugcucaccaacuccgagcugcugagccucaucaacgacaugcccaucaccaacgaccagaagaagcugaugagcaacaacgugcagaucguccggcagcaguccuacagcaucaugugcaucaucaaggaggaggugcuggccuacgugguccagcucccgcuguacggcgugaucgacacgcccugcuggaagcugcacaccagcccccucugcaccaccaacacgaaggagggguccaacaucugccugacccgcaccgaccggggcugguacugcgacaacgccggcuccgugagcuucuucccccaggcggagaccugcaagguccaguccaaccgcguguucugcgacacgaugaacagccugacccucccguccgaggucaaccugugcaacguggacaucuucaaccccaaguacgacugcaagaucaugaccagcaagaccgacguguccagcuccgucaucacgagccugggggccaucguguccugcuacggcaagaccaagugcaccgccagcaacaagaaccgggggaucaucaagaccuucuccaacggcugcgacuacgugagcaacaagggcgucgacacgguguccguggggaacacccucuacugcgucaacaagcaggagggccagagccuguacgugaagggggagcccaucaucaacuucuacgacccccugguguucccgagcgacgaguucgacgccuccaucagccaggucaacgagaagaucaaccagucccucgccuucauccgcaagagcgacgagcugcugcacaacgugaacgcgggcaaguccaccaccaacaucaugaucaccacgaucaucaucgugaucaucgucauccuccugagccugaucgccguggggcuccugcuguacugcaaggcccggugaggacuaguacuggcugcaucucccuuuccucuguccuccauccuucucccaggauggugaagggggaccugguacccagugauccccaccccaggauccuaaaucaugacuuaccugcuaauaaaaacucauuggaaaagugagaagaucuaaaaaaaaaaaaaaaaaaaaaaaaaaaaaaaaaaaaaaaaaaaaaaaaaaaaaaaaaaaaaaaaugcaucccccccccccccccccccccccccccccccaaaggcucuuuucagagccaccagaauu

SEQ ID NO: 2978 - RNA, 1901 nt, Artificial Sequence
  mRNA product Design f-3 comprising derived and/or modified sequence from HRSV(A2)__F-del_DSCav1_mut2 (opt2)
gggagagucccgcagucggcguccagcggcucugcuuguucgugugugugucguugcaggccuuauucaagcuuaccauggagcuccucauccucaaggccaacgccaucaccaccauccucaccgccgucaccuucugcuucgccuccggccagaacaucaccgaggaguucuaccaguccaccugcuccgccgucuccaagggcuaccucggcgcccuccgcaccggcugguacaccuccgucaucaccaucgagcucuccaacaucaaggagaacaagugcaacggcaccgacgccaaggucaagcucaucaagcaggagcucgacaaguacaagaacgccgucaccgaccuccagcuccucaugcaguccacccccgccaccggcuccggcuccgccaucugcuccggcgucgccgucugcaagguccuccaccucgagggcgaggucaacaagaucaaguccgcccuccucuccaccaacaaggccgucgucucccucuccaacggcgucuccguccucaccuucaagguccucgaccucaagaacuacaucgacaagcagcuccuccccauccucaacaagcaguccugcuccauccccaacaucgagaccgucaucgaguuccagcagaagaacaaccgccuccucgagaucacccgcgaguucuccgucaacgccggcgucaccacccccgucuccaccuacaugcucaccaacuccgagcuccucucccucaucaacgacaugcccaucaccaacgaccagaagaagcucauguccaacaacguccagaucguccgccagcaguccuacuccaucaugugcaucaucaaggaggagguccucgccuacgucguccagcucccccucuacggcgucaucgacacccccugcuggaagcuccacaccuccccccucugcaccaccaacaccaaggagggcuccaacaucugccucacccgcaccgaccgcggcugguacugcgacaacgccggcuccgucuccuucuucccccaggccgagaccugcaagguccaguccaaccgcgucuucugcgacaccaugaacucccucacccuccccuccgaggucaaccucugcaacgucgacaucuucaaccccaaguacgacugcaagaucaugaccuccaagaccgacgucuccuccuccgucaucaccucccucggcgccaucgucuccugcuacggcaagaccaagugcaccgccuccaacaagaaccgcggcaucaucaagaccuucuccaacggcugcgacuacgucuccaacaagggcgucgacaccgucuccgucggcaacacccucuacugcgucaacaagcaggagggccagucccucuacgucaagggcgagcccaucaucaacuucuacgacccccucgucuuccccuccgacgaguucgacgccuccaucucccaggucaacgagaagaucaaccagucccucgccuucauccgcaaguccgacgagcuccuccacaacgucaacgccggcaaguccaccaccaacaucaugaucaccaccaucaucaucgucaucaucgucauccuccucucccucaucgccgucggccuccuccucuacugcaaggcccgcugaggacuaguacuggcugcaucucccuuuccucuguccuccauccuucucccaggauggugaagggggaccugguacccagugauccccaccccaggauccuaaaucaugacuuaccugcuaauaaaaacucauuggaaaagugagaagaucuaaaaaaaaaaaaaaaaaaaaaaaaaaaaaaaaaaaaaaaaaaaaaaaaaaaaaaaaaaaaaaaaugcaucccccccccccccccccccccccccccccccaaaggcucuuuucagagccaccagaauu

SEQ ID NO: 2979 - RNA, 1901 nt, Artificial Sequence
  mRNA product Design f-3 comprising derived and/or modified sequence from HRSV(A2)__F-del_DSCav1_mut2 (opt3)
gggagagucccgcagucggcguccagcggcucugcuuguucgugugugugucguugcaggccuuauucaagcuuaccauggagcugcucauccuuaaggccaacgcuauuaccacaauacugacugcagugacguucugcuuugccagcggccagaauaucaccgaagaguucuaccaauccacauguucugcggucucaaaaggguauuugggagcuuuaagaacugguugguacaccaguguuauuacaaucgaacugagcaacauuaaggagaauaaaugcaacggcaccgacgccaaggugaaacuaaucaagcaggaacucgauaaguauaaaaaugcaguaacugaccugcagcuucugaugcaguccacacccgccaccgggucuggaucggcuauauguucaggcguggcagucugcaagguguugcaccucgagggugagguuaacaaaaucaagagcgcccugcugaguacgaauaaagcuguggucucccucucuaacggggugagcguauuaacuuuuaagguucuggaucuuaagaauuacauugacaaacaauugcugccuauccuaaacaagcaguccuguucaauuccaaauaucgaaaccgugauagaguuccagcagaaaaacaauaggcuccuggaaauuacacgggaguuuagugucaacgccggagugacuaccccggugagcacauauaugcuuaccaauucugagcuguugucccucaucaacgauaugcccauuacgaacgaccaaaagaaacugaugucaaauaacguccagaucguucgccagcagagcuacaguaucaugugcauuauaaaggaagagguguuagcguauguagugcaacugccucucuacggcgucaucgauacuccauguuggaaacuucauacaucuccccugugcaccacuaauacaaaggaaggcuccaacauuuguuugacccgaacggaccgugggugguacugcgauaaugcaggaagcgugucguucuuuccucaggccgagaccuguaagguucagucuaacagaguguucugcgacacaaugaacucccuaacucugccaucagaagucaaucucugcaauguggauaucuuuaaccccaaauaugacuguaagauaaugaccaguaaaacagauguaagcuccucuguuauuacuagccugggugcuaucgugucaugcuacggcaagaccaaauguacagccaguaauaagaacagggggaucauuaagaccuucuccaauggaugcgacuaugucagcaacaaaggcguggacacugucucuguggguaauacgcuuuacuguguuaacaagcaagaggggcagucacuguaugugaaaggagagccuaucauuaacuuuuacgauccauugguauucccgagugacgaauuugaugcaagcauaucccaggucaaugagaagaucaaccagucucucgcuuucauucggaaaucggacgaacuguuacacaaugugaacgccggcaagagcacaaccaauaucaugaucacuaccauuauaaucguuauuaucgugauucugcuaucccucaucgcggucggccugcuuuuguauugcaaggcccgcugaggacuaguacuggcugcaucucccuuuccucuguccuccauccuucucccaggauggugaagggggaccugguacccagugauccccaccccaggauccuaaaucaugacuuaccugcuaauaaaaacucauuggaaaagugagaagaucuaaaaaaaaaaaaaaaaaaaaaaaaaaaaaaaaaaaaaaaaaaaaaaaaaaaaaaaaaaaaaaaaugcaucccccccccccccccccccccccccccccccaaaggcucuuuucagagccaccagaauu

SEQ ID NO: 2980 - RNA, 1901 nt, Artificial Sequence
  mRNA product Design f-3 comprising derived and/or modified sequence from HRSV(A2)__F-del_DSCav1_mut2 (opt4)
gggagagucccgcagucggcguccagcggcucugcuuguucgugugugugucguugcaggccuuauucaagcuuaccauggagcugcugauccugaaggccaacgccaucaccaccauccugaccgccgugaccuucugcuucgccagcggccagaacaucaccgaggaguucuaccagagcaccugcagcgccgugagcaagggcuaccugggcgcccugagaaccggcugguacaccagcgugaucaccaucgagcugagcaacaucaaggagaacaagugcaacggcaccgacgccaaggugaagcugaucaagcaggagcuggacaaguacaagaacgccgugaccgaccugcagcugcugaugcagagcacccccgccaccggcagcggcagcgccaucugcagcggcguggccgugugcaaggugcugcaccuggagggcgaggugaacaagaucaagagcgcccugcugagcaccaacaaggccguggugagccugagcaacggcgugagcgugcugaccuucaaggugcuggaccugaagaacuacaucgacaagcagcugcugcccauccugaacaagcagagcugcagcauccccaacaucgagaccgugaucgaguuccagcagaagaacaacagacugcuggagaucaccagagaguucagcgugaacgccggcgugaccacccccgugagcaccuacaugcugaccaacagcgagcugcugagccugaucaacgacaugcccaucaccaacgaccagaagaagcugaugagcaacaacgugcagaucgugagacagcagagcuacagcaucaugugcaucaucaaggaggaggugcuggccuacguggugcagcugccccuguacggcgugaucgacacccccugcuggaagcugcacaccagcccccugugcaccaccaacaccaaggagggcagcaacaucugccugaccagaaccgacagaggcugguacugcgacaacgccggcagcgugagcuucuucccccaggccgagaccugcaaggugcagagcaacagaguguucugcgacaccaugaacagccugacccugcccagcgaggugaaccugugcaacguggacaucuucaaccccaaguacgacugcaagaucaugaccagcaagaccgacgugagcagcagcgugaucaccagccugggcgccaucgugagcugcuacggcaagaccaagugcaccgccagcaacaagaacagaggcaucaucaagaccuucagcaacggcugcgacuacgugagcaacaagggcguggacaccgugagcgugggcaacacccuguacugcgugaacaagcaggagggccagagccuguacgugaagggcgagcccaucaucaacuucuacgacccccugguguuccccagcgacgaguucgacgccagcaucagccaggugaacgagaagaucaaccagagccuggccuucaucagaaagagcgacgagcugcugcacaacgugaacgccggcaagagcaccaccaacaucaugaucaccaccaucaucaucgugaucaucgugauccugcugagccugaucgccgugggccugcugcuguacugcaaggccagaugaggacuaguacuggcugcaucucccuuuccucuguccuccauccuucucccaggauggugaagggggaccugguacccagugauccccaccccaggauccuaaaucaugacuuaccugcuaauaaaaacucauuggaaaagugagaagaucuaaaaaaaaaaaaaaaaaaaaaaaaaaaaaaaaaaaaaaaaaaaaaaaaaaaaaaaaaaaaaaaaugcaucccccccccccccccccccccccccccccccaaaggcucuuuucagagccaccagaauu

SEQ ID NO: 2981 - RNA, 1901 nt, Artificial Sequence
  mRNA product Design f-3 comprising derived and/or modified sequence from HRSV(A2)__F-del_DSCav1_mut2 (opt5)
gggagagucccgcagucggcguccagcggcucugcuuguucgugugugugucguugcaggccuuauucaagcuuaccauggagcugcucauccugaaggccaacgcuauuaccacaauccuuacggccgugaccuucugcuuugcgagcggccagaauauuacagaagaguucuaccaauccaccuguucugcugucagcaaaggguaucugggagcccucagaacaggcugguacaccuccguuaucacaauugaacugucuaacaucaaggagaauaaaugcaacgggaccgacgccaaggugaaacuuaucaagcaggaacuggauaaguauaaaaaugcugugacggaccuccagcugcugaugcagagcacccccgccacaggauccggcucugcuauuuguagcggggucgccgugugcaagguucuccaccuggagggagaggugaacaaaaucaaguccgcgcuucugagcaccaauaaagccgucgugucucucuccaacggcguuagcgugcugacauuuaagguccuugaucugaagaauuacauugacaaacaacuccugccuauccugaacaagcagucuuguuccauuccgaauaucgaaaccgugauugaguuccagcagaaaaacaaucggcuccuggaaaucacgcgcgaguuuagcgugaacgcuggcgucacaacccccguuucuacauauaugcuuaccaauuccgagcugcucagccugaucaacgauaugccuauuaccaacgaccaaaagaaacuuauguccaauaacgugcagaucgugagacagcagucuuacagcauuaugugcaucauuaaggaagagguccuggccuaugugguucaacucccccuguacggggugaucgauacaccuuguuggaaacugcauacgagcccccucugcaccacaaauaccaaggaaggauccaacaucugucugacacggaccgaccgcggcugguacugcgauaaugcugggucugucuccuucuuuccucaggccgagacguguaaggugcagagcaacagaguuuucugcgacacaaugaacucucuuacccugccgagcgaagugaaucucugcaaugucgauauuuuuaaccccaaauaugacuguaagaucaugaccuccaaaacagaugugucuagcuccgucauuaccagccugggagcgaucgugucuugcuacggcaagacaaaauguacggccuccaauaagaaccgggggauuaucaagaccuucagcaauggaugcgacuauguuucuaacaaaggcguggacacagucuccgugggcaauacccuuuacuguguuaacaagcaagaggggcagagccuguaugugaaaggagagccuaucauuaacuuuuacgauccccucgucuucccuuccgacgaauuugaugcuucuaucagccaggugaaugagaagauuaaccagucccuggccuucauccgcaaaucugacgaacugcuccacaaugugaacgcuggcaagagcacaaccaauauuaugaucacgaccauuaucaucguuauuaucgucauucugcuuucccugaucgccguggggcuccugcuguauugcaaggccagaugaggacuaguacuggcugcaucucccuuuccucuguccuccauccuucucccaggauggugaagggggaccugguacccagugauccccaccccaggauccuaaaucaugacuuaccugcuaauaaaaacucauuggaaaagugagaagaucuaaaaaaaaaaaaaaaaaaaaaaaaaaaaaaaaaaaaaaaaaaaaaaaaaaaaaaaaaaaaaaaaugcaucccccccccccccccccccccccccccccccaaaggcucuuuucagagccaccagaauu

SEQ ID NO: 2982 - RNA, 1901 nt, Artificial Sequence
  mRNA product Design f-3 comprising derived and/or modified sequence from HRSV(A2)__F-del_DSCav1_mut2 (opt6)
gggagagucccgcagucggcguccagcggcucugcuuguucgugugugugucguugcaggccuuauucaagcuuaccauggaacuccuaauacuuaaagccaaugcaauaaccacaauacuaacagcaguaacauucugcuuugcaucaggacaaaacauaacagaagaauuuuaccaaucaacauguucagcaguaagcaaaggauaccuaggagccuuacgcacagguugguacacuuccguaauaacaauagaacucucaaauauaaaagaaaacaaaugcaacggaaccgaugcaaaaguaaaacuaauaaaacaagaauuagacaaauacaaaaacgcaguaacagaccuacaauuacuuaugcaaucaacacccgcaacaggauccggcucagcaaucuguucaggaguagcaguaugcaaaguucuccaccuagaaggcgaaguaaacaaaauaaaaucagcccuauuaucuaccaauaaagcaguaguaucacuaucaaauggaguaucuguccuaaccuucaaaguacuugaccuaaaaaauuacaucgacaaacaauuacuaccaauacuuaacaaacaaucauguucaauaccaaacauugaaacaguaauagaauuucaacaaaaaaauaacagauuauuagaaauaacccgcgaauuuucaguuaacgcaggaguaacaacaccaguauccacauacauguuaacaaauucagaacucuuaucacuuauaaacgacaugcccauaacaaacgaccaaaaaaaacucaugucuaacaauguucaaauaguucgacaacaaucauacuccauaaugugcauaauaaaagaagaaguucuagcauauguuguacaacucccacucuaugguguuauagacacaccaugcuggaaacuacauacaagccccuuaugcacuacaaacacaaaagaaggcucuaauauaugucuaacccgcacagacagaggcugguauugcgauaacgcagguucaguaucauucuuuccacaagcagaaacuugcaaaguccaauccaauagagucuucugcgacacuaugaacucacucacacucccaucugaagucaauuuauguaacgucgauaucuucaacccaaaauacgacugcaaaauaaugaccucaaaaacagacguaagcucaucagucauaacuucucuaggcgcaaucgucucauguuacggcaaaacaaaauguaccgcaucaaacaaaaaucgagguauaauaaaaaccuuuucuaacggcugcgacuacguaucaaacaaaggaguagauacuguaagugucggaaacacauuauacugcgucaacaaacaagaaggacaaucccuauauguuaaaggcgaaccuaucauuaauuucuacgacccacucgucuuuccauccgacgaauuugacgcaucaauuucccaaguaaaugaaaaaauaaaccaaucccuugcauucauaagaaaaucagaugaacuauuacacaacguaaacgcaggcaaaucaacaacaaauauaaugaucacaacaauaauaaucguaauaauaguaauccuacucucacuaauagcaguaggcuuacuauuauauugcaaagccagauaaggacuaguacuggcugcaucucccuuuccucuguccuccauccuucucccaggauggugaagggggaccugguacccagugauccccaccccaggauccuaaaucaugacuuaccugcuaauaaaaacucauuggaaaagugagaagaucuaaaaaaaaaaaaaaaaaaaaaaaaaaaaaaaaaaaaaaaaaaaaaaaaaaaaaaaaaaaaaaaaugcaucccccccccccccccccccccccccccccccaaaggcucuuuucagagccaccagaauu

SEQ ID NO: 2983 - RNA, 1901 nt, Artificial Sequence
  mRNA product Design f-3 comprising derived and/or modified sequence from HRSV(A2)__F-del_DSCav1_mut2 (opt11)
gggagagucccgcagucggcguccagcggcucugcuuguucgugugugugucguugcaggccuuauucaagcuuaccauggaacuucuuauccuaaaagcgaacgccauaaccacaauccuaacagcagucaccuucuguuucgccucaggacaaaacaucaccgaggaauuuuaccaauccacauguagcgcugucucaaaaggcuaccucggcgcccuccgaaccggcugguacacauccguaauaacgaucgaacucuccaacauaaaagaaaauaaaugcaacggcaccgacgccaaagucaaacuuaucaaacaagaacuagacaaauacaaaaacgccgucaccgaccuccagcuccucaugcaauccaccccagcaacaggcuccggaagcgcaaucugcucaggcgucgccguaugcaaaguacuccaccucgaaggagaagucaacaaaaucaaauccgcccuccuauccacaaacaaagcaguugucucacucuccaacgggguaagcguacugaccuucaaaguccuagaccucaaaaacuacaucgauaaacaacuccuuccaauccucaacaaacaaucaugcucuauccccaacaucgaaaccguaaucgaauuucaacaaaaaaacaaccgccuacuugaaaucacacgcgaauuuagcgucaacgcaggaguaacaacacccguguccacauauaugcucacgaacagcgaacuacuaucccugauuaacgacaugcccaucaccaacgaccaaaaaaaacuaaugagcaacaacguacaaaucguccgccaacaaagcuacucuauaaugugcaucaucaaggaagaaguccuagccuacgucguccaauuaccacucuacggcgucaucgacacacccugcuggaaacuccauacauccccccucugcaccaccaacaccaaagaaggguccaacauaugccucacucgcacagaccgcggcugguacugcgacaacgcuggcagcgucagcuucuucccccaggccgaaaccugcaaaguccaauccaacagagucuucugcgacaccaugaacucgcucacccuccccuccgaggucaaccucugcaacgucgacauauucaaccccaaauacgacugcaaaaucaugaccuccaaaaccgacgucagcucaucagucaucacaucccucggggccaucgucuccugcuacggcaaaaccaagugcaccgccucaaacaaaaaccgcggcauuaucaaaacauucuccaacggcugcgacuacgucuccaacaaaggcgucgacacagucuccgucgguaacacccucuacugcguaaauaaacaagaaggccaaucccucuacgucaaaggcgaacccaucaucaacuucuacgacccucucgucuuccccuccgacgaauuugacgccucaaucagccaaguuaacgaaaaaaucaaccaaucacucgccuucauccgcaaauccgacgaacuccuccacaacguuaacgccggcaaaucuaccacgaacaucaugaucaccaccauaaucaucguaauuaucguaauacuccuaucccucauagcaguaggccuccuacucuacugcaaagcccguuaaggacuaguacuggcugcaucucccuuuccucuguccuccauccuucucccaggauggugaagggggaccugguacccagugauccccaccccaggauccuaaaucaugacuuaccugcuaauaaaaacucauuggaaaagugagaagaucuaaaaaaaaaaaaaaaaaaaaaaaaaaaaaaaaaaaaaaaaaaaaaaaaaaaaaaaaaaaaaaaaugcaucccccccccccccccccccccccccccccccaaaggcucuuuucagagccaccagaauu

SEQ ID NO: 2984 - RNA, 2117 nt, Artificial Sequence
  mRNA product Design f-4 comprising derived and/or modified sequence from HRSV(A2)__F-del_DSCav1_mut2 (opt1)
gggagagucccgcagucggcguccagcggcucugcuuguucgugugugugucguugcaggccuuauucaagcuuaccauggagcugcucauccugaaggccaacgccaucaccaccauccugacggcggugaccuucugcuucgccagcggccagaacaucaccgaggaguucuaccaguccacgugcagcgccgucuccaagggguaccucggcgcccugcggaccggcugguacaccuccgugaucaccaucgagcugagcaacaucaaggagaacaagugcaacgggaccgacgccaaggugaagcucaucaagcaggagcuggacaaguacaagaacgcggucacggaccugcagcuccugaugcaguccaccccggcaaccggcuccggcuccgccaucugcagcggcgucgccgugugcaaggugcugcaccucgagggggaggucaacaagaucaagagcgcccugcuguccaccaacaaggccguggugagccucuccaacggcgucagcgugcugaccuucaaggugcuggaccucaagaacuacaucgacaagcagcugcugcccauccugaacaagcagagcugcuccauccccaacaucgagacggugaucgaguuccagcagaagaacaaccggcuccuggagaucacccgcgaguucagcgugaacgccggggucaccacccccguguccacguacaugcugaccaacagcgagcuccugucccugaucaacgacaugccgaucaccaacgaccagaagaagcucaugagcaacaacgugcagaucguccggcagcaguccuacagcaucaugugcaucaucaaggaggaggugcuggcguacgugguccagcugccccucuacggcgugaucgacacccccugcuggaagcugcacacgagcccccugugcaccaccaacaccaaggagggguccaacaucugccucacgcgcaccgaccggggcugguacugcgacaacgccggcagcgucuccuucuucccgcaggccgagaccugcaaggugcagagcaaccgcguguucugcgacaccaugaacucccugacgcugcccagcgagguaaaccucugcaacgucgacaucuucaaccccaaguacgacugcaagaucaugaccuccaagaccgacgugagcuccagcgugaucaccucccugggggccaucgucagcugcuacggcaagacgaagugcaccgccagcaacaagaaccgggggaucaucaagaccuucuccaacggcugcgacuacgugagcaacaagggcguggacaccguguccgucgggaacacccuguacugcgugaacaagcaggagggccagagccucuacgugaagggggagcccaucaucaacuucuacgacccgcuggucuuccccuccgacgaguucgacgcgagcaucucccaggugaacgagaagaucaaccagagccuggccuucauccgcaaguccgacgagcugcuccacaacgugaacgccggcaagagcacgaccaacaucaugaucaccaccaucaucaucgucaucaucgugauccugcugucccucaucgccguggggcugcugcucuacugcaaggcccggugaggacuagugaagggaacacccaaauuuaauucagccuuaagcacaauuaauuaagagugaaacguaauuguacaagcaguuggucacccaccauagggcaugaucaacaccgcaaccuuuccuuuuucccccagugauucugaaaaaccccucuucccuucagcuugcuuagauguuccaaauuuaguaagcuuaaggcggccuacagaagaaaaagaaaaaaaaggccacaaaaguucccucucacuuucaguaaauaaaauaaaagcagcaacagaaauaaagaaauaaaugaaauucaaaaugaaauaaauauuguguugugcagcauuaaaaaaucaauaaaaauuaaaaaugagcaagaucuaaaaaaaaaaaaaaaaaaaaaaaaaaaaaaaaaaaaaaaaaaaaaaaaaaaaaaaaaaaaaaaaugcaucccccccccccccccccccccccccccccccaaaggcucuuuucagagccaccagaauu

SEQ ID NO: 2985 - RNA, 2117 nt, Artificial Sequence
  mRNA product Design f-4 comprising derived and/or modified sequence from HRSV(A2)__F-del_DSCav1_mut2 (opt1)
gggagagucccgcagucggcguccagcggcucugcuuguucgugugugugucguugcaggccuuauucaagcuuaccauggagcugcucauccugaaggccaacgccaucaccaccauccugacggcggugaccuucugcuucgccagcggccagaacaucaccgaggaguucuaccaguccacgugcagcgccgucuccaagggguaccucggcgcccugcgcaccgggugguacaccagcgugaucaccaucgagcuguccaacaucaaggagaacaagugcaacggcaccgacgccaaggugaagcucaucaagcaggagcuggacaaguacaagaacgcggucacggaccugcagcuccugaugcagagcacccccgccaccggguccggcagcgccaucugcuccggcguggccgugugcaagguccugcaccucgagggggaggugaacaagaucaagagcgcgcugcuguccaccaacaaggccguggucagccucuccaacggcgugagcgugcugacguucaagguccuggaccucaagaacuacaucgacaagcagcugcugccgauccucaacaagcaguccugcagcauccccaacaucgagaccgugaucgaguuccagcagaagaacaaccggcugcuggagaucacccgcgaguucuccgugaacgccggggucaccacgcccgugagcaccuacaugcucaccaacuccgagcugcugagccucaucaacgacaugcccaucaccaacgaccagaagaagcugaugagcaacaacgugcagaucguccggcagcaguccuacagcaucaugugcaucaucaaggaggaggugcuggccuacgugguccagcucccgcuguacggcgugaucgacacgcccugcuggaagcugcacaccagcccccucugcaccaccaacacgaaggagggguccaacaucugccugacccgcaccgaccggggcugguacugcgacaacgccggcuccgugagcuucuucccccaggcggagaccugcaagguccaguccaaccgcguguucugcgacacgaugaacagccugacccucccguccgaggucaaccugugcaacguggacaucuucaaccccaaguacgacugcaagaucaugaccagcaagaccgacguguccagcuccgucaucacgagccugggggccaucguguccugcuacggcaagaccaagugcaccgccagcaacaagaaccgggggaucaucaagaccuucuccaacggcugcgacuacgugagcaacaagggcgucgacacgguguccguggggaacacccucuacugcgucaacaagcaggagggccagagccuguacgugaagggggagcccaucaucaacuucuacgacccccugguguucccgagcgacgaguucgacgccuccaucagccaggucaacgagaagaucaaccagucccucgccuucauccgcaagagcgacgagcugcugcacaacgugaacgcgggcaaguccaccaccaacaucaugaucaccacgaucaucaucgugaucaucgucauccuccugagccugaucgccguggggcuccugcuguacugcaaggcccggugaggacuagugaagggaacacccaaauuuaauucagccuuaagcacaauuaauuaagagugaaacguaauuguacaagcaguuggucacccaccauagggcaugaucaacaccgcaaccuuuccuuuuucccccagugauucugaaaaaccccucuucccuucagcuugcuuagauguuccaaauuuaguaagcuuaaggcggccuacagaagaaaaagaaaaaaaaggccacaaaaguucccucucacuuucaguaaauaaaauaaaagcagcaacagaaauaaagaaauaaaugaaauucaaaaugaaauaaauauuguguugugcagcauuaaaaaaucaauaaaaauuaaaaaugagcaagaucuaaaaaaaaaaaaaaaaaaaaaaaaaaaaaaaaaaaaaaaaaaaaaaaaaaaaaaaaaaaaaaaaugcaucccccccccccccccccccccccccccccccaaaggcucuuuucagagccaccagaauu

SEQ ID NO: 2986 - RNA, 2117 nt, Artificial Sequence
  mRNA product Design f-4 comprising derived and/or modified sequence from HRSV(A2)__F-del_DSCav1_mut2 (opt2)
gggagagucccgcagucggcguccagcggcucugcuuguucgugugugugucguugcaggccuuauucaagcuuaccauggagcuccucauccucaaggccaacgccaucaccaccauccucaccgccgucaccuucugcuucgccuccggccagaacaucaccgaggaguucuaccaguccaccugcuccgccgucuccaagggcuaccucggcgcccuccgcaccggcugguacaccuccgucaucaccaucgagcucuccaacaucaaggagaacaagugcaacggcaccgacgccaaggucaagcucaucaagcaggagcucgacaaguacaagaacgccgucaccgaccuccagcuccucaugcaguccacccccgccaccggcuccggcuccgccaucugcuccggcgucgccgucugcaagguccuccaccucgagggcgaggucaacaagaucaaguccgcccuccucuccaccaacaaggccgucgucucccucuccaacggcgucuccguccucaccuucaagguccucgaccucaagaacuacaucgacaagcagcuccuccccauccucaacaagcaguccugcuccauccccaacaucgagaccgucaucgaguuccagcagaagaacaaccgccuccucgagaucacccgcgaguucuccgucaacgccggcgucaccacccccgucuccaccuacaugcucaccaacuccgagcuccucucccucaucaacgacaugcccaucaccaacgaccagaagaagcucauguccaacaacguccagaucguccgccagcaguccuacuccaucaugugcaucaucaaggaggagguccucgccuacgucguccagcucccccucuacggcgucaucgacacccccugcuggaagcuccacaccuccccccucugcaccaccaacaccaaggagggcuccaacaucugccucacccgcaccgaccgcggcugguacugcgacaacgccggcuccgucuccuucuucccccaggccgagaccugcaagguccaguccaaccgcgucuucugcgacaccaugaacucccucacccuccccuccgaggucaaccucugcaacgucgacaucuucaaccccaaguacgacugcaagaucaugaccuccaagaccgacgucuccuccuccgucaucaccucccucggcgccaucgucuccugcuacggcaagaccaagugcaccgccuccaacaagaaccgcggcaucaucaagaccuucuccaacggcugcgacuacgucuccaacaagggcgucgacaccgucuccgucggcaacacccucuacugcgucaacaagcaggagggccagucccucuacgucaagggcgagcccaucaucaacuucuacgacccccucgucuuccccuccgacgaguucgacgccuccaucucccaggucaacgagaagaucaaccagucccucgccuucauccgcaaguccgacgagcuccuccacaacgucaacgccggcaaguccaccaccaacaucaugaucaccaccaucaucaucgucaucaucgucauccuccucucccucaucgccgucggccuccuccucuacugcaaggcccgcugaggacuagugaagggaacacccaaauuuaauucagccuuaagcacaauuaauuaagagugaaacguaauuguacaagcaguuggucacccaccauagggcaugaucaacaccgcaaccuuuccuuuuucccccagugauucugaaaaaccccucuucccuucagcuugcuuagauguuccaaauuuaguaagcuuaaggcggccuacagaagaaaaagaaaaaaaaggccacaaaaguucccucucacuuucaguaaauaaaauaaaagcagcaacagaaauaaagaaauaaaugaaauucaaaaugaaauaaauauuguguugugcagcauuaaaaaaucaauaaaaauuaaaaaugagcaagaucuaaaaaaaaaaaaaaaaaaaaaaaaaaaaaaaaaaaaaaaaaaaaaaaaaaaaaaaaaaaaaaaaugcaucccccccccccccccccccccccccccccccaaaggcucuuuucagagccaccagaauu

SEQ ID NO: 2987 - RNA, 2117 nt, Artificial Sequence
  mRNA product Design f-4 comprising derived and/or modified sequence from HRSV(A2)__F-del_DSCav1_mut2 (opt3)
gggagagucccgcagucggcguccagcggcucugcuuguucgugugugugucguugcaggccuuauucaagcuuaccauggagcugcucauccuuaaggccaacgcuauuaccacaauacugacugcagugacguucugcuuugccagcggccagaauaucaccgaagaguucuaccaauccacauguucugcggucucaaaaggguauuugggagcuuuaagaacugguugguacaccaguguuauuacaaucgaacugagcaacauuaaggagaauaaaugcaacggcaccgacgccaaggugaaacuaaucaagcaggaacucgauaaguauaaaaaugcaguaacugaccugcagcuucugaugcaguccacacccgccaccgggucuggaucggcuauauguucaggcguggcagucugcaagguguugcaccucgagggugagguuaacaaaaucaagagcgcccugcugaguacgaauaaagcuguggucucccucucuaacggggugagcguauuaacuuuuaagguucuggaucuuaagaauuacauugacaaacaauugcugccuauccuaaacaagcaguccuguucaauuccaaauaucgaaaccgugauagaguuccagcagaaaaacaauaggcuccuggaaauuacacgggaguuuagugucaacgccggagugacuaccccggugagcacauauaugcuuaccaauucugagcuguugucccucaucaacgauaugcccauuacgaacgaccaaaagaaacugaugucaaauaacguccagaucguucgccagcagagcuacaguaucaugugcauuauaaaggaagagguguuagcguauguagugcaacugccucucuacggcgucaucgauacuccauguuggaaacuucauacaucuccccugugcaccacuaauacaaaggaaggcuccaacauuuguuugacccgaacggaccgugggugguacugcgauaaugcaggaagcgugucguucuuuccucaggccgagaccuguaagguucagucuaacagaguguucugcgacacaaugaacucccuaacucugccaucagaagucaaucucugcaauguggauaucuuuaaccccaaauaugacuguaagauaaugaccaguaaaacagauguaagcuccucuguuauuacuagccugggugcuaucgugucaugcuacggcaagaccaaauguacagccaguaauaagaacagggggaucauuaagaccuucuccaauggaugcgacuaugucagcaacaaaggcguggacacugucucuguggguaauacgcuuuacuguguuaacaagcaagaggggcagucacuguaugugaaaggagagccuaucauuaacuuuuacgauccauugguauucccgagugacgaauuugaugcaagcauaucccaggucaaugagaagaucaaccagucucucgcuuucauucggaaaucggacgaacuguuacacaaugugaacgccggcaagagcacaaccaauaucaugaucacuaccauuauaaucguuauuaucgugauucugcuaucccucaucgcggucggccugcuuuuguauugcaaggcccgcugaggacuagugaagggaacacccaaauuuaauucagccuuaagcacaauuaauuaagagugaaacguaauuguacaagcaguuggucacccaccauagggcaugaucaacaccgcaaccuuuccuuuuucccccagugauucugaaaaaccccucuucccuucagcuugcuuagauguuccaaauuuaguaagcuuaaggcggccuacagaagaaaaagaaaaaaaaggccacaaaaguucccucucacuuucaguaaauaaaauaaaagcagcaacagaaauaaagaaauaaaugaaauucaaaaugaaauaaauauuguguugugcagcauuaaaaaaucaauaaaaauuaaaaaugagcaagaucuaaaaaaaaaaaaaaaaaaaaaaaaaaaaaaaaaaaaaaaaaaaaaaaaaaaaaaaaaaaaaaaaugcaucccccccccccccccccccccccccccccccaaaggcucuuuucagagccaccagaauu

SEQ ID NO: 2988 - RNA, 2117 nt, Artificial Sequence
  mRNA product Design f-4 comprising derived and/or modified sequence from HRSV(A2)__F-del_DSCav1_mut2 (opt4)
gggagagucccgcagucggcguccagcggcucugcuuguucgugugugugucguugcaggccuuauucaagcuuaccauggagcugcugauccugaaggccaacgccaucaccaccauccugaccgccgugaccuucugcuucgccagcggccagaacaucaccgaggaguucuaccagagcaccugcagcgccgugagcaagggcuaccugggcgcccugagaaccggcugguacaccagcgugaucaccaucgagcugagcaacaucaaggagaacaagugcaacggcaccgacgccaaggugaagcugaucaagcaggagcuggacaaguacaagaacgccgugaccgaccugcagcugcugaugcagagcacccccgccaccggcagcggcagcgccaucugcagcggcguggccgugugcaaggugcugcaccuggagggcgaggugaacaagaucaagagcgcccugcugagcaccaacaaggccguggugagccugagcaacggcgugagcgugcugaccuucaaggugcuggaccugaagaacuacaucgacaagcagcugcugcccauccugaacaagcagagcugcagcauccccaacaucgagaccgugaucgaguuccagcagaagaacaacagacugcuggagaucaccagagaguucagcgugaacgccggcgugaccacccccgugagcaccuacaugcugaccaacagcgagcugcugagccugaucaacgacaugcccaucaccaacgaccagaagaagcugaugagcaacaacgugcagaucgugagacagcagagcuacagcaucaugugcaucaucaaggaggaggugcuggccuacguggugcagcugccccuguacggcgugaucgacacccccugcuggaagcugcacaccagcccccugugcaccaccaacaccaaggagggcagcaacaucugccugaccagaaccgacagaggcugguacugcgacaacgccggcagcgugagcuucuucccccaggccgagaccugcaaggugcagagcaacagaguguucugcgacaccaugaacagccugacccugcccagcgaggugaaccugugcaacguggacaucuucaaccccaaguacgacugcaagaucaugaccagcaagaccgacgugagcagcagcgugaucaccagccugggcgccaucgugagcugcuacggcaagaccaagugcaccgccagcaacaagaacagaggcaucaucaagaccuucagcaacggcugcgacuacgugagcaacaagggcguggacaccgugagcgugggcaacacccuguacugcgugaacaagcaggagggccagagccuguacgugaagggcgagcccaucaucaacuucuacgacccccugguguuccccagcgacgaguucgacgccagcaucagccaggugaacgagaagaucaaccagagccuggccuucaucagaaagagcgacgagcugcugcacaacgugaacgccggcaagagcaccaccaacaucaugaucaccaccaucaucaucgugaucaucgugauccugcugagccugaucgccgugggccugcugcuguacugcaaggccagaugaggacuagugaagggaacacccaaauuuaauucagccuuaagcacaauuaauuaagagugaaacguaauuguacaagcaguuggucacccaccauagggcaugaucaacaccgcaaccuuuccuuuuucccccagugauucugaaaaaccccucuucccuucagcuugcuuagauguuccaaauuuaguaagcuuaaggcggccuacagaagaaaaagaaaaaaaaggccacaaaaguucccucucacuuucaguaaauaaaauaaaagcagcaacagaaauaaagaaauaaaugaaauucaaaaugaaauaaauauuguguugugcagcauuaaaaaaucaauaaaaauuaaaaaugagcaagaucuaaaaaaaaaaaaaaaaaaaaaaaaaaaaaaaaaaaaaaaaaaaaaaaaaaaaaaaaaaaaaaaaugcaucccccccccccccccccccccccccccccccaaaggcucuuuucagagccaccagaauu

SEQ ID NO: 2989 - RNA, 2117 nt, Artificial Sequence
  mRNA product Design f-4 comprising derived and/or modified sequence from HRSV(A2)__F-del_DSCav1_mut2 (opt5)
gggagagucccgcagucggcguccagcggcucugcuuguucgugugugugucguugcaggccuuauucaagcuuaccauggagcugcucauccugaaggccaacgcuauuaccacaauccuuacggccgugaccuucugcuuugcgagcggccagaauauuacagaagaguucuaccaauccaccuguucugcugucagcaaaggguaucugggagcccucagaacaggcugguacaccuccguuaucacaauugaacugucuaacaucaaggagaauaaaugcaacgggaccgacgccaaggugaaacuuaucaagcaggaacuggauaaguauaaaaaugcugugacggaccuccagcugcugaugcagagcacccccgccacaggauccggcucugcuauuuguagcggggucgccgugugcaagguucuccaccuggagggagaggugaacaaaaucaaguccgcgcuucugagcaccaauaaagccgucgugucucucuccaacggcguuagcgugcugacauuuaagguccuugaucugaagaauuacauugacaaacaacuccugccuauccugaacaagcagucuuguuccauuccgaauaucgaaaccgugauugaguuccagcagaaaaacaaucggcuccuggaaaucacgcgcgaguuuagcgugaacgcuggcgucacaacccccguuucuacauauaugcuuaccaauuccgagcugcucagccugaucaacgauaugccuauuaccaacgaccaaaagaaacuuauguccaauaacgugcagaucgugagacagcagucuuacagcauuaugugcaucauuaaggaagagguccuggccuaugugguucaacucccccuguacggggugaucgauacaccuuguuggaaacugcauacgagcccccucugcaccacaaauaccaaggaaggauccaacaucugucugacacggaccgaccgcggcugguacugcgauaaugcugggucugucuccuucuuuccucaggccgagacguguaaggugcagagcaacagaguuuucugcgacacaaugaacucucuuacccugccgagcgaagugaaucucugcaaugucgauauuuuuaaccccaaauaugacuguaagaucaugaccuccaaaacagaugugucuagcuccgucauuaccagccugggagcgaucgugucuugcuacggcaagacaaaauguacggccuccaauaagaaccgggggauuaucaagaccuucagcaauggaugcgacuauguuucuaacaaaggcguggacacagucuccgugggcaauacccuuuacuguguuaacaagcaagaggggcagagccuguaugugaaaggagagccuaucauuaacuuuuacgauccccucgucuucccuuccgacgaauuugaugcuucuaucagccaggugaaugagaagauuaaccagucccuggccuucauccgcaaaucugacgaacugcuccacaaugugaacgcuggcaagagcacaaccaauauuaugaucacgaccauuaucaucguuauuaucgucauucugcuuucccugaucgccguggggcuccugcuguauugcaaggccagaugaggacuagugaagggaacacccaaauuuaauucagccuuaagcacaauuaauuaagagugaaacguaauuguacaagcaguuggucacccaccauagggcaugaucaacaccgcaaccuuuccuuuuucccccagugauucugaaaaaccccucuucccuucagcuugcuuagauguuccaaauuuaguaagcuuaaggcggccuacagaagaaaaagaaaaaaaaggccacaaaaguucccucucacuuucaguaaauaaaauaaaagcagcaacagaaauaaagaaauaaaugaaauucaaaaugaaauaaauauuguguugugcagcauuaaaaaaucaauaaaaauuaaaaaugagcaagaucuaaaaaaaaaaaaaaaaaaaaaaaaaaaaaaaaaaaaaaaaaaaaaaaaaaaaaaaaaaaaaaaaugcaucccccccccccccccccccccccccccccccaaaggcucuuuucagagccaccagaauu

SEQ ID NO: 2990 - RNA, 2117 nt, Artificial Sequence
  mRNA product Design f-4 comprising derived and/or modified sequence from HRSV(A2)__F-del_DSCav1_mut2 (opt6)
gggagagucccgcagucggcguccagcggcucugcuuguucgugugugugucguugcaggccuuauucaagcuuaccauggaacuccuaauacuuaaagccaaugcaauaaccacaauacuaacagcaguaacauucugcuuugcaucaggacaaaacauaacagaagaauuuuaccaaucaacauguucagcaguaagcaaaggauaccuaggagccuuacgcacagguugguacacuuccguaauaacaauagaacucucaaauauaaaagaaaacaaaugcaacggaaccgaugcaaaaguaaaacuaauaaaacaagaauuagacaaauacaaaaacgcaguaacagaccuacaauuacuuaugcaaucaacacccgcaacaggauccggcucagcaaucuguucaggaguagcaguaugcaaaguucuccaccuagaaggcgaaguaaacaaaauaaaaucagcccuauuaucuaccaauaaagcaguaguaucacuaucaaauggaguaucuguccuaaccuucaaaguacuugaccuaaaaaauuacaucgacaaacaauuacuaccaauacuuaacaaacaaucauguucaauaccaaacauugaaacaguaauagaauuucaacaaaaaaauaacagauuauuagaaauaacccgcgaauuuucaguuaacgcaggaguaacaacaccaguauccacauacauguuaacaaauucagaacucuuaucacuuauaaacgacaugcccauaacaaacgaccaaaaaaaacucaugucuaacaauguucaaauaguucgacaacaaucauacuccauaaugugcauaauaaaagaagaaguucuagcauauguuguacaacucccacucuaugguguuauagacacaccaugcuggaaacuacauacaagccccuuaugcacuacaaacacaaaagaaggcucuaauauaugucuaacccgcacagacagaggcugguauugcgauaacgcagguucaguaucauucuuuccacaagcagaaacuugcaaaguccaauccaauagagucuucugcgacacuaugaacucacucacacucccaucugaagucaauuuauguaacgucgauaucuucaacccaaaauacgacugcaaaauaaugaccucaaaaacagacguaagcucaucagucauaacuucucuaggcgcaaucgucucauguuacggcaaaacaaaauguaccgcaucaaacaaaaaucgagguauaauaaaaaccuuuucuaacggcugcgacuacguaucaaacaaaggaguagauacuguaagugucggaaacacauuauacugcgucaacaaacaagaaggacaaucccuauauguuaaaggcgaaccuaucauuaauuucuacgacccacucgucuuuccauccgacgaauuugacgcaucaauuucccaaguaaaugaaaaaauaaaccaaucccuugcauucauaagaaaaucagaugaacuauuacacaacguaaacgcaggcaaaucaacaacaaauauaaugaucacaacaauaauaaucguaauaauaguaauccuacucucacuaauagcaguaggcuuacuauuauauugcaaagccagauaaggacuagugaagggaacacccaaauuuaauucagccuuaagcacaauuaauuaagagugaaacguaauuguacaagcaguuggucacccaccauagggcaugaucaacaccgcaaccuuuccuuuuucccccagugauucugaaaaaccccucuucccuucagcuugcuuagauguuccaaauuuaguaagcuuaaggcggccuacagaagaaaaagaaaaaaaaggccacaaaaguucccucucacuuucaguaaauaaaauaaaagcagcaacagaaauaaagaaauaaaugaaauucaaaaugaaauaaauauuguguugugcagcauuaaaaaaucaauaaaaauuaaaaaugagcaagaucuaaaaaaaaaaaaaaaaaaaaaaaaaaaaaaaaaaaaaaaaaaaaaaaaaaaaaaaaaaaaaaaaugcaucccccccccccccccccccccccccccccccaaaggcucuuuucagagccaccagaauu

SEQ ID NO: 2991 - RNA, 2117 nt, Artificial Sequence
  mRNA product Design f-4 comprising derived and/or modified sequence from HRSV(A2)__F-del_DSCav1_mut2 (opt11)
gggagagucccgcagucggcguccagcggcucugcuuguucgugugugugucguugcaggccuuauucaagcuuaccauggaacuucuuauccuaaaagcgaacgccauaaccacaauccuaacagcagucaccuucuguuucgccucaggacaaaacaucaccgaggaauuuuaccaauccacauguagcgcugucucaaaaggcuaccucggcgcccuccgaaccggcugguacacauccguaauaacgaucgaacucuccaacauaaaagaaaauaaaugcaacggcaccgacgccaaagucaaacuuaucaaacaagaacuagacaaauacaaaaacgccgucaccgaccuccagcuccucaugcaauccaccccagcaacaggcuccggaagcgcaaucugcucaggcgucgccguaugcaaaguacuccaccucgaaggagaagucaacaaaaucaaauccgcccuccuauccacaaacaaagcaguugucucacucuccaacgggguaagcguacugaccuucaaaguccuagaccucaaaaacuacaucgauaaacaacuccuuccaauccucaacaaacaaucaugcucuauccccaacaucgaaaccguaaucgaauuucaacaaaaaaacaaccgccuacuugaaaucacacgcgaauuuagcgucaacgcaggaguaacaacacccguguccacauauaugcucacgaacagcgaacuacuaucccugauuaacgacaugcccaucaccaacgaccaaaaaaaacuaaugagcaacaacguacaaaucguccgccaacaaagcuacucuauaaugugcaucaucaaggaagaaguccuagccuacgucguccaauuaccacucuacggcgucaucgacacacccugcuggaaacuccauacauccccccucugcaccaccaacaccaaagaaggguccaacauaugccucacucgcacagaccgcggcugguacugcgacaacgcuggcagcgucagcuucuucccccaggccgaaaccugcaaaguccaauccaacagagucuucugcgacaccaugaacucgcucacccuccccuccgaggucaaccucugcaacgucgacauauucaaccccaaauacgacugcaaaaucaugaccuccaaaaccgacgucagcucaucagucaucacaucccucggggccaucgucuccugcuacggcaaaaccaagugcaccgccucaaacaaaaaccgcggcauuaucaaaacauucuccaacggcugcgacuacgucuccaacaaaggcgucgacacagucuccgucgguaacacccucuacugcguaaauaaacaagaaggccaaucccucuacgucaaaggcgaacccaucaucaacuucuacgacccucucgucuuccccuccgacgaauuugacgccucaaucagccaaguuaacgaaaaaaucaaccaaucacucgccuucauccgcaaauccgacgaacuccuccacaacguuaacgccggcaaaucuaccacgaacaucaugaucaccaccauaaucaucguaauuaucguaauacuccuaucccucauagcaguaggccuccuacucuacugcaaagcccguuaaggacuagugaagggaacacccaaauuuaauucagccuuaagcacaauuaauuaagagugaaacguaauuguacaagcaguuggucacccaccauagggcaugaucaacaccgcaaccuuuccuuuuucccccagugauucugaaaaaccccucuucccuucagcuugcuuagauguuccaaauuuaguaagcuuaaggcggccuacagaagaaaaagaaaaaaaaggccacaaaaguucccucucacuuucaguaaauaaaauaaaagcagcaacagaaauaaagaaauaaaugaaauucaaaaugaaauaaauauuguguugugcagcauuaaaaaaucaauaaaaauuaaaaaugagcaagaucuaaaaaaaaaaaaaaaaaaaaaaaaaaaaaaaaaaaaaaaaaaaaaaaaaaaaaaaaaaaaaaaaugcaucccccccccccccccccccccccccccccccaaaggcucuuuucagagccaccagaauu

SEQ ID NO: 2992 - RNA, 1893 nt, Artificial Sequence
  mRNA product Design f-5 comprising derived and/or modified sequence from HRSV(A2)__F-del_DSCav1_mut2 (opt1)
gggagacuuucccauucuguagcagaauuugguguugccuguggucuuggucccgcggagaagcuuaccauggagcugcucauccugaaggccaacgccaucaccaccauccugacggcggugaccuucugcuucgccagcggccagaacaucaccgaggaguucuaccaguccacgugcagcgccgucuccaagggguaccucggcgcccugcggaccggcugguacaccuccgugaucaccaucgagcugagcaacaucaaggagaacaagugcaacgggaccgacgccaaggugaagcucaucaagcaggagcuggacaaguacaagaacgcggucacggaccugcagcuccugaugcaguccaccccggcaaccggcuccggcuccgccaucugcagcggcgucgccgugugcaaggugcugcaccucgagggggaggucaacaagaucaagagcgcccugcuguccaccaacaaggccguggugagccucuccaacggcgucagcgugcugaccuucaaggugcuggaccucaagaacuacaucgacaagcagcugcugcccauccugaacaagcagagcugcuccauccccaacaucgagacggugaucgaguuccagcagaagaacaaccggcuccuggagaucacccgcgaguucagcgugaacgccggggucaccacccccguguccacguacaugcugaccaacagcgagcuccugucccugaucaacgacaugccgaucaccaacgaccagaagaagcucaugagcaacaacgugcagaucguccggcagcaguccuacagcaucaugugcaucaucaaggaggaggugcuggcguacgugguccagcugccccucuacggcgugaucgacacccccugcuggaagcugcacacgagcccccugugcaccaccaacaccaaggagggguccaacaucugccucacgcgcaccgaccggggcugguacugcgacaacgccggcagcgucuccuucuucccgcaggccgagaccugcaaggugcagagcaaccgcguguucugcgacaccaugaacucccugacgcugcccagcgagguaaaccucugcaacgucgacaucuucaaccccaaguacgacugcaagaucaugaccuccaagaccgacgugagcuccagcgugaucaccucccugggggccaucgucagcugcuacggcaagacgaagugcaccgccagcaacaagaaccgggggaucaucaagaccuucuccaacggcugcgacuacgugagcaacaagggcguggacaccguguccgucgggaacacccuguacugcgugaacaagcaggagggccagagccucuacgugaagggggagcccaucaucaacuucuacgacccgcuggucuuccccuccgacgaguucgacgcgagcaucucccaggugaacgagaagaucaaccagagccuggccuucauccgcaaguccgacgagcugcuccacaacgugaacgccggcaagagcacgaccaacaucaugaucaccaccaucaucaucgucaucaucgugauccugcugucccucaucgccguggggcugcugcucuacugcaaggcccggugaggacuaguacuggcugcaucucccuuuccucuguccuccauccuucucccaggauggugaagggggaccugguacccagugauccccaccccaggauccuaaaucaugacuuaccugcuaauaaaaacucauuggaaaagugagaagaucuaaaaaaaaaaaaaaaaaaaaaaaaaaaaaaaaaaaaaaaaaaaaaaaaaaaaaaaaaaaaaaaaugcaucccccccccccccccccccccccccccccccaaaggcucuuuucagagccaccagaauu

SEQ ID NO: 2993 - RNA, 1893 nt, Artificial Sequence
  mRNA product Design f-5 comprising derived and/or modified sequence from HRSV(A2)__F-del_DSCav1_mut2 (opt1)
gggagacuuucccauucuguagcagaauuugguguugccuguggucuuggucccgcggagaagcuuaccauggagcugcucauccugaaggccaacgccaucaccaccauccugacggcggugaccuucugcuucgccagcggccagaacaucaccgaggaguucuaccaguccacgugcagcgccgucuccaagggguaccucggcgcccugcgcaccgggugguacaccagcgugaucaccaucgagcuguccaacaucaaggagaacaagugcaacggcaccgacgccaaggugaagcucaucaagcaggagcuggacaaguacaagaacgcggucacggaccugcagcuccugaugcagagcacccccgccaccggguccggcagcgccaucugcuccggcguggccgugugcaagguccugcaccucgagggggaggugaacaagaucaagagcgcgcugcuguccaccaacaaggccguggucagccucuccaacggcgugagcgugcugacguucaagguccuggaccucaagaacuacaucgacaagcagcugcugccgauccucaacaagcaguccugcagcauccccaacaucgagaccgugaucgaguuccagcagaagaacaaccggcugcuggagaucacccgcgaguucuccgugaacgccggggucaccacgcccgugagcaccuacaugcucaccaacuccgagcugcugagccucaucaacgacaugcccaucaccaacgaccagaagaagcugaugagcaacaacgugcagaucguccggcagcaguccuacagcaucaugugcaucaucaaggaggaggugcuggccuacgugguccagcucccgcuguacggcgugaucgacacgcccugcuggaagcugcacaccagcccccucugcaccaccaacacgaaggagggguccaacaucugccugacccgcaccgaccggggcugguacugcgacaacgccggcuccgugagcuucuucccccaggcggagaccugcaagguccaguccaaccgcguguucugcgacacgaugaacagccugacccucccguccgaggucaaccugugcaacguggacaucuucaaccccaaguacgacugcaagaucaugaccagcaagaccgacguguccagcuccgucaucacgagccugggggccaucguguccugcuacggcaagaccaagugcaccgccagcaacaagaaccgggggaucaucaagaccuucuccaacggcugcgacuacgugagcaacaagggcgucgacacgguguccguggggaacacccucuacugcgucaacaagcaggagggccagagccuguacgugaagggggagcccaucaucaacuucuacgacccccugguguucccgagcgacgaguucgacgccuccaucagccaggucaacgagaagaucaaccagucccucgccuucauccgcaagagcgacgagcugcugcacaacgugaacgcgggcaaguccaccaccaacaucaugaucaccacgaucaucaucgugaucaucgucauccuccugagccugaucgccguggggcuccugcuguacugcaaggcccggugaggacuaguacuggcugcaucucccuuuccucuguccuccauccuucucccaggauggugaagggggaccugguacccagugauccccaccccaggauccuaaaucaugacuuaccugcuaauaaaaacucauuggaaaagugagaagaucuaaaaaaaaaaaaaaaaaaaaaaaaaaaaaaaaaaaaaaaaaaaaaaaaaaaaaaaaaaaaaaaaugcaucccccccccccccccccccccccccccccccaaaggcucuuuucagagccaccagaauu

SEQ ID NO: 2994 - RNA, 1893 nt, Artificial Sequence
  mRNA product Design f-5 comprising derived and/or modified sequence from HRSV(A2)__F-del_DSCav1_mut2 (opt2)
gggagacuuucccauucuguagcagaauuugguguugccuguggucuuggucccgcggagaagcuuaccauggagcuccucauccucaaggccaacgccaucaccaccauccucaccgccgucaccuucugcuucgccuccggccagaacaucaccgaggaguucuaccaguccaccugcuccgccgucuccaagggcuaccucggcgcccuccgcaccggcugguacaccuccgucaucaccaucgagcucuccaacaucaaggagaacaagugcaacggcaccgacgccaaggucaagcucaucaagcaggagcucgacaaguacaagaacgccgucaccgaccuccagcuccucaugcaguccacccccgccaccggcuccggcuccgccaucugcuccggcgucgccgucugcaagguccuccaccucgagggcgaggucaacaagaucaaguccgcccuccucuccaccaacaaggccgucgucucccucuccaacggcgucuccguccucaccuucaagguccucgaccucaagaacuacaucgacaagcagcuccuccccauccucaacaagcaguccugcuccauccccaacaucgagaccgucaucgaguuccagcagaagaacaaccgccuccucgagaucacccgcgaguucuccgucaacgccggcgucaccacccccgucuccaccuacaugcucaccaacuccgagcuccucucccucaucaacgacaugcccaucaccaacgaccagaagaagcucauguccaacaacguccagaucguccgccagcaguccuacuccaucaugugcaucaucaaggaggagguccucgccuacgucguccagcucccccucuacggcgucaucgacacccccugcuggaagcuccacaccuccccccucugcaccaccaacaccaaggagggcuccaacaucugccucacccgcaccgaccgcggcugguacugcgacaacgccggcuccgucuccuucuucccccaggccgagaccugcaagguccaguccaaccgcgucuucugcgacaccaugaacucccucacccuccccuccgaggucaaccucugcaacgucgacaucuucaaccccaaguacgacugcaagaucaugaccuccaagaccgacgucuccuccuccgucaucaccucccucggcgccaucgucuccugcuacggcaagaccaagugcaccgccuccaacaagaaccgcggcaucaucaagaccuucuccaacggcugcgacuacgucuccaacaagggcgucgacaccgucuccgucggcaacacccucuacugcgucaacaagcaggagggccagucccucuacgucaagggcgagcccaucaucaacuucuacgacccccucgucuuccccuccgacgaguucgacgccuccaucucccaggucaacgagaagaucaaccagucccucgccuucauccgcaaguccgacgagcuccuccacaacgucaacgccggcaaguccaccaccaacaucaugaucaccaccaucaucaucgucaucaucgucauccuccucucccucaucgccgucggccuccuccucuacugcaaggcccgcugaggacuaguacuggcugcaucucccuuuccucuguccuccauccuucucccaggauggugaagggggaccugguacccagugauccccaccccaggauccuaaaucaugacuuaccugcuaauaaaaacucauuggaaaagugagaagaucuaaaaaaaaaaaaaaaaaaaaaaaaaaaaaaaaaaaaaaaaaaaaaaaaaaaaaaaaaaaaaaaaugcaucccccccccccccccccccccccccccccccaaaggcucuuuucagagccaccagaauu

SEQ ID NO: 2995 - RNA, 1893 nt, Artificial Sequence
  mRNA product Design f-5 comprising derived and/or modified sequence from HRSV(A2)__F-del_DSCav1_mut2 (opt3)
gggagacuuucccauucuguagcagaauuugguguugccuguggucuuggucccgcggagaagcuuaccauggagcugcucauccuuaaggccaacgcuauuaccacaauacugacugcagugacguucugcuuugccagcggccagaauaucaccgaagaguucuaccaauccacauguucugcggucucaaaaggguauuugggagcuuuaagaacugguugguacaccaguguuauuacaaucgaacugagcaacauuaaggagaauaaaugcaacggcaccgacgccaaggugaaacuaaucaagcaggaacucgauaaguauaaaaaugcaguaacugaccugcagcuucugaugcaguccacacccgccaccgggucuggaucggcuauauguucaggcguggcagucugcaagguguugcaccucgagggugagguuaacaaaaucaagagcgcccugcugaguacgaauaaagcuguggucucccucucuaacggggugagcguauuaacuuuuaagguucuggaucuuaagaauuacauugacaaacaauugcugccuauccuaaacaagcaguccuguucaauuccaaauaucgaaaccgugauagaguuccagcagaaaaacaauaggcuccuggaaauuacacgggaguuuagugucaacgccggagugacuaccccggugagcacauauaugcuuaccaauucugagcuguugucccucaucaacgauaugcccauuacgaacgaccaaaagaaacugaugucaaauaacguccagaucguucgccagcagagcuacaguaucaugugcauuauaaaggaagagguguuagcguauguagugcaacugccucucuacggcgucaucgauacuccauguuggaaacuucauacaucuccccugugcaccacuaauacaaaggaaggcuccaacauuuguuugacccgaacggaccgugggugguacugcgauaaugcaggaagcgugucguucuuuccucaggccgagaccuguaagguucagucuaacagaguguucugcgacacaaugaacucccuaacucugccaucagaagucaaucucugcaauguggauaucuuuaaccccaaauaugacuguaagauaaugaccaguaaaacagauguaagcuccucuguuauuacuagccugggugcuaucgugucaugcuacggcaagaccaaauguacagccaguaauaagaacagggggaucauuaagaccuucuccaauggaugcgacuaugucagcaacaaaggcguggacacugucucuguggguaauacgcuuuacuguguuaacaagcaagaggggcagucacuguaugugaaaggagagccuaucauuaacuuuuacgauccauugguauucccgagugacgaauuugaugcaagcauaucccaggucaaugagaagaucaaccagucucucgcuuucauucggaaaucggacgaacuguuacacaaugugaacgccggcaagagcacaaccaauaucaugaucacuaccauuauaaucguuauuaucgugauucugcuaucccucaucgcggucggccugcuuuuguauugcaaggcccgcugaggacuaguacuggcugcaucucccuuuccucuguccuccauccuucucccaggauggugaagggggaccugguacccagugauccccaccccaggauccuaaaucaugacuuaccugcuaauaaaaacucauuggaaaagugagaagaucuaaaaaaaaaaaaaaaaaaaaaaaaaaaaaaaaaaaaaaaaaaaaaaaaaaaaaaaaaaaaaaaaugcaucccccccccccccccccccccccccccccccaaaggcucuuuucagagccaccagaauu

SEQ ID NO: 2996 - RNA, 1893 nt, Artificial Sequence
  mRNA product Design f-5 comprising derived and/or modified sequence from HRSV(A2)__F-del_DSCav1_mut2 (opt4)
gggagacuuucccauucuguagcagaauuugguguugccuguggucuuggucccgcggagaagcuuaccauggagcugcugauccugaaggccaacgccaucaccaccauccugaccgccgugaccuucugcuucgccagcggccagaacaucaccgaggaguucuaccagagcaccugcagcgccgugagcaagggcuaccugggcgcccugagaaccggcugguacaccagcgugaucaccaucgagcugagcaacaucaaggagaacaagugcaacggcaccgacgccaaggugaagcugaucaagcaggagcuggacaaguacaagaacgccgugaccgaccugcagcugcugaugcagagcacccccgccaccggcagcggcagcgccaucugcagcggcguggccgugugcaaggugcugcaccuggagggcgaggugaacaagaucaagagcgcccugcugagcaccaacaaggccguggugagccugagcaacggcgugagcgugcugaccuucaaggugcuggaccugaagaacuacaucgacaagcagcugcugcccauccugaacaagcagagcugcagcauccccaacaucgagaccgugaucgaguuccagcagaagaacaacagacugcuggagaucaccagagaguucagcgugaacgccggcgugaccacccccgugagcaccuacaugcugaccaacagcgagcugcugagccugaucaacgacaugcccaucaccaacgaccagaagaagcugaugagcaacaacgugcagaucgugagacagcagagcuacagcaucaugugcaucaucaaggaggaggugcuggccuacguggugcagcugccccuguacggcgugaucgacacccccugcuggaagcugcacaccagcccccugugcaccaccaacaccaaggagggcagcaacaucugccugaccagaaccgacagaggcugguacugcgacaacgccggcagcgugagcuucuucccccaggccgagaccugcaaggugcagagcaacagaguguucugcgacaccaugaacagccugacccugcccagcgaggugaaccugugcaacguggacaucuucaaccccaaguacgacugcaagaucaugaccagcaagaccgacgugagcagcagcgugaucaccagccugggcgccaucgugagcugcuacggcaagaccaagugcaccgccagcaacaagaacagaggcaucaucaagaccuucagcaacggcugcgacuacgugagcaacaagggcguggacaccgugagcgugggcaacacccuguacugcgugaacaagcaggagggccagagccuguacgugaagggcgagcccaucaucaacuucuacgacccccugguguuccccagcgacgaguucgacgccagcaucagccaggugaacgagaagaucaaccagagccuggccuucaucagaaagagcgacgagcugcugcacaacgugaacgccggcaagagcaccaccaacaucaugaucaccaccaucaucaucgugaucaucgugauccugcugagccugaucgccgugggccugcugcuguacugcaaggccagaugaggacuaguacuggcugcaucucccuuuccucuguccuccauccuucucccaggauggugaagggggaccugguacccagugauccccaccccaggauccuaaaucaugacuuaccugcuaauaaaaacucauuggaaaagugagaagaucuaaaaaaaaaaaaaaaaaaaaaaaaaaaaaaaaaaaaaaaaaaaaaaaaaaaaaaaaaaaaaaaaugcaucccccccccccccccccccccccccccccccaaaggcucuuuucagagccaccagaauu

SEQ ID NO: 2997 - RNA, 1893 nt, Artificial Sequence
  mRNA product Design f-5 comprising derived and/or modified sequence from HRSV(A2)__F-del_DSCav1_mut2 (opt5)
gggagacuuucccauucuguagcagaauuugguguugccuguggucuuggucccgcggagaagcuuaccauggagcugcucauccugaaggccaacgcuauuaccacaauccuuacggccgugaccuucugcuuugcgagcggccagaauauuacagaagaguucuaccaauccaccuguucugcugucagcaaaggguaucugggagcccucagaacaggcugguacaccuccguuaucacaauugaacugucuaacaucaaggagaauaaaugcaacgggaccgacgccaaggugaaacuuaucaagcaggaacuggauaaguauaaaaaugcugugacggaccuccagcugcugaugcagagcacccccgccacaggauccggcucugcuauuuguagcggggucgccgugugcaagguucuccaccuggagggagaggugaacaaaaucaaguccgcgcuucugagcaccaauaaagccgucgugucucucuccaacggcguuagcgugcugacauuuaagguccuugaucugaagaauuacauugacaaacaacuccugccuauccugaacaagcagucuuguuccauuccgaauaucgaaaccgugauugaguuccagcagaaaaacaaucggcuccuggaaaucacgcgcgaguuuagcgugaacgcuggcgucacaacccccguuucuacauauaugcuuaccaauuccgagcugcucagccugaucaacgauaugccuauuaccaacgaccaaaagaaacuuauguccaauaacgugcagaucgugagacagcagucuuacagcauuaugugcaucauuaaggaagagguccuggccuaugugguucaacucccccuguacggggugaucgauacaccuuguuggaaacugcauacgagcccccucugcaccacaaauaccaaggaaggauccaacaucugucugacacggaccgaccgcggcugguacugcgauaaugcugggucugucuccuucuuuccucaggccgagacguguaaggugcagagcaacagaguuuucugcgacacaaugaacucucuuacccugccgagcgaagugaaucucugcaaugucgauauuuuuaaccccaaauaugacuguaagaucaugaccuccaaaacagaugugucuagcuccgucauuaccagccugggagcgaucgugucuugcuacggcaagacaaaauguacggccuccaauaagaaccgggggauuaucaagaccuucagcaauggaugcgacuauguuucuaacaaaggcguggacacagucuccgugggcaauacccuuuacuguguuaacaagcaagaggggcagagccuguaugugaaaggagagccuaucauuaacuuuuacgauccccucgucuucccuuccgacgaauuugaugcuucuaucagccaggugaaugagaagauuaaccagucccuggccuucauccgcaaaucugacgaacugcuccacaaugugaacgcuggcaagagcacaaccaauauuaugaucacgaccauuaucaucguuauuaucgucauucugcuuucccugaucgccguggggcuccugcuguauugcaaggccagaugaggacuaguacuggcugcaucucccuuuccucuguccuccauccuucucccaggauggugaagggggaccugguacccagugauccccaccccaggauccuaaaucaugacuuaccugcuaauaaaaacucauuggaaaagugagaagaucuaaaaaaaaaaaaaaaaaaaaaaaaaaaaaaaaaaaaaaaaaaaaaaaaaaaaaaaaaaaaaaaaugcaucccccccccccccccccccccccccccccccaaaggcucuuuucagagccaccagaauu

SEQ ID NO: 2998 - RNA, 1893 nt, Artificial Sequence
  mRNA product Design f-5 comprising derived and/or modified sequence from HRSV(A2)__F-del_DSCav1_mut2 (opt6)
gggagacuuucccauucuguagcagaauuugguguugccuguggucuuggucccgcggagaagcuuaccauggaacuccuaauacuuaaagccaaugcaauaaccacaauacuaacagcaguaacauucugcuuugcaucaggacaaaacauaacagaagaauuuuaccaaucaacauguucagcaguaagcaaaggauaccuaggagccuuacgcacagguugguacacuuccguaauaacaauagaacucucaaauauaaaagaaaacaaaugcaacggaaccgaugcaaaaguaaaacuaauaaaacaagaauuagacaaauacaaaaacgcaguaacagaccuacaauuacuuaugcaaucaacacccgcaacaggauccggcucagcaaucuguucaggaguagcaguaugcaaaguucuccaccuagaaggcgaaguaaacaaaauaaaaucagcccuauuaucuaccaauaaagcaguaguaucacuaucaaauggaguaucuguccuaaccuucaaaguacuugaccuaaaaaauuacaucgacaaacaauuacuaccaauacuuaacaaacaaucauguucaauaccaaacauugaaacaguaauagaauuucaacaaaaaaauaacagauuauuagaaauaacccgcgaauuuucaguuaacgcaggaguaacaacaccaguauccacauacauguuaacaaauucagaacucuuaucacuuauaaacgacaugcccauaacaaacgaccaaaaaaaacucaugucuaacaauguucaaauaguucgacaacaaucauacuccauaaugugcauaauaaaagaagaaguucuagcauauguuguacaacucccacucuaugguguuauagacacaccaugcuggaaacuacauacaagccccuuaugcacuacaaacacaaaagaaggcucuaauauaugucuaacccgcacagacagaggcugguauugcgauaacgcagguucaguaucauucuuuccacaagcagaaacuugcaaaguccaauccaauagagucuucugcgacacuaugaacucacucacacucccaucugaagucaauuuauguaacgucgauaucuucaacccaaaauacgacugcaaaauaaugaccucaaaaacagacguaagcucaucagucauaacuucucuaggcgcaaucgucucauguuacggcaaaacaaaauguaccgcaucaaacaaaaaucgagguauaauaaaaaccuuuucuaacggcugcgacuacguaucaaacaaaggaguagauacuguaagugucggaaacacauuauacugcgucaacaaacaagaaggacaaucccuauauguuaaaggcgaaccuaucauuaauuucuacgacccacucgucuuuccauccgacgaauuugacgcaucaauuucccaaguaaaugaaaaaauaaaccaaucccuugcauucauaagaaaaucagaugaacuauuacacaacguaaacgcaggcaaaucaacaacaaauauaaugaucacaacaauaauaaucguaauaauaguaauccuacucucacuaauagcaguaggcuuacuauuauauugcaaagccagauaaggacuaguacuggcugcaucucccuuuccucuguccuccauccuucucccaggauggugaagggggaccugguacccagugauccccaccccaggauccuaaaucaugacuuaccugcuaauaaaaacucauuggaaaagugagaagaucuaaaaaaaaaaaaaaaaaaaaaaaaaaaaaaaaaaaaaaaaaaaaaaaaaaaaaaaaaaaaaaaaugcaucccccccccccccccccccccccccccccccaaaggcucuuuucagagccaccagaauu

SEQ ID NO: 2999 - RNA, 1893 nt, Artificial Sequence
  mRNA product Design f-5 comprising derived and/or modified sequence from HRSV(A2)__F-del_DSCav1_mut2 (opt11)
gggagacuuucccauucuguagcagaauuugguguugccuguggucuuggucccgcggagaagcuuaccauggaacuucuuauccuaaaagcgaacgccauaaccacaauccuaacagcagucaccuucuguuucgccucaggacaaaacaucaccgaggaauuuuaccaauccacauguagcgcugucucaaaaggcuaccucggcgcccuccgaaccggcugguacacauccguaauaacgaucgaacucuccaacauaaaagaaaauaaaugcaacggcaccgacgccaaagucaaacuuaucaaacaagaacuagacaaauacaaaaacgccgucaccgaccuccagcuccucaugcaauccaccccagcaacaggcuccggaagcgcaaucugcucaggcgucgccguaugcaaaguacuccaccucgaaggagaagucaacaaaaucaaauccgcccuccuauccacaaacaaagcaguugucucacucuccaacgggguaagcguacugaccuucaaaguccuagaccucaaaaacuacaucgauaaacaacuccuuccaauccucaacaaacaaucaugcucuauccccaacaucgaaaccguaaucgaauuucaacaaaaaaacaaccgccuacuugaaaucacacgcgaauuuagcgucaacgcaggaguaacaacacccguguccacauauaugcucacgaacagcgaacuacuaucccugauuaacgacaugcccaucaccaacgaccaaaaaaaacuaaugagcaacaacguacaaaucguccgccaacaaagcuacucuauaaugugcaucaucaaggaagaaguccuagccuacgucguccaauuaccacucuacggcgucaucgacacacccugcuggaaacuccauacauccccccucugcaccaccaacaccaaagaaggguccaacauaugccucacucgcacagaccgcggcugguacugcgacaacgcuggcagcgucagcuucuucccccaggccgaaaccugcaaaguccaauccaacagagucuucugcgacaccaugaacucgcucacccuccccuccgaggucaaccucugcaacgucgacauauucaaccccaaauacgacugcaaaaucaugaccuccaaaaccgacgucagcucaucagucaucacaucccucggggccaucgucuccugcuacggcaaaaccaagugcaccgccucaaacaaaaaccgcggcauuaucaaaacauucuccaacggcugcgacuacgucuccaacaaaggcgucgacacagucuccgucgguaacacccucuacugcguaaauaaacaagaaggccaaucccucuacgucaaaggcgaacccaucaucaacuucuacgacccucucgucuuccccuccgacgaauuugacgccucaaucagccaaguuaacgaaaaaaucaaccaaucacucgccuucauccgcaaauccgacgaacuccuccacaacguuaacgccggcaaaucuaccacgaacaucaugaucaccaccauaaucaucguaauuaucguaauacuccuaucccucauagcaguaggccuccuacucuacugcaaagcccguuaaggacuaguacuggcugcaucucccuuuccucuguccuccauccuucucccaggauggugaagggggaccugguacccagugauccccaccccaggauccuaaaucaugacuuaccugcuaauaaaaacucauuggaaaagugagaagaucuaaaaaaaaaaaaaaaaaaaaaaaaaaaaaaaaaaaaaaaaaaaaaaaaaaaaaaaaaaaaaaaaugcaucccccccccccccccccccccccccccccccaaaggcucuuuucagagccaccagaauu

SEQ ID NO: 3000 - RNA, 1889 nt, Artificial Sequence
  mRNA product Design g-1 comprising derived and/or modified sequence from HRSV(A2)__F-del_DSCav1_mut2 (opt1)
gggagacuuucccauucuguagcagaauuugguguugccuguggucuuggucccgcggagaagcuuaccauggagcugcucauccugaaggccaacgccaucaccaccauccugacggcggugaccuucugcuucgccagcggccagaacaucaccgaggaguucuaccaguccacgugcagcgccgucuccaagggguaccucggcgcccugcggaccggcugguacaccuccgugaucaccaucgagcugagcaacaucaaggagaacaagugcaacgggaccgacgccaaggugaagcucaucaagcaggagcuggacaaguacaagaacgcggucacggaccugcagcuccugaugcaguccaccccggcaaccggcuccggcuccgccaucugcagcggcgucgccgugugcaaggugcugcaccucgagggggaggucaacaagaucaagagcgcccugcuguccaccaacaaggccguggugagccucuccaacggcgucagcgugcugaccuucaaggugcuggaccucaagaacuacaucgacaagcagcugcugcccauccugaacaagcagagcugcuccauccccaacaucgagacggugaucgaguuccagcagaagaacaaccggcuccuggagaucacccgcgaguucagcgugaacgccggggucaccacccccguguccacguacaugcugaccaacagcgagcuccugucccugaucaacgacaugccgaucaccaacgaccagaagaagcucaugagcaacaacgugcagaucguccggcagcaguccuacagcaucaugugcaucaucaaggaggaggugcuggcguacgugguccagcugccccucuacggcgugaucgacacccccugcuggaagcugcacacgagcccccugugcaccaccaacaccaaggagggguccaacaucugccucacgcgcaccgaccggggcugguacugcgacaacgccggcagcgucuccuucuucccgcaggccgagaccugcaaggugcagagcaaccgcguguucugcgacaccaugaacucccugacgcugcccagcgagguaaaccucugcaacgucgacaucuucaaccccaaguacgacugcaagaucaugaccuccaagaccgacgugagcuccagcgugaucaccucccugggggccaucgucagcugcuacggcaagacgaagugcaccgccagcaacaagaaccgggggaucaucaagaccuucuccaacggcugcgacuacgugagcaacaagggcguggacaccguguccgucgggaacacccuguacugcgugaacaagcaggagggccagagccucuacgugaagggggagcccaucaucaacuucuacgacccgcuggucuuccccuccgacgaguucgacgcgagcaucucccaggugaacgagaagaucaaccagagccuggccuucauccgcaaguccgacgagcugcuccacaacgugaacgccggcaagagcacgaccaacaucaugaucaccaccaucaucaucgucaucaucgugauccugcugucccucaucgccguggggcugcugcucuacugcaaggcccggugaggacuaguggaagcauuuuccuggcugauuaaaagaaauuacucagcuauggucaucuguuccuguuagaaggcuaugcagcauauuauauacuaugcgcauguuaugaaaugcauaauaaaaaauuuuaaaaaaucuaaaagaucuaaaaaaaaaaaaaaaaaaaaaaaaaaaaaaaaaaaaaaaaaaaaaaaaaaaaaaaaaaaaaaaaugcaucccccccccccccccccccccccccccccccaaaggcucuuuucagagccaccagaauu

SEQ ID NO: 3001 - RNA, 1889 nt, Artificial Sequence
  mRNA product Design g-1 comprising derived and/or modified sequence from HRSV(A2)__F-del_DSCav1_mut2 (opt1)
gggagacuuucccauucuguagcagaauuugguguugccuguggucuuggucccgcggagaagcuuaccauggagcugcucauccugaaggccaacgccaucaccaccauccugacggcggugaccuucugcuucgccagcggccagaacaucaccgaggaguucuaccaguccacgugcagcgccgucuccaagggguaccucggcgcccugcgcaccgggugguacaccagcgugaucaccaucgagcuguccaacaucaaggagaacaagugcaacggcaccgacgccaaggugaagcucaucaagcaggagcuggacaaguacaagaacgcggucacggaccugcagcuccugaugcagagcacccccgccaccggguccggcagcgccaucugcuccggcguggccgugugcaagguccugcaccucgagggggaggugaacaagaucaagagcgcgcugcuguccaccaacaaggccguggucagccucuccaacggcgugagcgugcugacguucaagguccuggaccucaagaacuacaucgacaagcagcugcugccgauccucaacaagcaguccugcagcauccccaacaucgagaccgugaucgaguuccagcagaagaacaaccggcugcuggagaucacccgcgaguucuccgugaacgccggggucaccacgcccgugagcaccuacaugcucaccaacuccgagcugcugagccucaucaacgacaugcccaucaccaacgaccagaagaagcugaugagcaacaacgugcagaucguccggcagcaguccuacagcaucaugugcaucaucaaggaggaggugcuggccuacgugguccagcucccgcuguacggcgugaucgacacgcccugcuggaagcugcacaccagcccccucugcaccaccaacacgaaggagggguccaacaucugccugacccgcaccgaccggggcugguacugcgacaacgccggcuccgugagcuucuucccccaggcggagaccugcaagguccaguccaaccgcguguucugcgacacgaugaacagccugacccucccguccgaggucaaccugugcaacguggacaucuucaaccccaaguacgacugcaagaucaugaccagcaagaccgacguguccagcuccgucaucacgagccugggggccaucguguccugcuacggcaagaccaagugcaccgccagcaacaagaaccgggggaucaucaagaccuucuccaacggcugcgacuacgugagcaacaagggcgucgacacgguguccguggggaacacccucuacugcgucaacaagcaggagggccagagccuguacgugaagggggagcccaucaucaacuucuacgacccccugguguucccgagcgacgaguucgacgccuccaucagccaggucaacgagaagaucaaccagucccucgccuucauccgcaagagcgacgagcugcugcacaacgugaacgcgggcaaguccaccaccaacaucaugaucaccacgaucaucaucgugaucaucgucauccuccugagccugaucgccguggggcuccugcuguacugcaaggcccggugaggacuaguggaagcauuuuccuggcugauuaaaagaaauuacucagcuauggucaucuguuccuguuagaaggcuaugcagcauauuauauacuaugcgcauguuaugaaaugcauaauaaaaaauuuuaaaaaaucuaaaagaucuaaaaaaaaaaaaaaaaaaaaaaaaaaaaaaaaaaaaaaaaaaaaaaaaaaaaaaaaaaaaaaaaugcaucccccccccccccccccccccccccccccccaaaggcucuuuucagagccaccagaauu

SEQ ID NO: 3002 - RNA, 1889 nt, Artificial Sequence
  mRNA product Design g-1 comprising derived and/or modified sequence from HRSV(A2)__F-del_DSCav1_mut2 (opt2)
gggagacuuucccauucuguagcagaauuugguguugccuguggucuuggucccgcggagaagcuuaccauggagcuccucauccucaaggccaacgccaucaccaccauccucaccgccgucaccuucugcuucgccuccggccagaacaucaccgaggaguucuaccaguccaccugcuccgccgucuccaagggcuaccucggcgcccuccgcaccggcugguacaccuccgucaucaccaucgagcucuccaacaucaaggagaacaagugcaacggcaccgacgccaaggucaagcucaucaagcaggagcucgacaaguacaagaacgccgucaccgaccuccagcuccucaugcaguccacccccgccaccggcuccggcuccgccaucugcuccggcgucgccgucugcaagguccuccaccucgagggcgaggucaacaagaucaaguccgcccuccucuccaccaacaaggccgucgucucccucuccaacggcgucuccguccucaccuucaagguccucgaccucaagaacuacaucgacaagcagcuccuccccauccucaacaagcaguccugcuccauccccaacaucgagaccgucaucgaguuccagcagaagaacaaccgccuccucgagaucacccgcgaguucuccgucaacgccggcgucaccacccccgucuccaccuacaugcucaccaacuccgagcuccucucccucaucaacgacaugcccaucaccaacgaccagaagaagcucauguccaacaacguccagaucguccgccagcaguccuacuccaucaugugcaucaucaaggaggagguccucgccuacgucguccagcucccccucuacggcgucaucgacacccccugcuggaagcuccacaccuccccccucugcaccaccaacaccaaggagggcuccaacaucugccucacccgcaccgaccgcggcugguacugcgacaacgccggcuccgucuccuucuucccccaggccgagaccugcaagguccaguccaaccgcgucuucugcgacaccaugaacucccucacccuccccuccgaggucaaccucugcaacgucgacaucuucaaccccaaguacgacugcaagaucaugaccuccaagaccgacgucuccuccuccgucaucaccucccucggcgccaucgucuccugcuacggcaagaccaagugcaccgccuccaacaagaaccgcggcaucaucaagaccuucuccaacggcugcgacuacgucuccaacaagggcgucgacaccgucuccgucggcaacacccucuacugcgucaacaagcaggagggccagucccucuacgucaagggcgagcccaucaucaacuucuacgacccccucgucuuccccuccgacgaguucgacgccuccaucucccaggucaacgagaagaucaaccagucccucgccuucauccgcaaguccgacgagcuccuccacaacgucaacgccggcaaguccaccaccaacaucaugaucaccaccaucaucaucgucaucaucgucauccuccucucccucaucgccgucggccuccuccucuacugcaaggcccgcugaggacuaguggaagcauuuuccuggcugauuaaaagaaauuacucagcuauggucaucuguuccuguuagaaggcuaugcagcauauuauauacuaugcgcauguuaugaaaugcauaauaaaaaauuuuaaaaaaucuaaaagaucuaaaaaaaaaaaaaaaaaaaaaaaaaaaaaaaaaaaaaaaaaaaaaaaaaaaaaaaaaaaaaaaaugcaucccccccccccccccccccccccccccccccaaaggcucuuuucagagccaccagaauu

SEQ ID NO: 3003 - RNA, 1889 nt, Artificial Sequence
  mRNA product Design g-1 comprising derived and/or modified sequence from HRSV(A2)__F-del_DSCav1_mut2 (opt3)
gggagacuuucccauucuguagcagaauuugguguugccuguggucuuggucccgcggagaagcuuaccauggagcugcucauccuuaaggccaacgcuauuaccacaauacugacugcagugacguucugcuuugccagcggccagaauaucaccgaagaguucuaccaauccacauguucugcggucucaaaaggguauuugggagcuuuaagaacugguugguacaccaguguuauuacaaucgaacugagcaacauuaaggagaauaaaugcaacggcaccgacgccaaggugaaacuaaucaagcaggaacucgauaaguauaaaaaugcaguaacugaccugcagcuucugaugcaguccacacccgccaccgggucuggaucggcuauauguucaggcguggcagucugcaagguguugcaccucgagggugagguuaacaaaaucaagagcgcccugcugaguacgaauaaagcuguggucucccucucuaacggggugagcguauuaacuuuuaagguucuggaucuuaagaauuacauugacaaacaauugcugccuauccuaaacaagcaguccuguucaauuccaaauaucgaaaccgugauagaguuccagcagaaaaacaauaggcuccuggaaauuacacgggaguuuagugucaacgccggagugacuaccccggugagcacauauaugcuuaccaauucugagcuguugucccucaucaacgauaugcccauuacgaacgaccaaaagaaacugaugucaaauaacguccagaucguucgccagcagagcuacaguaucaugugcauuauaaaggaagagguguuagcguauguagugcaacugccucucuacggcgucaucgauacuccauguuggaaacuucauacaucuccccugugcaccacuaauacaaaggaaggcuccaacauuuguuugacccgaacggaccgugggugguacugcgauaaugcaggaagcgugucguucuuuccucaggccgagaccuguaagguucagucuaacagaguguucugcgacacaaugaacucccuaacucugccaucagaagucaaucucugcaauguggauaucuuuaaccccaaauaugacuguaagauaaugaccaguaaaacagauguaagcuccucuguuauuacuagccugggugcuaucgugucaugcuacggcaagaccaaauguacagccaguaauaagaacagggggaucauuaagaccuucuccaauggaugcgacuaugucagcaacaaaggcguggacacugucucuguggguaauacgcuuuacuguguuaacaagcaagaggggcagucacuguaugugaaaggagagccuaucauuaacuuuuacgauccauugguauucccgagugacgaauuugaugcaagcauaucccaggucaaugagaagaucaaccagucucucgcuuucauucggaaaucggacgaacuguuacacaaugugaacgccggcaagagcacaaccaauaucaugaucacuaccauuauaaucguuauuaucgugauucugcuaucccucaucgcggucggccugcuuuuguauugcaaggcccgcugaggacuaguggaagcauuuuccuggcugauuaaaagaaauuacucagcuauggucaucuguuccuguuagaaggcuaugcagcauauuauauacuaugcgcauguuaugaaaugcauaauaaaaaauuuuaaaaaaucuaaaagaucuaaaaaaaaaaaaaaaaaaaaaaaaaaaaaaaaaaaaaaaaaaaaaaaaaaaaaaaaaaaaaaaaugcaucccccccccccccccccccccccccccccccaaaggcucuuuucagagccaccagaauu

SEQ ID NO: 3004 - RNA, 1889 nt, Artificial Sequence
  mRNA product Design g-1 comprising derived and/or modified sequence from HRSV(A2)__F-del_DSCav1_mut2 (opt4)
gggagacuuucccauucuguagcagaauuugguguugccuguggucuuggucccgcggagaagcuuaccauggagcugcugauccugaaggccaacgccaucaccaccauccugaccgccgugaccuucugcuucgccagcggccagaacaucaccgaggaguucuaccagagcaccugcagcgccgugagcaagggcuaccugggcgcccugagaaccggcugguacaccagcgugaucaccaucgagcugagcaacaucaaggagaacaagugcaacggcaccgacgccaaggugaagcugaucaagcaggagcuggacaaguacaagaacgccgugaccgaccugcagcugcugaugcagagcacccccgccaccggcagcggcagcgccaucugcagcggcguggccgugugcaaggugcugcaccuggagggcgaggugaacaagaucaagagcgcccugcugagcaccaacaaggccguggugagccugagcaacggcgugagcgugcugaccuucaaggugcuggaccugaagaacuacaucgacaagcagcugcugcccauccugaacaagcagagcugcagcauccccaacaucgagaccgugaucgaguuccagcagaagaacaacagacugcuggagaucaccagagaguucagcgugaacgccggcgugaccacccccgugagcaccuacaugcugaccaacagcgagcugcugagccugaucaacgacaugcccaucaccaacgaccagaagaagcugaugagcaacaacgugcagaucgugagacagcagagcuacagcaucaugugcaucaucaaggaggaggugcuggccuacguggugcagcugccccuguacggcgugaucgacacccccugcuggaagcugcacaccagcccccugugcaccaccaacaccaaggagggcagcaacaucugccugaccagaaccgacagaggcugguacugcgacaacgccggcagcgugagcuucuucccccaggccgagaccugcaaggugcagagcaacagaguguucugcgacaccaugaacagccugacccugcccagcgaggugaaccugugcaacguggacaucuucaaccccaaguacgacugcaagaucaugaccagcaagaccgacgugagcagcagcgugaucaccagccugggcgccaucgugagcugcuacggcaagaccaagugcaccgccagcaacaagaacagaggcaucaucaagaccuucagcaacggcugcgacuacgugagcaacaagggcguggacaccgugagcgugggcaacacccuguacugcgugaacaagcaggagggccagagccuguacgugaagggcgagcccaucaucaacuucuacgacccccugguguuccccagcgacgaguucgacgccagcaucagccaggugaacgagaagaucaaccagagccuggccuucaucagaaagagcgacgagcugcugcacaacgugaacgccggcaagagcaccaccaacaucaugaucaccaccaucaucaucgugaucaucgugauccugcugagccugaucgccgugggccugcugcuguacugcaaggccagaugaggacuaguggaagcauuuuccuggcugauuaaaagaaauuacucagcuauggucaucuguuccuguuagaaggcuaugcagcauauuauauacuaugcgcauguuaugaaaugcauaauaaaaaauuuuaaaaaaucuaaaagaucuaaaaaaaaaaaaaaaaaaaaaaaaaaaaaaaaaaaaaaaaaaaaaaaaaaaaaaaaaaaaaaaaugcaucccccccccccccccccccccccccccccccaaaggcucuuuucagagccaccagaauu

SEQ ID NO: 3005 - RNA, 1889 nt, Artificial Sequence
  mRNA product Design g-1 comprising derived and/or modified sequence from HRSV(A2)__F-del_DSCav1_mut2 (opt5)
gggagacuuucccauucuguagcagaauuugguguugccuguggucuuggucccgcggagaagcuuaccauggagcugcucauccugaaggccaacgcuauuaccacaauccuuacggccgugaccuucugcuuugcgagcggccagaauauuacagaagaguucuaccaauccaccuguucugcugucagcaaaggguaucugggagcccucagaacaggcugguacaccuccguuaucacaauugaacugucuaacaucaaggagaauaaaugcaacgggaccgacgccaaggugaaacuuaucaagcaggaacuggauaaguauaaaaaugcugugacggaccuccagcugcugaugcagagcacccccgccacaggauccggcucugcuauuuguagcggggucgccgugugcaagguucuccaccuggagggagaggugaacaaaaucaaguccgcgcuucugagcaccaauaaagccgucgugucucucuccaacggcguuagcgugcugacauuuaagguccuugaucugaagaauuacauugacaaacaacuccugccuauccugaacaagcagucuuguuccauuccgaauaucgaaaccgugauugaguuccagcagaaaaacaaucggcuccuggaaaucacgcgcgaguuuagcgugaacgcuggcgucacaacccccguuucuacauauaugcuuaccaauuccgagcugcucagccugaucaacgauaugccuauuaccaacgaccaaaagaaacuuauguccaauaacgugcagaucgugagacagcagucuuacagcauuaugugcaucauuaaggaagagguccuggccuaugugguucaacucccccuguacggggugaucgauacaccuuguuggaaacugcauacgagcccccucugcaccacaaauaccaaggaaggauccaacaucugucugacacggaccgaccgcggcugguacugcgauaaugcugggucugucuccuucuuuccucaggccgagacguguaaggugcagagcaacagaguuuucugcgacacaaugaacucucuuacccugccgagcgaagugaaucucugcaaugucgauauuuuuaaccccaaauaugacuguaagaucaugaccuccaaaacagaugugucuagcuccgucauuaccagccugggagcgaucgugucuugcuacggcaagacaaaauguacggccuccaauaagaaccgggggauuaucaagaccuucagcaauggaugcgacuauguuucuaacaaaggcguggacacagucuccgugggcaauacccuuuacuguguuaacaagcaagaggggcagagccuguaugugaaaggagagccuaucauuaacuuuuacgauccccucgucuucccuuccgacgaauuugaugcuucuaucagccaggugaaugagaagauuaaccagucccuggccuucauccgcaaaucugacgaacugcuccacaaugugaacgcuggcaagagcacaaccaauauuaugaucacgaccauuaucaucguuauuaucgucauucugcuuucccugaucgccguggggcuccugcuguauugcaaggccagaugaggacuaguggaagcauuuuccuggcugauuaaaagaaauuacucagcuauggucaucuguuccuguuagaaggcuaugcagcauauuauauacuaugcgcauguuaugaaaugcauaauaaaaaauuuuaaaaaaucuaaaagaucuaaaaaaaaaaaaaaaaaaaaaaaaaaaaaaaaaaaaaaaaaaaaaaaaaaaaaaaaaaaaaaaaugcaucccccccccccccccccccccccccccccccaaaggcucuuuucagagccaccagaauu

SEQ ID NO: 3006 - RNA, 1889 nt, Artificial Sequence
  mRNA product Design g-1 comprising derived and/or modified sequence from HRSV(A2)__F-del_DSCav1_mut2 (opt6)
gggagacuuucccauucuguagcagaauuugguguugccuguggucuuggucccgcggagaagcuuaccauggaacuccuaauacuuaaagccaaugcaauaaccacaauacuaacagcaguaacauucugcuuugcaucaggacaaaacauaacagaagaauuuuaccaaucaacauguucagcaguaagcaaaggauaccuaggagccuuacgcacagguugguacacuuccguaauaacaauagaacucucaaauauaaaagaaaacaaaugcaacggaaccgaugcaaaaguaaaacuaauaaaacaagaauuagacaaauacaaaaacgcaguaacagaccuacaauuacuuaugcaaucaacacccgcaacaggauccggcucagcaaucuguucaggaguagcaguaugcaaaguucuccaccuagaaggcgaaguaaacaaaauaaaaucagcccuauuaucuaccaauaaagcaguaguaucacuaucaaauggaguaucuguccuaaccuucaaaguacuugaccuaaaaaauuacaucgacaaacaauuacuaccaauacuuaacaaacaaucauguucaauaccaaacauugaaacaguaauagaauuucaacaaaaaaauaacagauuauuagaaauaacccgcgaauuuucaguuaacgcaggaguaacaacaccaguauccacauacauguuaacaaauucagaacucuuaucacuuauaaacgacaugcccauaacaaacgaccaaaaaaaacucaugucuaacaauguucaaauaguucgacaacaaucauacuccauaaugugcauaauaaaagaagaaguucuagcauauguuguacaacucccacucuaugguguuauagacacaccaugcuggaaacuacauacaagccccuuaugcacuacaaacacaaaagaaggcucuaauauaugucuaacccgcacagacagaggcugguauugcgauaacgcagguucaguaucauucuuuccacaagcagaaacuugcaaaguccaauccaauagagucuucugcgacacuaugaacucacucacacucccaucugaagucaauuuauguaacgucgauaucuucaacccaaaauacgacugcaaaauaaugaccucaaaaacagacguaagcucaucagucauaacuucucuaggcgcaaucgucucauguuacggcaaaacaaaauguaccgcaucaaacaaaaaucgagguauaauaaaaaccuuuucuaacggcugcgacuacguaucaaacaaaggaguagauacuguaagugucggaaacacauuauacugcgucaacaaacaagaaggacaaucccuauauguuaaaggcgaaccuaucauuaauuucuacgacccacucgucuuuccauccgacgaauuugacgcaucaauuucccaaguaaaugaaaaaauaaaccaaucccuugcauucauaagaaaaucagaugaacuauuacacaacguaaacgcaggcaaaucaacaacaaauauaaugaucacaacaauaauaaucguaauaauaguaauccuacucucacuaauagcaguaggcuuacuauuauauugcaaagccagauaaggacuaguggaagcauuuuccuggcugauuaaaagaaauuacucagcuauggucaucuguuccuguuagaaggcuaugcagcauauuauauacuaugcgcauguuaugaaaugcauaauaaaaaauuuuaaaaaaucuaaaagaucuaaaaaaaaaaaaaaaaaaaaaaaaaaaaaaaaaaaaaaaaaaaaaaaaaaaaaaaaaaaaaaaaugcaucccccccccccccccccccccccccccccccaaaggcucuuuucagagccaccagaauu

SEQ ID NO: 3007 - RNA, 1889 nt, Artificial Sequence
  mRNA product Design g-1 comprising derived and/or modified sequence from HRSV(A2)__F-del_DSCav1_mut2 (opt11)
gggagacuuucccauucuguagcagaauuugguguugccuguggucuuggucccgcggagaagcuuaccauggaacuucuuauccuaaaagcgaacgccauaaccacaauccuaacagcagucaccuucuguuucgccucaggacaaaacaucaccgaggaauuuuaccaauccacauguagcgcugucucaaaaggcuaccucggcgcccuccgaaccggcugguacacauccguaauaacgaucgaacucuccaacauaaaagaaaauaaaugcaacggcaccgacgccaaagucaaacuuaucaaacaagaacuagacaaauacaaaaacgccgucaccgaccuccagcuccucaugcaauccaccccagcaacaggcuccggaagcgcaaucugcucaggcgucgccguaugcaaaguacuccaccucgaaggagaagucaacaaaaucaaauccgcccuccuauccacaaacaaagcaguugucucacucuccaacgggguaagcguacugaccuucaaaguccuagaccucaaaaacuacaucgauaaacaacuccuuccaauccucaacaaacaaucaugcucuauccccaacaucgaaaccguaaucgaauuucaacaaaaaaacaaccgccuacuugaaaucacacgcgaauuuagcgucaacgcaggaguaacaacacccguguccacauauaugcucacgaacagcgaacuacuaucccugauuaacgacaugcccaucaccaacgaccaaaaaaaacuaaugagcaacaacguacaaaucguccgccaacaaagcuacucuauaaugugcaucaucaaggaagaaguccuagccuacgucguccaauuaccacucuacggcgucaucgacacacccugcuggaaacuccauacauccccccucugcaccaccaacaccaaagaaggguccaacauaugccucacucgcacagaccgcggcugguacugcgacaacgcuggcagcgucagcuucuucccccaggccgaaaccugcaaaguccaauccaacagagucuucugcgacaccaugaacucgcucacccuccccuccgaggucaaccucugcaacgucgacauauucaaccccaaauacgacugcaaaaucaugaccuccaaaaccgacgucagcucaucagucaucacaucccucggggccaucgucuccugcuacggcaaaaccaagugcaccgccucaaacaaaaaccgcggcauuaucaaaacauucuccaacggcugcgacuacgucuccaacaaaggcgucgacacagucuccgucgguaacacccucuacugcguaaauaaacaagaaggccaaucccucuacgucaaaggcgaacccaucaucaacuucuacgacccucucgucuuccccuccgacgaauuugacgccucaaucagccaaguuaacgaaaaaaucaaccaaucacucgccuucauccgcaaauccgacgaacuccuccacaacguuaacgccggcaaaucuaccacgaacaucaugaucaccaccauaaucaucguaauuaucguaauacuccuaucccucauagcaguaggccuccuacucuacugcaaagcccguuaaggacuaguggaagcauuuuccuggcugauuaaaagaaauuacucagcuauggucaucuguuccuguuagaaggcuaugcagcauauuauauacuaugcgcauguuaugaaaugcauaauaaaaaauuuuaaaaaaucuaaaagaucuaaaaaaaaaaaaaaaaaaaaaaaaaaaaaaaaaaaaaaaaaaaaaaaaaaaaaaaaaaaaaaaaugcaucccccccccccccccccccccccccccccccaaaggcucuuuucagagccaccagaauu

SEQ ID NO: 3008 - RNA, 1904 nt, Artificial Sequence
  mRNA product Design g-2 comprising derived and/or modified sequence from HRSV(A2)__F-del_DSCav1_mut2 (opt1)
gggagaguccgcucagccagguugcagaagcggcuuagcguguguccuaaucuucucucugcguguagguaggccugugccgcaaacaagcuuaccauggagcugcucauccugaaggccaacgccaucaccaccauccugacggcggugaccuucugcuucgccagcggccagaacaucaccgaggaguucuaccaguccacgugcagcgccgucuccaagggguaccucggcgcccugcggaccggcugguacaccuccgugaucaccaucgagcugagcaacaucaaggagaacaagugcaacgggaccgacgccaaggugaagcucaucaagcaggagcuggacaaguacaagaacgcggucacggaccugcagcuccugaugcaguccaccccggcaaccggcuccggcuccgccaucugcagcggcgucgccgugugcaaggugcugcaccucgagggggaggucaacaagaucaagagcgcccugcuguccaccaacaaggccguggugagccucuccaacggcgucagcgugcugaccuucaaggugcuggaccucaagaacuacaucgacaagcagcugcugcccauccugaacaagcagagcugcuccauccccaacaucgagacggugaucgaguuccagcagaagaacaaccggcuccuggagaucacccgcgaguucagcgugaacgccggggucaccacccccguguccacguacaugcugaccaacagcgagcuccugucccugaucaacgacaugccgaucaccaacgaccagaagaagcucaugagcaacaacgugcagaucguccggcagcaguccuacagcaucaugugcaucaucaaggaggaggugcuggcguacgugguccagcugccccucuacggcgugaucgacacccccugcuggaagcugcacacgagcccccugugcaccaccaacaccaaggagggguccaacaucugccucacgcgcaccgaccggggcugguacugcgacaacgccggcagcgucuccuucuucccgcaggccgagaccugcaaggugcagagcaaccgcguguucugcgacaccaugaacucccugacgcugcccagcgagguaaaccucugcaacgucgacaucuucaaccccaaguacgacugcaagaucaugaccuccaagaccgacgugagcuccagcgugaucaccucccugggggccaucgucagcugcuacggcaagacgaagugcaccgccagcaacaagaaccgggggaucaucaagaccuucuccaacggcugcgacuacgugagcaacaagggcguggacaccguguccgucgggaacacccuguacugcgugaacaagcaggagggccagagccucuacgugaagggggagcccaucaucaacuucuacgacccgcuggucuuccccuccgacgaguucgacgcgagcaucucccaggugaacgagaagaucaaccagagccuggccuucauccgcaaguccgacgagcugcuccacaacgugaacgccggcaagagcacgaccaacaucaugaucaccaccaucaucaucgucaucaucgugauccugcugucccucaucgccguggggcugcugcucuacugcaaggcccggugaggacuaguaauaaggaaacuguaugaaugucugugggcaggaagugaagagauccuucuguaaagguuuuuggaauuaugucugcugaauaauaaacuuuuuugaaauaauaaaucugguagaaaaaugagaucuaaaaaaaaaaaaaaaaaaaaaaaaaaaaaaaaaaaaaaaaaaaaaaaaaaaaaaaaaaaaaaaaugcaucccccccccccccccccccccccccccccccaaaggcucuuuucagagccaccagaauu

SEQ ID NO: 3009 - RNA, 1904 nt, Artificial Sequence
  mRNA product Design g-2 comprising derived and/or modified sequence from HRSV(A2)__F-del_DSCav1_mut2 (opt1)
gggagaguccgcucagccagguugcagaagcggcuuagcguguguccuaaucuucucucugcguguagguaggccugugccgcaaacaagcuuaccauggagcugcucauccugaaggccaacgccaucaccaccauccugacggcggugaccuucugcuucgccagcggccagaacaucaccgaggaguucuaccaguccacgugcagcgccgucuccaagggguaccucggcgcccugcgcaccgggugguacaccagcgugaucaccaucgagcuguccaacaucaaggagaacaagugcaacggcaccgacgccaaggugaagcucaucaagcaggagcuggacaaguacaagaacgcggucacggaccugcagcuccugaugcagagcacccccgccaccggguccggcagcgccaucugcuccggcguggccgugugcaagguccugcaccucgagggggaggugaacaagaucaagagcgcgcugcuguccaccaacaaggccguggucagccucuccaacggcgugagcgugcugacguucaagguccuggaccucaagaacuacaucgacaagcagcugcugccgauccucaacaagcaguccugcagcauccccaacaucgagaccgugaucgaguuccagcagaagaacaaccggcugcuggagaucacccgcgaguucuccgugaacgccggggucaccacgcccgugagcaccuacaugcucaccaacuccgagcugcugagccucaucaacgacaugcccaucaccaacgaccagaagaagcugaugagcaacaacgugcagaucguccggcagcaguccuacagcaucaugugcaucaucaaggaggaggugcuggccuacgugguccagcucccgcuguacggcgugaucgacacgcccugcuggaagcugcacaccagcccccucugcaccaccaacacgaaggagggguccaacaucugccugacccgcaccgaccggggcugguacugcgacaacgccggcuccgugagcuucuucccccaggcggagaccugcaagguccaguccaaccgcguguucugcgacacgaugaacagccugacccucccguccgaggucaaccugugcaacguggacaucuucaaccccaaguacgacugcaagaucaugaccagcaagaccgacguguccagcuccgucaucacgagccugggggccaucguguccugcuacggcaagaccaagugcaccgccagcaacaagaaccgggggaucaucaagaccuucuccaacggcugcgacuacgugagcaacaagggcgucgacacgguguccguggggaacacccucuacugcgucaacaagcaggagggccagagccuguacgugaagggggagcccaucaucaacuucuacgacccccugguguucccgagcgacgaguucgacgccuccaucagccaggucaacgagaagaucaaccagucccucgccuucauccgcaagagcgacgagcugcugcacaacgugaacgcgggcaaguccaccaccaacaucaugaucaccacgaucaucaucgugaucaucgucauccuccugagccugaucgccguggggcuccugcuguacugcaaggcccggugaggacuaguaauaaggaaacuguaugaaugucugugggcaggaagugaagagauccuucuguaaagguuuuuggaauuaugucugcugaauaauaaacuuuuuugaaauaauaaaucugguagaaaaaugagaucuaaaaaaaaaaaaaaaaaaaaaaaaaaaaaaaaaaaaaaaaaaaaaaaaaaaaaaaaaaaaaaaaugcaucccccccccccccccccccccccccccccccaaaggcucuuuucagagccaccagaauu

SEQ ID NO: 3010 - RNA, 1904 nt, Artificial Sequence
  mRNA product Design g-2 comprising derived and/or modified sequence from HRSV(A2)__F-del_DSCav1_mut2 (opt2)
gggagaguccgcucagccagguugcagaagcggcuuagcguguguccuaaucuucucucugcguguagguaggccugugccgcaaacaagcuuaccauggagcuccucauccucaaggccaacgccaucaccaccauccucaccgccgucaccuucugcuucgccuccggccagaacaucaccgaggaguucuaccaguccaccugcuccgccgucuccaagggcuaccucggcgcccuccgcaccggcugguacaccuccgucaucaccaucgagcucuccaacaucaaggagaacaagugcaacggcaccgacgccaaggucaagcucaucaagcaggagcucgacaaguacaagaacgccgucaccgaccuccagcuccucaugcaguccacccccgccaccggcuccggcuccgccaucugcuccggcgucgccgucugcaagguccuccaccucgagggcgaggucaacaagaucaaguccgcccuccucuccaccaacaaggccgucgucucccucuccaacggcgucuccguccucaccuucaagguccucgaccucaagaacuacaucgacaagcagcuccuccccauccucaacaagcaguccugcuccauccccaacaucgagaccgucaucgaguuccagcagaagaacaaccgccuccucgagaucacccgcgaguucuccgucaacgccggcgucaccacccccgucuccaccuacaugcucaccaacuccgagcuccucucccucaucaacgacaugcccaucaccaacgaccagaagaagcucauguccaacaacguccagaucguccgccagcaguccuacuccaucaugugcaucaucaaggaggagguccucgccuacgucguccagcucccccucuacggcgucaucgacacccccugcuggaagcuccacaccuccccccucugcaccaccaacaccaaggagggcuccaacaucugccucacccgcaccgaccgcggcugguacugcgacaacgccggcuccgucuccuucuucccccaggccgagaccugcaagguccaguccaaccgcgucuucugcgacaccaugaacucccucacccuccccuccgaggucaaccucugcaacgucgacaucuucaaccccaaguacgacugcaagaucaugaccuccaagaccgacgucuccuccuccgucaucaccucccucggcgccaucgucuccugcuacggcaagaccaagugcaccgccuccaacaagaaccgcggcaucaucaagaccuucuccaacggcugcgacuacgucuccaacaagggcgucgacaccgucuccgucggcaacacccucuacugcgucaacaagcaggagggccagucccucuacgucaagggcgagcccaucaucaacuucuacgacccccucgucuuccccuccgacgaguucgacgccuccaucucccaggucaacgagaagaucaaccagucccucgccuucauccgcaaguccgacgagcuccuccacaacgucaacgccggcaaguccaccaccaacaucaugaucaccaccaucaucaucgucaucaucgucauccuccucucccucaucgccgucggccuccuccucuacugcaaggcccgcugaggacuaguaauaaggaaacuguaugaaugucugugggcaggaagugaagagauccuucuguaaagguuuuuggaauuaugucugcugaauaauaaacuuuuuugaaauaauaaaucugguagaaaaaugagaucuaaaaaaaaaaaaaaaaaaaaaaaaaaaaaaaaaaaaaaaaaaaaaaaaaaaaaaaaaaaaaaaaugcaucccccccccccccccccccccccccccccccaaaggcucuuuucagagccaccagaauu

SEQ ID NO: 3011 - RNA, 1904 nt, Artificial Sequence
  mRNA product Design g-2 comprising derived and/or modified sequence from HRSV(A2)__F-del_DSCav1_mut2 (opt3)
gggagaguccgcucagccagguugcagaagcggcuuagcguguguccuaaucuucucucugcguguagguaggccugugccgcaaacaagcuuaccauggagcugcucauccuuaaggccaacgcuauuaccacaauacugacugcagugacguucugcuuugccagcggccagaauaucaccgaagaguucuaccaauccacauguucugcggucucaaaaggguauuugggagcuuuaagaacugguugguacaccaguguuauuacaaucgaacugagcaacauuaaggagaauaaaugcaacggcaccgacgccaaggugaaacuaaucaagcaggaacucgauaaguauaaaaaugcaguaacugaccugcagcuucugaugcaguccacacccgccaccgggucuggaucggcuauauguucaggcguggcagucugcaagguguugcaccucgagggugagguuaacaaaaucaagagcgcccugcugaguacgaauaaagcuguggucucccucucuaacggggugagcguauuaacuuuuaagguucuggaucuuaagaauuacauugacaaacaauugcugccuauccuaaacaagcaguccuguucaauuccaaauaucgaaaccgugauagaguuccagcagaaaaacaauaggcuccuggaaauuacacgggaguuuagugucaacgccggagugacuaccccggugagcacauauaugcuuaccaauucugagcuguugucccucaucaacgauaugcccauuacgaacgaccaaaagaaacugaugucaaauaacguccagaucguucgccagcagagcuacaguaucaugugcauuauaaaggaagagguguuagcguauguagugcaacugccucucuacggcgucaucgauacuccauguuggaaacuucauacaucuccccugugcaccacuaauacaaaggaaggcuccaacauuuguuugacccgaacggaccgugggugguacugcgauaaugcaggaagcgugucguucuuuccucaggccgagaccuguaagguucagucuaacagaguguucugcgacacaaugaacucccuaacucugccaucagaagucaaucucugcaauguggauaucuuuaaccccaaauaugacuguaagauaaugaccaguaaaacagauguaagcuccucuguuauuacuagccugggugcuaucgugucaugcuacggcaagaccaaauguacagccaguaauaagaacagggggaucauuaagaccuucuccaauggaugcgacuaugucagcaacaaaggcguggacacugucucuguggguaauacgcuuuacuguguuaacaagcaagaggggcagucacuguaugugaaaggagagccuaucauuaacuuuuacgauccauugguauucccgagugacgaauuugaugcaagcauaucccaggucaaugagaagaucaaccagucucucgcuuucauucggaaaucggacgaacuguuacacaaugugaacgccggcaagagcacaaccaauaucaugaucacuaccauuauaaucguuauuaucgugauucugcuaucccucaucgcggucggccugcuuuuguauugcaaggcccgcugaggacuaguaauaaggaaacuguaugaaugucugugggcaggaagugaagagauccuucuguaaagguuuuuggaauuaugucugcugaauaauaaacuuuuuugaaauaauaaaucugguagaaaaaugagaucuaaaaaaaaaaaaaaaaaaaaaaaaaaaaaaaaaaaaaaaaaaaaaaaaaaaaaaaaaaaaaaaaugcaucccccccccccccccccccccccccccccccaaaggcucuuuucagagccaccagaauu

SEQ ID NO: 3012 - RNA, 1904 nt, Artificial Sequence
  mRNA product Design g-2 comprising derived and/or modified sequence from HRSV(A2)__F-del_DSCav1_mut2 (opt4)
gggagaguccgcucagccagguugcagaagcggcuuagcguguguccuaaucuucucucugcguguagguaggccugugccgcaaacaagcuuaccauggagcugcugauccugaaggccaacgccaucaccaccauccugaccgccgugaccuucugcuucgccagcggccagaacaucaccgaggaguucuaccagagcaccugcagcgccgugagcaagggcuaccugggcgcccugagaaccggcugguacaccagcgugaucaccaucgagcugagcaacaucaaggagaacaagugcaacggcaccgacgccaaggugaagcugaucaagcaggagcuggacaaguacaagaacgccgugaccgaccugcagcugcugaugcagagcacccccgccaccggcagcggcagcgccaucugcagcggcguggccgugugcaaggugcugcaccuggagggcgaggugaacaagaucaagagcgcccugcugagcaccaacaaggccguggugagccugagcaacggcgugagcgugcugaccuucaaggugcuggaccugaagaacuacaucgacaagcagcugcugcccauccugaacaagcagagcugcagcauccccaacaucgagaccgugaucgaguuccagcagaagaacaacagacugcuggagaucaccagagaguucagcgugaacgccggcgugaccacccccgugagcaccuacaugcugaccaacagcgagcugcugagccugaucaacgacaugcccaucaccaacgaccagaagaagcugaugagcaacaacgugcagaucgugagacagcagagcuacagcaucaugugcaucaucaaggaggaggugcuggccuacguggugcagcugccccuguacggcgugaucgacacccccugcuggaagcugcacaccagcccccugugcaccaccaacaccaaggagggcagcaacaucugccugaccagaaccgacagaggcugguacugcgacaacgccggcagcgugagcuucuucccccaggccgagaccugcaaggugcagagcaacagaguguucugcgacaccaugaacagccugacccugcccagcgaggugaaccugugcaacguggacaucuucaaccccaaguacgacugcaagaucaugaccagcaagaccgacgugagcagcagcgugaucaccagccugggcgccaucgugagcugcuacggcaagaccaagugcaccgccagcaacaagaacagaggcaucaucaagaccuucagcaacggcugcgacuacgugagcaacaagggcguggacaccgugagcgugggcaacacccuguacugcgugaacaagcaggagggccagagccuguacgugaagggcgagcccaucaucaacuucuacgacccccugguguuccccagcgacgaguucgacgccagcaucagccaggugaacgagaagaucaaccagagccuggccuucaucagaaagagcgacgagcugcugcacaacgugaacgccggcaagagcaccaccaacaucaugaucaccaccaucaucaucgugaucaucgugauccugcugagccugaucgccgugggccugcugcuguacugcaaggccagaugaggacuaguaauaaggaaacuguaugaaugucugugggcaggaagugaagagauccuucuguaaagguuuuuggaauuaugucugcugaauaauaaacuuuuuugaaauaauaaaucugguagaaaaaugagaucuaaaaaaaaaaaaaaaaaaaaaaaaaaaaaaaaaaaaaaaaaaaaaaaaaaaaaaaaaaaaaaaaugcaucccccccccccccccccccccccccccccccaaaggcucuuuucagagccaccagaauu

SEQ ID NO: 3013 - RNA, 1904 nt, Artificial Sequence
  mRNA product Design g-2 comprising derived and/or modified sequence from HRSV(A2)__F-del_DSCav1_mut2 (opt5)
gggagaguccgcucagccagguugcagaagcggcuuagcguguguccuaaucuucucucugcguguagguaggccugugccgcaaacaagcuuaccauggagcugcucauccugaaggccaacgcuauuaccacaauccuuacggccgugaccuucugcuuugcgagcggccagaauauuacagaagaguucuaccaauccaccuguucugcugucagcaaaggguaucugggagcccucagaacaggcugguacaccuccguuaucacaauugaacugucuaacaucaaggagaauaaaugcaacgggaccgacgccaaggugaaacuuaucaagcaggaacuggauaaguauaaaaaugcugugacggaccuccagcugcugaugcagagcacccccgccacaggauccggcucugcuauuuguagcggggucgccgugugcaagguucuccaccuggagggagaggugaacaaaaucaaguccgcgcuucugagcaccaauaaagccgucgugucucucuccaacggcguuagcgugcugacauuuaagguccuugaucugaagaauuacauugacaaacaacuccugccuauccugaacaagcagucuuguuccauuccgaauaucgaaaccgugauugaguuccagcagaaaaacaaucggcuccuggaaaucacgcgcgaguuuagcgugaacgcuggcgucacaacccccguuucuacauauaugcuuaccaauuccgagcugcucagccugaucaacgauaugccuauuaccaacgaccaaaagaaacuuauguccaauaacgugcagaucgugagacagcagucuuacagcauuaugugcaucauuaaggaagagguccuggccuaugugguucaacucccccuguacggggugaucgauacaccuuguuggaaacugcauacgagcccccucugcaccacaaauaccaaggaaggauccaacaucugucugacacggaccgaccgcggcugguacugcgauaaugcugggucugucuccuucuuuccucaggccgagacguguaaggugcagagcaacagaguuuucugcgacacaaugaacucucuuacccugccgagcgaagugaaucucugcaaugucgauauuuuuaaccccaaauaugacuguaagaucaugaccuccaaaacagaugugucuagcuccgucauuaccagccugggagcgaucgugucuugcuacggcaagacaaaauguacggccuccaauaagaaccgggggauuaucaagaccuucagcaauggaugcgacuauguuucuaacaaaggcguggacacagucuccgugggcaauacccuuuacuguguuaacaagcaagaggggcagagccuguaugugaaaggagagccuaucauuaacuuuuacgauccccucgucuucccuuccgacgaauuugaugcuucuaucagccaggugaaugagaagauuaaccagucccuggccuucauccgcaaaucugacgaacugcuccacaaugugaacgcuggcaagagcacaaccaauauuaugaucacgaccauuaucaucguuauuaucgucauucugcuuucccugaucgccguggggcuccugcuguauugcaaggccagaugaggacuaguaauaaggaaacuguaugaaugucugugggcaggaagugaagagauccuucuguaaagguuuuuggaauuaugucugcugaauaauaaacuuuuuugaaauaauaaaucugguagaaaaaugagaucuaaaaaaaaaaaaaaaaaaaaaaaaaaaaaaaaaaaaaaaaaaaaaaaaaaaaaaaaaaaaaaaaugcaucccccccccccccccccccccccccccccccaaaggcucuuuucagagccaccagaauu

SEQ ID NO: 3014 - RNA, 1904 nt, Artificial Sequence
  mRNA product Design g-2 comprising derived and/or modified sequence from HRSV(A2)__F-del_DSCav1_mut2 (opt6)
gggagaguccgcucagccagguugcagaagcggcuuagcguguguccuaaucuucucucugcguguagguaggccugugccgcaaacaagcuuaccauggaacuccuaauacuuaaagccaaugcaauaaccacaauacuaacagcaguaacauucugcuuugcaucaggacaaaacauaacagaagaauuuuaccaaucaacauguucagcaguaagcaaaggauaccuaggagccuuacgcacagguugguacacuuccguaauaacaauagaacucucaaauauaaaagaaaacaaaugcaacggaaccgaugcaaaaguaaaacuaauaaaacaagaauuagacaaauacaaaaacgcaguaacagaccuacaauuacuuaugcaaucaacacccgcaacaggauccggcucagcaaucuguucaggaguagcaguaugcaaaguucuccaccuagaaggcgaaguaaacaaaauaaaaucagcccuauuaucuaccaauaaagcaguaguaucacuaucaaauggaguaucuguccuaaccuucaaaguacuugaccuaaaaaauuacaucgacaaacaauuacuaccaauacuuaacaaacaaucauguucaauaccaaacauugaaacaguaauagaauuucaacaaaaaaauaacagauuauuagaaauaacccgcgaauuuucaguuaacgcaggaguaacaacaccaguauccacauacauguuaacaaauucagaacucuuaucacuuauaaacgacaugcccauaacaaacgaccaaaaaaaacucaugucuaacaauguucaaauaguucgacaacaaucauacuccauaaugugcauaauaaaagaagaaguucuagcauauguuguacaacucccacucuaugguguuauagacacaccaugcuggaaacuacauacaagccccuuaugcacuacaaacacaaaagaaggcucuaauauaugucuaacccgcacagacagaggcugguauugcgauaacgcagguucaguaucauucuuuccacaagcagaaacuugcaaaguccaauccaauagagucuucugcgacacuaugaacucacucacacucccaucugaagucaauuuauguaacgucgauaucuucaacccaaaauacgacugcaaaauaaugaccucaaaaacagacguaagcucaucagucauaacuucucuaggcgcaaucgucucauguuacggcaaaacaaaauguaccgcaucaaacaaaaaucgagguauaauaaaaaccuuuucuaacggcugcgacuacguaucaaacaaaggaguagauacuguaagugucggaaacacauuauacugcgucaacaaacaagaaggacaaucccuauauguuaaaggcgaaccuaucauuaauuucuacgacccacucgucuuuccauccgacgaauuugacgcaucaauuucccaaguaaaugaaaaaauaaaccaaucccuugcauucauaagaaaaucagaugaacuauuacacaacguaaacgcaggcaaaucaacaacaaauauaaugaucacaacaauaauaaucguaauaauaguaauccuacucucacuaauagcaguaggcuuacuauuauauugcaaagccagauaaggacuaguaauaaggaaacuguaugaaugucugugggcaggaagugaagagauccuucuguaaagguuuuuggaauuaugucugcugaauaauaaacuuuuuugaaauaauaaaucugguagaaaaaugagaucuaaaaaaaaaaaaaaaaaaaaaaaaaaaaaaaaaaaaaaaaaaaaaaaaaaaaaaaaaaaaaaaaugcaucccccccccccccccccccccccccccccccaaaggcucuuuucagagccaccagaauu

SEQ ID NO: 3015 - RNA, 1904 nt, Artificial Sequence
  mRNA product Design g-2 comprising derived and/or modified sequence from HRSV(A2)__F-del_DSCav1_mut2 (opt11)
gggagaguccgcucagccagguugcagaagcggcuuagcguguguccuaaucuucucucugcguguagguaggccugugccgcaaacaagcuuaccauggaacuucuuauccuaaaagcgaacgccauaaccacaauccuaacagcagucaccuucuguuucgccucaggacaaaacaucaccgaggaauuuuaccaauccacauguagcgcugucucaaaaggcuaccucggcgcccuccgaaccggcugguacacauccguaauaacgaucgaacucuccaacauaaaagaaaauaaaugcaacggcaccgacgccaaagucaaacuuaucaaacaagaacuagacaaauacaaaaacgccgucaccgaccuccagcuccucaugcaauccaccccagcaacaggcuccggaagcgcaaucugcucaggcgucgccguaugcaaaguacuccaccucgaaggagaagucaacaaaaucaaauccgcccuccuauccacaaacaaagcaguugucucacucuccaacgggguaagcguacugaccuucaaaguccuagaccucaaaaacuacaucgauaaacaacuccuuccaauccucaacaaacaaucaugcucuauccccaacaucgaaaccguaaucgaauuucaacaaaaaaacaaccgccuacuugaaaucacacgcgaauuuagcgucaacgcaggaguaacaacacccguguccacauauaugcucacgaacagcgaacuacuaucccugauuaacgacaugcccaucaccaacgaccaaaaaaaacuaaugagcaacaacguacaaaucguccgccaacaaagcuacucuauaaugugcaucaucaaggaagaaguccuagccuacgucguccaauuaccacucuacggcgucaucgacacacccugcuggaaacuccauacauccccccucugcaccaccaacaccaaagaaggguccaacauaugccucacucgcacagaccgcggcugguacugcgacaacgcuggcagcgucagcuucuucccccaggccgaaaccugcaaaguccaauccaacagagucuucugcgacaccaugaacucgcucacccuccccuccgaggucaaccucugcaacgucgacauauucaaccccaaauacgacugcaaaaucaugaccuccaaaaccgacgucagcucaucagucaucacaucccucggggccaucgucuccugcuacggcaaaaccaagugcaccgccucaaacaaaaaccgcggcauuaucaaaacauucuccaacggcugcgacuacgucuccaacaaaggcgucgacacagucuccgucgguaacacccucuacugcguaaauaaacaagaaggccaaucccucuacgucaaaggcgaacccaucaucaacuucuacgacccucucgucuuccccuccgacgaauuugacgccucaaucagccaaguuaacgaaaaaaucaaccaaucacucgccuucauccgcaaauccgacgaacuccuccacaacguuaacgccggcaaaucuaccacgaacaucaugaucaccaccauaaucaucguaauuaucguaauacuccuaucccucauagcaguaggccuccuacucuacugcaaagcccguuaaggacuaguaauaaggaaacuguaugaaugucugugggcaggaagugaagagauccuucuguaaagguuuuuggaauuaugucugcugaauaauaaacuuuuuugaaauaauaaaucugguagaaaaaugagaucuaaaaaaaaaaaaaaaaaaaaaaaaaaaaaaaaaaaaaaaaaaaaaaaaaaaaaaaaaaaaaaaaugcaucccccccccccccccccccccccccccccccaaaggcucuuuucagagccaccagaauu

SEQ ID NO: 3016 - RNA, 2136 nt, Artificial Sequence
  mRNA product Design g-3 comprising derived and/or modified sequence from HRSV(A2)__F-del_DSCav1_mut2 (opt1)
gggagaguccgcucagccagguugcagaagcggcuuagcguguguccuaaucuucucucugcguguagguaggccugugccgcaaacaagcuuaccauggagcugcucauccugaaggccaacgccaucaccaccauccugacggcggugaccuucugcuucgccagcggccagaacaucaccgaggaguucuaccaguccacgugcagcgccgucuccaagggguaccucggcgcccugcggaccggcugguacaccuccgugaucaccaucgagcugagcaacaucaaggagaacaagugcaacgggaccgacgccaaggugaagcucaucaagcaggagcuggacaaguacaagaacgcggucacggaccugcagcuccugaugcaguccaccccggcaaccggcuccggcuccgccaucugcagcggcgucgccgugugcaaggugcugcaccucgagggggaggucaacaagaucaagagcgcccugcuguccaccaacaaggccguggugagccucuccaacggcgucagcgugcugaccuucaaggugcuggaccucaagaacuacaucgacaagcagcugcugcccauccugaacaagcagagcugcuccauccccaacaucgagacggugaucgaguuccagcagaagaacaaccggcuccuggagaucacccgcgaguucagcgugaacgccggggucaccacccccguguccacguacaugcugaccaacagcgagcuccugucccugaucaacgacaugccgaucaccaacgaccagaagaagcucaugagcaacaacgugcagaucguccggcagcaguccuacagcaucaugugcaucaucaaggaggaggugcuggcguacgugguccagcugccccucuacggcgugaucgacacccccugcuggaagcugcacacgagcccccugugcaccaccaacaccaaggagggguccaacaucugccucacgcgcaccgaccggggcugguacugcgacaacgccggcagcgucuccuucuucccgcaggccgagaccugcaaggugcagagcaaccgcguguucugcgacaccaugaacucccugacgcugcccagcgagguaaaccucugcaacgucgacaucuucaaccccaaguacgacugcaagaucaugaccuccaagaccgacgugagcuccagcgugaucaccucccugggggccaucgucagcugcuacggcaagacgaagugcaccgccagcaacaagaaccgggggaucaucaagaccuucuccaacggcugcgacuacgugagcaacaagggcguggacaccguguccgucgggaacacccuguacugcgugaacaagcaggagggccagagccucuacgugaagggggagcccaucaucaacuucuacgacccgcuggucuuccccuccgacgaguucgacgcgagcaucucccaggugaacgagaagaucaaccagagccuggccuucauccgcaaguccgacgagcugcuccacaacgugaacgccggcaagagcacgaccaacaucaugaucaccaccaucaucaucgucaucaucgugauccugcugucccucaucgccguggggcugcugcucuacugcaaggcccggugaggacuagugaagggaacacccaaauuuaauucagccuuaagcacaauuaauuaagagugaaacguaauuguacaagcaguuggucacccaccauagggcaugaucaacaccgcaaccuuuccuuuuucccccagugauucugaaaaaccccucuucccuucagcuugcuuagauguuccaaauuuaguaagcuuaaggcggccuacagaagaaaaagaaaaaaaaggccacaaaaguucccucucacuuucaguaaauaaaauaaaagcagcaacagaaauaaagaaauaaaugaaauucaaaaugaaauaaauauuguguugugcagcauuaaaaaaucaauaaaaauuaaaaaugagcaagaucuaaaaaaaaaaaaaaaaaaaaaaaaaaaaaaaaaaaaaaaaaaaaaaaaaaaaaaaaaaaaaaaaugcaucccccccccccccccccccccccccccccccaaaggcucuuuucagagccaccagaauu

SEQ ID NO: 3017 - RNA, 2136 nt, Artificial Sequence
  mRNA product Design g-3 comprising derived and/or modified sequence from HRSV(A2)__F-del_DSCav1_mut2 (opt1)
gggagaguccgcucagccagguugcagaagcggcuuagcguguguccuaaucuucucucugcguguagguaggccugugccgcaaacaagcuuaccauggagcugcucauccugaaggccaacgccaucaccaccauccugacggcggugaccuucugcuucgccagcggccagaacaucaccgaggaguucuaccaguccacgugcagcgccgucuccaagggguaccucggcgcccugcgcaccgggugguacaccagcgugaucaccaucgagcuguccaacaucaaggagaacaagugcaacggcaccgacgccaaggugaagcucaucaagcaggagcuggacaaguacaagaacgcggucacggaccugcagcuccugaugcagagcacccccgccaccggguccggcagcgccaucugcuccggcguggccgugugcaagguccugcaccucgagggggaggugaacaagaucaagagcgcgcugcuguccaccaacaaggccguggucagccucuccaacggcgugagcgugcugacguucaagguccuggaccucaagaacuacaucgacaagcagcugcugccgauccucaacaagcaguccugcagcauccccaacaucgagaccgugaucgaguuccagcagaagaacaaccggcugcuggagaucacccgcgaguucuccgugaacgccggggucaccacgcccgugagcaccuacaugcucaccaacuccgagcugcugagccucaucaacgacaugcccaucaccaacgaccagaagaagcugaugagcaacaacgugcagaucguccggcagcaguccuacagcaucaugugcaucaucaaggaggaggugcuggccuacgugguccagcucccgcuguacggcgugaucgacacgcccugcuggaagcugcacaccagcccccucugcaccaccaacacgaaggagggguccaacaucugccugacccgcaccgaccggggcugguacugcgacaacgccggcuccgugagcuucuucccccaggcggagaccugcaagguccaguccaaccgcguguucugcgacacgaugaacagccugacccucccguccgaggucaaccugugcaacguggacaucuucaaccccaaguacgacugcaagaucaugaccagcaagaccgacguguccagcuccgucaucacgagccugggggccaucguguccugcuacggcaagaccaagugcaccgccagcaacaagaaccgggggaucaucaagaccuucuccaacggcugcgacuacgugagcaacaagggcgucgacacgguguccguggggaacacccucuacugcgucaacaagcaggagggccagagccuguacgugaagggggagcccaucaucaacuucuacgacccccugguguucccgagcgacgaguucgacgccuccaucagccaggucaacgagaagaucaaccagucccucgccuucauccgcaagagcgacgagcugcugcacaacgugaacgcgggcaaguccaccaccaacaucaugaucaccacgaucaucaucgugaucaucgucauccuccugagccugaucgccguggggcuccugcuguacugcaaggcccggugaggacuagugaagggaacacccaaauuuaauucagccuuaagcacaauuaauuaagagugaaacguaauuguacaagcaguuggucacccaccauagggcaugaucaacaccgcaaccuuuccuuuuucccccagugauucugaaaaaccccucuucccuucagcuugcuuagauguuccaaauuuaguaagcuuaaggcggccuacagaagaaaaagaaaaaaaaggccacaaaaguucccucucacuuucaguaaauaaaauaaaagcagcaacagaaauaaagaaauaaaugaaauucaaaaugaaauaaauauuguguugugcagcauuaaaaaaucaauaaaaauuaaaaaugagcaagaucuaaaaaaaaaaaaaaaaaaaaaaaaaaaaaaaaaaaaaaaaaaaaaaaaaaaaaaaaaaaaaaaaugcaucccccccccccccccccccccccccccccccaaaggcucuuuucagagccaccagaauu

SEQ ID NO: 3018 - RNA, 2136 nt, Artificial Sequence
  mRNA product Design g-3 comprising derived and/or modified sequence from HRSV(A2)__F-del_DSCav1_mut2 (opt2)
gggagaguccgcucagccagguugcagaagcggcuuagcguguguccuaaucuucucucugcguguagguaggccugugccgcaaacaagcuuaccauggagcuccucauccucaaggccaacgccaucaccaccauccucaccgccgucaccuucugcuucgccuccggccagaacaucaccgaggaguucuaccaguccaccugcuccgccgucuccaagggcuaccucggcgcccuccgcaccggcugguacaccuccgucaucaccaucgagcucuccaacaucaaggagaacaagugcaacggcaccgacgccaaggucaagcucaucaagcaggagcucgacaaguacaagaacgccgucaccgaccuccagcuccucaugcaguccacccccgccaccggcuccggcuccgccaucugcuccggcgucgccgucugcaagguccuccaccucgagggcgaggucaacaagaucaaguccgcccuccucuccaccaacaaggccgucgucucccucuccaacggcgucuccguccucaccuucaagguccucgaccucaagaacuacaucgacaagcagcuccuccccauccucaacaagcaguccugcuccauccccaacaucgagaccgucaucgaguuccagcagaagaacaaccgccuccucgagaucacccgcgaguucuccgucaacgccggcgucaccacccccgucuccaccuacaugcucaccaacuccgagcuccucucccucaucaacgacaugcccaucaccaacgaccagaagaagcucauguccaacaacguccagaucguccgccagcaguccuacuccaucaugugcaucaucaaggaggagguccucgccuacgucguccagcucccccucuacggcgucaucgacacccccugcuggaagcuccacaccuccccccucugcaccaccaacaccaaggagggcuccaacaucugccucacccgcaccgaccgcggcugguacugcgacaacgccggcuccgucuccuucuucccccaggccgagaccugcaagguccaguccaaccgcgucuucugcgacaccaugaacucccucacccuccccuccgaggucaaccucugcaacgucgacaucuucaaccccaaguacgacugcaagaucaugaccuccaagaccgacgucuccuccuccgucaucaccucccucggcgccaucgucuccugcuacggcaagaccaagugcaccgccuccaacaagaaccgcggcaucaucaagaccuucuccaacggcugcgacuacgucuccaacaagggcgucgacaccgucuccgucggcaacacccucuacugcgucaacaagcaggagggccagucccucuacgucaagggcgagcccaucaucaacuucuacgacccccucgucuuccccuccgacgaguucgacgccuccaucucccaggucaacgagaagaucaaccagucccucgccuucauccgcaaguccgacgagcuccuccacaacgucaacgccggcaaguccaccaccaacaucaugaucaccaccaucaucaucgucaucaucgucauccuccucucccucaucgccgucggccuccuccucuacugcaaggcccgcugaggacuagugaagggaacacccaaauuuaauucagccuuaagcacaauuaauuaagagugaaacguaauuguacaagcaguuggucacccaccauagggcaugaucaacaccgcaaccuuuccuuuuucccccagugauucugaaaaaccccucuucccuucagcuugcuuagauguuccaaauuuaguaagcuuaaggcggccuacagaagaaaaagaaaaaaaaggccacaaaaguucccucucacuuucaguaaauaaaauaaaagcagcaacagaaauaaagaaauaaaugaaauucaaaaugaaauaaauauuguguugugcagcauuaaaaaaucaauaaaaauuaaaaaugagcaagaucuaaaaaaaaaaaaaaaaaaaaaaaaaaaaaaaaaaaaaaaaaaaaaaaaaaaaaaaaaaaaaaaaugcaucccccccccccccccccccccccccccccccaaaggcucuuuucagagccaccagaauu

SEQ ID NO: 3019 - RNA, 2136 nt, Artificial Sequence
  mRNA product Design g-3 comprising derived and/or modified sequence from HRSV(A2)__F-del_DSCav1_mut2 (opt3)
gggagaguccgcucagccagguugcagaagcggcuuagcguguguccuaaucuucucucugcguguagguaggccugugccgcaaacaagcuuaccauggagcugcucauccuuaaggccaacgcuauuaccacaauacugacugcagugacguucugcuuugccagcggccagaauaucaccgaagaguucuaccaauccacauguucugcggucucaaaaggguauuugggagcuuuaagaacugguugguacaccaguguuauuacaaucgaacugagcaacauuaaggagaauaaaugcaacggcaccgacgccaaggugaaacuaaucaagcaggaacucgauaaguauaaaaaugcaguaacugaccugcagcuucugaugcaguccacacccgccaccgggucuggaucggcuauauguucaggcguggcagucugcaagguguugcaccucgagggugagguuaacaaaaucaagagcgcccugcugaguacgaauaaagcuguggucucccucucuaacggggugagcguauuaacuuuuaagguucuggaucuuaagaauuacauugacaaacaauugcugccuauccuaaacaagcaguccuguucaauuccaaauaucgaaaccgugauagaguuccagcagaaaaacaauaggcuccuggaaauuacacgggaguuuagugucaacgccggagugacuaccccggugagcacauauaugcuuaccaauucugagcuguugucccucaucaacgauaugcccauuacgaacgaccaaaagaaacugaugucaaauaacguccagaucguucgccagcagagcuacaguaucaugugcauuauaaaggaagagguguuagcguauguagugcaacugccucucuacggcgucaucgauacuccauguuggaaacuucauacaucuccccugugcaccacuaauacaaaggaaggcuccaacauuuguuugacccgaacggaccgugggugguacugcgauaaugcaggaagcgugucguucuuuccucaggccgagaccuguaagguucagucuaacagaguguucugcgacacaaugaacucccuaacucugccaucagaagucaaucucugcaauguggauaucuuuaaccccaaauaugacuguaagauaaugaccaguaaaacagauguaagcuccucuguuauuacuagccugggugcuaucgugucaugcuacggcaagaccaaauguacagccaguaauaagaacagggggaucauuaagaccuucuccaauggaugcgacuaugucagcaacaaaggcguggacacugucucuguggguaauacgcuuuacuguguuaacaagcaagaggggcagucacuguaugugaaaggagagccuaucauuaacuuuuacgauccauugguauucccgagugacgaauuugaugcaagcauaucccaggucaaugagaagaucaaccagucucucgcuuucauucggaaaucggacgaacuguuacacaaugugaacgccggcaagagcacaaccaauaucaugaucacuaccauuauaaucguuauuaucgugauucugcuaucccucaucgcggucggccugcuuuuguauugcaaggcccgcugaggacuagugaagggaacacccaaauuuaauucagccuuaagcacaauuaauuaagagugaaacguaauuguacaagcaguuggucacccaccauagggcaugaucaacaccgcaaccuuuccuuuuucccccagugauucugaaaaaccccucuucccuucagcuugcuuagauguuccaaauuuaguaagcuuaaggcggccuacagaagaaaaagaaaaaaaaggccacaaaaguucccucucacuuucaguaaauaaaauaaaagcagcaacagaaauaaagaaauaaaugaaauucaaaaugaaauaaauauuguguugugcagcauuaaaaaaucaauaaaaauuaaaaaugagcaagaucuaaaaaaaaaaaaaaaaaaaaaaaaaaaaaaaaaaaaaaaaaaaaaaaaaaaaaaaaaaaaaaaaugcaucccccccccccccccccccccccccccccccaaaggcucuuuucagagccaccagaauu

SEQ ID NO: 3020 - RNA, 2136 nt, Artificial Sequence
  mRNA product Design g-3 comprising derived and/or modified sequence from HRSV(A2)__F-del_DSCav1_mut2 (opt4)
gggagaguccgcucagccagguugcagaagcggcuuagcguguguccuaaucuucucucugcguguagguaggccugugccgcaaacaagcuuaccauggagcugcugauccugaaggccaacgccaucaccaccauccugaccgccgugaccuucugcuucgccagcggccagaacaucaccgaggaguucuaccagagcaccugcagcgccgugagcaagggcuaccugggcgcccugagaaccggcugguacaccagcgugaucaccaucgagcugagcaacaucaaggagaacaagugcaacggcaccgacgccaaggugaagcugaucaagcaggagcuggacaaguacaagaacgccgugaccgaccugcagcugcugaugcagagcacccccgccaccggcagcggcagcgccaucugcagcggcguggccgugugcaaggugcugcaccuggagggcgaggugaacaagaucaagagcgcccugcugagcaccaacaaggccguggugagccugagcaacggcgugagcgugcugaccuucaaggugcuggaccugaagaacuacaucgacaagcagcugcugcccauccugaacaagcagagcugcagcauccccaacaucgagaccgugaucgaguuccagcagaagaacaacagacugcuggagaucaccagagaguucagcgugaacgccggcgugaccacccccgugagcaccuacaugcugaccaacagcgagcugcugagccugaucaacgacaugcccaucaccaacgaccagaagaagcugaugagcaacaacgugcagaucgugagacagcagagcuacagcaucaugugcaucaucaaggaggaggugcuggccuacguggugcagcugccccuguacggcgugaucgacacccccugcuggaagcugcacaccagcccccugugcaccaccaacaccaaggagggcagcaacaucugccugaccagaaccgacagaggcugguacugcgacaacgccggcagcgugagcuucuucccccaggccgagaccugcaaggugcagagcaacagaguguucugcgacaccaugaacagccugacccugcccagcgaggugaaccugugcaacguggacaucuucaaccccaaguacgacugcaagaucaugaccagcaagaccgacgugagcagcagcgugaucaccagccugggcgccaucgugagcugcuacggcaagaccaagugcaccgccagcaacaagaacagaggcaucaucaagaccuucagcaacggcugcgacuacgugagcaacaagggcguggacaccgugagcgugggcaacacccuguacugcgugaacaagcaggagggccagagccuguacgugaagggcgagcccaucaucaacuucuacgacccccugguguuccccagcgacgaguucgacgccagcaucagccaggugaacgagaagaucaaccagagccuggccuucaucagaaagagcgacgagcugcugcacaacgugaacgccggcaagagcaccaccaacaucaugaucaccaccaucaucaucgugaucaucgugauccugcugagccugaucgccgugggccugcugcuguacugcaaggccagaugaggacuagugaagggaacacccaaauuuaauucagccuuaagcacaauuaauuaagagugaaacguaauuguacaagcaguuggucacccaccauagggcaugaucaacaccgcaaccuuuccuuuuucccccagugauucugaaaaaccccucuucccuucagcuugcuuagauguuccaaauuuaguaagcuuaaggcggccuacagaagaaaaagaaaaaaaaggccacaaaaguucccucucacuuucaguaaauaaaauaaaagcagcaacagaaauaaagaaauaaaugaaauucaaaaugaaauaaauauuguguugugcagcauuaaaaaaucaauaaaaauuaaaaaugagcaagaucuaaaaaaaaaaaaaaaaaaaaaaaaaaaaaaaaaaaaaaaaaaaaaaaaaaaaaaaaaaaaaaaaugcaucccccccccccccccccccccccccccccccaaaggcucuuuucagagccaccagaauu

SEQ ID NO: 3021 - RNA, 2136 nt, Artificial Sequence
  mRNA product Design g-3 comprising derived and/or modified sequence from HRSV(A2)__F-del_DSCav1_mut2 (opt5)
gggagaguccgcucagccagguugcagaagcggcuuagcguguguccuaaucuucucucugcguguagguaggccugugccgcaaacaagcuuaccauggagcugcucauccugaaggccaacgcuauuaccacaauccuuacggccgugaccuucugcuuugcgagcggccagaauauuacagaagaguucuaccaauccaccuguucugcugucagcaaaggguaucugggagcccucagaacaggcugguacaccuccguuaucacaauugaacugucuaacaucaaggagaauaaaugcaacgggaccgacgccaaggugaaacuuaucaagcaggaacuggauaaguauaaaaaugcugugacggaccuccagcugcugaugcagagcacccccgccacaggauccggcucugcuauuuguagcggggucgccgugugcaagguucuccaccuggagggagaggugaacaaaaucaaguccgcgcuucugagcaccaauaaagccgucgugucucucuccaacggcguuagcgugcugacauuuaagguccuugaucugaagaauuacauugacaaacaacuccugccuauccugaacaagcagucuuguuccauuccgaauaucgaaaccgugauugaguuccagcagaaaaacaaucggcuccuggaaaucacgcgcgaguuuagcgugaacgcuggcgucacaacccccguuucuacauauaugcuuaccaauuccgagcugcucagccugaucaacgauaugccuauuaccaacgaccaaaagaaacuuauguccaauaacgugcagaucgugagacagcagucuuacagcauuaugugcaucauuaaggaagagguccuggccuaugugguucaacucccccuguacggggugaucgauacaccuuguuggaaacugcauacgagcccccucugcaccacaaauaccaaggaaggauccaacaucugucugacacggaccgaccgcggcugguacugcgauaaugcugggucugucuccuucuuuccucaggccgagacguguaaggugcagagcaacagaguuuucugcgacacaaugaacucucuuacccugccgagcgaagugaaucucugcaaugucgauauuuuuaaccccaaauaugacuguaagaucaugaccuccaaaacagaugugucuagcuccgucauuaccagccugggagcgaucgugucuugcuacggcaagacaaaauguacggccuccaauaagaaccgggggauuaucaagaccuucagcaauggaugcgacuauguuucuaacaaaggcguggacacagucuccgugggcaauacccuuuacuguguuaacaagcaagaggggcagagccuguaugugaaaggagagccuaucauuaacuuuuacgauccccucgucuucccuuccgacgaauuugaugcuucuaucagccaggugaaugagaagauuaaccagucccuggccuucauccgcaaaucugacgaacugcuccacaaugugaacgcuggcaagagcacaaccaauauuaugaucacgaccauuaucaucguuauuaucgucauucugcuuucccugaucgccguggggcuccugcuguauugcaaggccagaugaggacuagugaagggaacacccaaauuuaauucagccuuaagcacaauuaauuaagagugaaacguaauuguacaagcaguuggucacccaccauagggcaugaucaacaccgcaaccuuuccuuuuucccccagugauucugaaaaaccccucuucccuucagcuugcuuagauguuccaaauuuaguaagcuuaaggcggccuacagaagaaaaagaaaaaaaaggccacaaaaguucccucucacuuucaguaaauaaaauaaaagcagcaacagaaauaaagaaauaaaugaaauucaaaaugaaauaaauauuguguugugcagcauuaaaaaaucaauaaaaauuaaaaaugagcaagaucuaaaaaaaaaaaaaaaaaaaaaaaaaaaaaaaaaaaaaaaaaaaaaaaaaaaaaaaaaaaaaaaaugcaucccccccccccccccccccccccccccccccaaaggcucuuuucagagccaccagaauu

SEQ ID NO: 3022 - RNA, 2136 nt, Artificial Sequence
  mRNA product Design g-3 comprising derived and/or modified sequence from HRSV(A2)__F-del_DSCav1_mut2 (opt6)
gggagaguccgcucagccagguugcagaagcggcuuagcguguguccuaaucuucucucugcguguagguaggccugugccgcaaacaagcuuaccauggaacuccuaauacuuaaagccaaugcaauaaccacaauacuaacagcaguaacauucugcuuugcaucaggacaaaacauaacagaagaauuuuaccaaucaacauguucagcaguaagcaaaggauaccuaggagccuuacgcacagguugguacacuuccguaauaacaauagaacucucaaauauaaaagaaaacaaaugcaacggaaccgaugcaaaaguaaaacuaauaaaacaagaauuagacaaauacaaaaacgcaguaacagaccuacaauuacuuaugcaaucaacacccgcaacaggauccggcucagcaaucuguucaggaguagcaguaugcaaaguucuccaccuagaaggcgaaguaaacaaaauaaaaucagcccuauuaucuaccaauaaagcaguaguaucacuaucaaauggaguaucuguccuaaccuucaaaguacuugaccuaaaaaauuacaucgacaaacaauuacuaccaauacuuaacaaacaaucauguucaauaccaaacauugaaacaguaauagaauuucaacaaaaaaauaacagauuauuagaaauaacccgcgaauuuucaguuaacgcaggaguaacaacaccaguauccacauacauguuaacaaauucagaacucuuaucacuuauaaacgacaugcccauaacaaacgaccaaaaaaaacucaugucuaacaauguucaaauaguucgacaacaaucauacuccauaaugugcauaauaaaagaagaaguucuagcauauguuguacaacucccacucuaugguguuauagacacaccaugcuggaaacuacauacaagccccuuaugcacuacaaacacaaaagaaggcucuaauauaugucuaacccgcacagacagaggcugguauugcgauaacgcagguucaguaucauucuuuccacaagcagaaacuugcaaaguccaauccaauagagucuucugcgacacuaugaacucacucacacucccaucugaagucaauuuauguaacgucgauaucuucaacccaaaauacgacugcaaaauaaugaccucaaaaacagacguaagcucaucagucauaacuucucuaggcgcaaucgucucauguuacggcaaaacaaaauguaccgcaucaaacaaaaaucgagguauaauaaaaaccuuuucuaacggcugcgacuacguaucaaacaaaggaguagauacuguaagugucggaaacacauuauacugcgucaacaaacaagaaggacaaucccuauauguuaaaggcgaaccuaucauuaauuucuacgacccacucgucuuuccauccgacgaauuugacgcaucaauuucccaaguaaaugaaaaaauaaaccaaucccuugcauucauaagaaaaucagaugaacuauuacacaacguaaacgcaggcaaaucaacaacaaauauaaugaucacaacaauaauaaucguaauaauaguaauccuacucucacuaauagcaguaggcuuacuauuauauugcaaagccagauaaggacuagugaagggaacacccaaauuuaauucagccuuaagcacaauuaauuaagagugaaacguaauuguacaagcaguuggucacccaccauagggcaugaucaacaccgcaaccuuuccuuuuucccccagugauucugaaaaaccccucuucccuucagcuugcuuagauguuccaaauuuaguaagcuuaaggcggccuacagaagaaaaagaaaaaaaaggccacaaaaguucccucucacuuucaguaaauaaaauaaaagcagcaacagaaauaaagaaauaaaugaaauucaaaaugaaauaaauauuguguugugcagcauuaaaaaaucaauaaaaauuaaaaaugagcaagaucuaaaaaaaaaaaaaaaaaaaaaaaaaaaaaaaaaaaaaaaaaaaaaaaaaaaaaaaaaaaaaaaaugcaucccccccccccccccccccccccccccccccaaaggcucuuuucagagccaccagaauu

SEQ ID NO: 3023 - RNA, 2136 nt, Artificial Sequence
  mRNA product Design g-3 comprising derived and/or modified sequence from HRSV(A2)__F-del_DSCav1_mut2 (opt11)
gggagaguccgcucagccagguugcagaagcggcuuagcguguguccuaaucuucucucugcguguagguaggccugugccgcaaacaagcuuaccauggaacuucuuauccuaaaagcgaacgccauaaccacaauccuaacagcagucaccuucuguuucgccucaggacaaaacaucaccgaggaauuuuaccaauccacauguagcgcugucucaaaaggcuaccucggcgcccuccgaaccggcugguacacauccguaauaacgaucgaacucuccaacauaaaagaaaauaaaugcaacggcaccgacgccaaagucaaacuuaucaaacaagaacuagacaaauacaaaaacgccgucaccgaccuccagcuccucaugcaauccaccccagcaacaggcuccggaagcgcaaucugcucaggcgucgccguaugcaaaguacuccaccucgaaggagaagucaacaaaaucaaauccgcccuccuauccacaaacaaagcaguugucucacucuccaacgggguaagcguacugaccuucaaaguccuagaccucaaaaacuacaucgauaaacaacuccuuccaauccucaacaaacaaucaugcucuauccccaacaucgaaaccguaaucgaauuucaacaaaaaaacaaccgccuacuugaaaucacacgcgaauuuagcgucaacgcaggaguaacaacacccguguccacauauaugcucacgaacagcgaacuacuaucccugauuaacgacaugcccaucaccaacgaccaaaaaaaacuaaugagcaacaacguacaaaucguccgccaacaaagcuacucuauaaugugcaucaucaaggaagaaguccuagccuacgucguccaauuaccacucuacggcgucaucgacacacccugcuggaaacuccauacauccccccucugcaccaccaacaccaaagaaggguccaacauaugccucacucgcacagaccgcggcugguacugcgacaacgcuggcagcgucagcuucuucccccaggccgaaaccugcaaaguccaauccaacagagucuucugcgacaccaugaacucgcucacccuccccuccgaggucaaccucugcaacgucgacauauucaaccccaaauacgacugcaaaaucaugaccuccaaaaccgacgucagcucaucagucaucacaucccucggggccaucgucuccugcuacggcaaaaccaagugcaccgccucaaacaaaaaccgcggcauuaucaaaacauucuccaacggcugcgacuacgucuccaacaaaggcgucgacacagucuccgucgguaacacccucuacugcguaaauaaacaagaaggccaaucccucuacgucaaaggcgaacccaucaucaacuucuacgacccucucgucuuccccuccgacgaauuugacgccucaaucagccaaguuaacgaaaaaaucaaccaaucacucgccuucauccgcaaauccgacgaacuccuccacaacguuaacgccggcaaaucuaccacgaacaucaugaucaccaccauaaucaucguaauuaucguaauacuccuaucccucauagcaguaggccuccuacucuacugcaaagcccguuaaggacuagugaagggaacacccaaauuuaauucagccuuaagcacaauuaauuaagagugaaacguaauuguacaagcaguuggucacccaccauagggcaugaucaacaccgcaaccuuuccuuuuucccccagugauucugaaaaaccccucuucccuucagcuugcuuagauguuccaaauuuaguaagcuuaaggcggccuacagaagaaaaagaaaaaaaaggccacaaaaguucccucucacuuucaguaaauaaaauaaaagcagcaacagaaauaaagaaauaaaugaaauucaaaaugaaauaaauauuguguugugcagcauuaaaaaaucaauaaaaauuaaaaaugagcaagaucuaaaaaaaaaaaaaaaaaaaaaaaaaaaaaaaaaaaaaaaaaaaaaaaaaaaaaaaaaaaaaaaaugcaucccccccccccccccccccccccccccccccaaaggcucuuuucagagccaccagaauu

SEQ ID NO: 3024 - RNA, 1931 nt, Artificial Sequence
  mRNA product Design g-4 comprising derived and/or modified sequence from HRSV(A2)__F-del_DSCav1_mut2 (opt1)
gggagacuccugucgggcggaaguaggaggaguagaguuuaaaaacaguacucuuuuuccgguucgggacguaguugaagcaacgacaagccggauaaccgcucuugagacaggaagcuuaccauggagcugcucauccugaaggccaacgccaucaccaccauccugacggcggugaccuucugcuucgccagcggccagaacaucaccgaggaguucuaccaguccacgugcagcgccgucuccaagggguaccucggcgcccugcggaccggcugguacaccuccgugaucaccaucgagcugagcaacaucaaggagaacaagugcaacgggaccgacgccaaggugaagcucaucaagcaggagcuggacaaguacaagaacgcggucacggaccugcagcuccugaugcaguccaccccggcaaccggcuccggcuccgccaucugcagcggcgucgccgugugcaaggugcugcaccucgagggggaggucaacaagaucaagagcgcccugcuguccaccaacaaggccguggugagccucuccaacggcgucagcgugcugaccuucaaggugcuggaccucaagaacuacaucgacaagcagcugcugcccauccugaacaagcagagcugcuccauccccaacaucgagacggugaucgaguuccagcagaagaacaaccggcuccuggagaucacccgcgaguucagcgugaacgccggggucaccacccccguguccacguacaugcugaccaacagcgagcuccugucccugaucaacgacaugccgaucaccaacgaccagaagaagcucaugagcaacaacgugcagaucguccggcagcaguccuacagcaucaugugcaucaucaaggaggaggugcuggcguacgugguccagcugccccucuacggcgugaucgacacccccugcuggaagcugcacacgagcccccugugcaccaccaacaccaaggagggguccaacaucugccucacgcgcaccgaccggggcugguacugcgacaacgccggcagcgucuccuucuucccgcaggccgagaccugcaaggugcagagcaaccgcguguucugcgacaccaugaacucccugacgcugcccagcgagguaaaccucugcaacgucgacaucuucaaccccaaguacgacugcaagaucaugaccuccaagaccgacgugagcuccagcgugaucaccucccugggggccaucgucagcugcuacggcaagacgaagugcaccgccagcaacaagaaccgggggaucaucaagaccuucuccaacggcugcgacuacgugagcaacaagggcguggacaccguguccgucgggaacacccuguacugcgugaacaagcaggagggccagagccucuacgugaagggggagcccaucaucaacuucuacgacccgcuggucuuccccuccgacgaguucgacgcgagcaucucccaggugaacgagaagaucaaccagagccuggccuucauccgcaaguccgacgagcugcuccacaacgugaacgccggcaagagcacgaccaacaucaugaucaccaccaucaucaucgucaucaucgugauccugcugucccucaucgccguggggcugcugcucuacugcaaggcccggugaggacuaguaauaaggaaacuguaugaaugucugugggcaggaagugaagagauccuucuguaaagguuuuuggaauuaugucugcugaauaauaaacuuuuuugaaauaauaaaucugguagaaaaaugagaucuaaaaaaaaaaaaaaaaaaaaaaaaaaaaaaaaaaaaaaaaaaaaaaaaaaaaaaaaaaaaaaaaugcaucccccccccccccccccccccccccccccccaaaggcucuuuucagagccaccagaauu

SEQ ID NO: 3025 - RNA, 1931 nt, Artificial Sequence
  mRNA product Design g-4 comprising derived and/or modified sequence from HRSV(A2)__F-del_DSCav1_mut2 (opt1)
gggagacuccugucgggcggaaguaggaggaguagaguuuaaaaacaguacucuuuuuccgguucgggacguaguugaagcaacgacaagccggauaaccgcucuugagacaggaagcuuaccauggagcugcucauccugaaggccaacgccaucaccaccauccugacggcggugaccuucugcuucgccagcggccagaacaucaccgaggaguucuaccaguccacgugcagcgccgucuccaagggguaccucggcgcccugcgcaccgggugguacaccagcgugaucaccaucgagcuguccaacaucaaggagaacaagugcaacggcaccgacgccaaggugaagcucaucaagcaggagcuggacaaguacaagaacgcggucacggaccugcagcuccugaugcagagcacccccgccaccggguccggcagcgccaucugcuccggcguggccgugugcaagguccugcaccucgagggggaggugaacaagaucaagagcgcgcugcuguccaccaacaaggccguggucagccucuccaacggcgugagcgugcugacguucaagguccuggaccucaagaacuacaucgacaagcagcugcugccgauccucaacaagcaguccugcagcauccccaacaucgagaccgugaucgaguuccagcagaagaacaaccggcugcuggagaucacccgcgaguucuccgugaacgccggggucaccacgcccgugagcaccuacaugcucaccaacuccgagcugcugagccucaucaacgacaugcccaucaccaacgaccagaagaagcugaugagcaacaacgugcagaucguccggcagcaguccuacagcaucaugugcaucaucaaggaggaggugcuggccuacgugguccagcucccgcuguacggcgugaucgacacgcccugcuggaagcugcacaccagcccccucugcaccaccaacacgaaggagggguccaacaucugccugacccgcaccgaccggggcugguacugcgacaacgccggcuccgugagcuucuucccccaggcggagaccugcaagguccaguccaaccgcguguucugcgacacgaugaacagccugacccucccguccgaggucaaccugugcaacguggacaucuucaaccccaaguacgacugcaagaucaugaccagcaagaccgacguguccagcuccgucaucacgagccugggggccaucguguccugcuacggcaagaccaagugcaccgccagcaacaagaaccgggggaucaucaagaccuucuccaacggcugcgacuacgugagcaacaagggcgucgacacgguguccguggggaacacccucuacugcgucaacaagcaggagggccagagccuguacgugaagggggagcccaucaucaacuucuacgacccccugguguucccgagcgacgaguucgacgccuccaucagccaggucaacgagaagaucaaccagucccucgccuucauccgcaagagcgacgagcugcugcacaacgugaacgcgggcaaguccaccaccaacaucaugaucaccacgaucaucaucgugaucaucgucauccuccugagccugaucgccguggggcuccugcuguacugcaaggcccggugaggacuaguaauaaggaaacuguaugaaugucugugggcaggaagugaagagauccuucuguaaagguuuuuggaauuaugucugcugaauaauaaacuuuuuugaaauaauaaaucugguagaaaaaugagaucuaaaaaaaaaaaaaaaaaaaaaaaaaaaaaaaaaaaaaaaaaaaaaaaaaaaaaaaaaaaaaaaaugcaucccccccccccccccccccccccccccccccaaaggcucuuuucagagccaccagaauu

SEQ ID NO: 3026 - RNA, 1931 nt, Artificial Sequence
  mRNA product Design g-4 comprising derived and/or modified sequence from HRSV(A2)__F-del_DSCav1_mut2 (opt2)
gggagacuccugucgggcggaaguaggaggaguagaguuuaaaaacaguacucuuuuuccgguucgggacguaguugaagcaacgacaagccggauaaccgcucuugagacaggaagcuuaccauggagcuccucauccucaaggccaacgccaucaccaccauccucaccgccgucaccuucugcuucgccuccggccagaacaucaccgaggaguucuaccaguccaccugcuccgccgucuccaagggcuaccucggcgcccuccgcaccggcugguacaccuccgucaucaccaucgagcucuccaacaucaaggagaacaagugcaacggcaccgacgccaaggucaagcucaucaagcaggagcucgacaaguacaagaacgccgucaccgaccuccagcuccucaugcaguccacccccgccaccggcuccggcuccgccaucugcuccggcgucgccgucugcaagguccuccaccucgagggcgaggucaacaagaucaaguccgcccuccucuccaccaacaaggccgucgucucccucuccaacggcgucuccguccucaccuucaagguccucgaccucaagaacuacaucgacaagcagcuccuccccauccucaacaagcaguccugcuccauccccaacaucgagaccgucaucgaguuccagcagaagaacaaccgccuccucgagaucacccgcgaguucuccgucaacgccggcgucaccacccccgucuccaccuacaugcucaccaacuccgagcuccucucccucaucaacgacaugcccaucaccaacgaccagaagaagcucauguccaacaacguccagaucguccgccagcaguccuacuccaucaugugcaucaucaaggaggagguccucgccuacgucguccagcucccccucuacggcgucaucgacacccccugcuggaagcuccacaccuccccccucugcaccaccaacaccaaggagggcuccaacaucugccucacccgcaccgaccgcggcugguacugcgacaacgccggcuccgucuccuucuucccccaggccgagaccugcaagguccaguccaaccgcgucuucugcgacaccaugaacucccucacccuccccuccgaggucaaccucugcaacgucgacaucuucaaccccaaguacgacugcaagaucaugaccuccaagaccgacgucuccuccuccgucaucaccucccucggcgccaucgucuccugcuacggcaagaccaagugcaccgccuccaacaagaaccgcggcaucaucaagaccuucuccaacggcugcgacuacgucuccaacaagggcgucgacaccgucuccgucggcaacacccucuacugcgucaacaagcaggagggccagucccucuacgucaagggcgagcccaucaucaacuucuacgacccccucgucuuccccuccgacgaguucgacgccuccaucucccaggucaacgagaagaucaaccagucccucgccuucauccgcaaguccgacgagcuccuccacaacgucaacgccggcaaguccaccaccaacaucaugaucaccaccaucaucaucgucaucaucgucauccuccucucccucaucgccgucggccuccuccucuacugcaaggcccgcugaggacuaguaauaaggaaacuguaugaaugucugugggcaggaagugaagagauccuucuguaaagguuuuuggaauuaugucugcugaauaauaaacuuuuuugaaauaauaaaucugguagaaaaaugagaucuaaaaaaaaaaaaaaaaaaaaaaaaaaaaaaaaaaaaaaaaaaaaaaaaaaaaaaaaaaaaaaaaugcaucccccccccccccccccccccccccccccccaaaggcucuuuucagagccaccagaauu

SEQ ID NO: 3027 - RNA, 1931 nt, Artificial Sequence
  mRNA product Design g-4 comprising derived and/or modified sequence from HRSV(A2)__F-del_DSCav1_mut2 (opt3)
gggagacuccugucgggcggaaguaggaggaguagaguuuaaaaacaguacucuuuuuccgguucgggacguaguugaagcaacgacaagccggauaaccgcucuugagacaggaagcuuaccauggagcugcucauccuuaaggccaacgcuauuaccacaauacugacugcagugacguucugcuuugccagcggccagaauaucaccgaagaguucuaccaauccacauguucugcggucucaaaaggguauuugggagcuuuaagaacugguugguacaccaguguuauuacaaucgaacugagcaacauuaaggagaauaaaugcaacggcaccgacgccaaggugaaacuaaucaagcaggaacucgauaaguauaaaaaugcaguaacugaccugcagcuucugaugcaguccacacccgccaccgggucuggaucggcuauauguucaggcguggcagucugcaagguguugcaccucgagggugagguuaacaaaaucaagagcgcccugcugaguacgaauaaagcuguggucucccucucuaacggggugagcguauuaacuuuuaagguucuggaucuuaagaauuacauugacaaacaauugcugccuauccuaaacaagcaguccuguucaauuccaaauaucgaaaccgugauagaguuccagcagaaaaacaauaggcuccuggaaauuacacgggaguuuagugucaacgccggagugacuaccccggugagcacauauaugcuuaccaauucugagcuguugucccucaucaacgauaugcccauuacgaacgaccaaaagaaacugaugucaaauaacguccagaucguucgccagcagagcuacaguaucaugugcauuauaaaggaagagguguuagcguauguagugcaacugccucucuacggcgucaucgauacuccauguuggaaacuucauacaucuccccugugcaccacuaauacaaaggaaggcuccaacauuuguuugacccgaacggaccgugggugguacugcgauaaugcaggaagcgugucguucuuuccucaggccgagaccuguaagguucagucuaacagaguguucugcgacacaaugaacucccuaacucugccaucagaagucaaucucugcaauguggauaucuuuaaccccaaauaugacuguaagauaaugaccaguaaaacagauguaagcuccucuguuauuacuagccugggugcuaucgugucaugcuacggcaagaccaaauguacagccaguaauaagaacagggggaucauuaagaccuucuccaauggaugcgacuaugucagcaacaaaggcguggacacugucucuguggguaauacgcuuuacuguguuaacaagcaagaggggcagucacuguaugugaaaggagagccuaucauuaacuuuuacgauccauugguauucccgagugacgaauuugaugcaagcauaucccaggucaaugagaagaucaaccagucucucgcuuucauucggaaaucggacgaacuguuacacaaugugaacgccggcaagagcacaaccaauaucaugaucacuaccauuauaaucguuauuaucgugauucugcuaucccucaucgcggucggccugcuuuuguauugcaaggcccgcugaggacuaguaauaaggaaacuguaugaaugucugugggcaggaagugaagagauccuucuguaaagguuuuuggaauuaugucugcugaauaauaaacuuuuuugaaauaauaaaucugguagaaaaaugagaucuaaaaaaaaaaaaaaaaaaaaaaaaaaaaaaaaaaaaaaaaaaaaaaaaaaaaaaaaaaaaaaaaugcaucccccccccccccccccccccccccccccccaaaggcucuuuucagagccaccagaauu

SEQ ID NO: 3028 - RNA, 1931 nt, Artificial Sequence
  mRNA product Design g-4 comprising derived and/or modified sequence from HRSV(A2)__F-del_DSCav1_mut2 (opt4)
gggagacuccugucgggcggaaguaggaggaguagaguuuaaaaacaguacucuuuuuccgguucgggacguaguugaagcaacgacaagccggauaaccgcucuugagacaggaagcuuaccauggagcugcugauccugaaggccaacgccaucaccaccauccugaccgccgugaccuucugcuucgccagcggccagaacaucaccgaggaguucuaccagagcaccugcagcgccgugagcaagggcuaccugggcgcccugagaaccggcugguacaccagcgugaucaccaucgagcugagcaacaucaaggagaacaagugcaacggcaccgacgccaaggugaagcugaucaagcaggagcuggacaaguacaagaacgccgugaccgaccugcagcugcugaugcagagcacccccgccaccggcagcggcagcgccaucugcagcggcguggccgugugcaaggugcugcaccuggagggcgaggugaacaagaucaagagcgcccugcugagcaccaacaaggccguggugagccugagcaacggcgugagcgugcugaccuucaaggugcuggaccugaagaacuacaucgacaagcagcugcugcccauccugaacaagcagagcugcagcauccccaacaucgagaccgugaucgaguuccagcagaagaacaacagacugcuggagaucaccagagaguucagcgugaacgccggcgugaccacccccgugagcaccuacaugcugaccaacagcgagcugcugagccugaucaacgacaugcccaucaccaacgaccagaagaagcugaugagcaacaacgugcagaucgugagacagcagagcuacagcaucaugugcaucaucaaggaggaggugcuggccuacguggugcagcugccccuguacggcgugaucgacacccccugcuggaagcugcacaccagcccccugugcaccaccaacaccaaggagggcagcaacaucugccugaccagaaccgacagaggcugguacugcgacaacgccggcagcgugagcuucuucccccaggccgagaccugcaaggugcagagcaacagaguguucugcgacaccaugaacagccugacccugcccagcgaggugaaccugugcaacguggacaucuucaaccccaaguacgacugcaagaucaugaccagcaagaccgacgugagcagcagcgugaucaccagccugggcgccaucgugagcugcuacggcaagaccaagugcaccgccagcaacaagaacagaggcaucaucaagaccuucagcaacggcugcgacuacgugagcaacaagggcguggacaccgugagcgugggcaacacccuguacugcgugaacaagcaggagggccagagccuguacgugaagggcgagcccaucaucaacuucuacgacccccugguguuccccagcgacgaguucgacgccagcaucagccaggugaacgagaagaucaaccagagccuggccuucaucagaaagagcgacgagcugcugcacaacgugaacgccggcaagagcaccaccaacaucaugaucaccaccaucaucaucgugaucaucgugauccugcugagccugaucgccgugggccugcugcuguacugcaaggccagaugaggacuaguaauaaggaaacuguaugaaugucugugggcaggaagugaagagauccuucuguaaagguuuuuggaauuaugucugcugaauaauaaacuuuuuugaaauaauaaaucugguagaaaaaugagaucuaaaaaaaaaaaaaaaaaaaaaaaaaaaaaaaaaaaaaaaaaaaaaaaaaaaaaaaaaaaaaaaaugcaucccccccccccccccccccccccccccccccaaaggcucuuuucagagccaccagaauu

SEQ ID NO: 3029 - RNA, 1931 nt, Artificial Sequence
  mRNA product Design g-4 comprising derived and/or modified sequence from HRSV(A2)__F-del_DSCav1_mut2 (opt5)
gggagacuccugucgggcggaaguaggaggaguagaguuuaaaaacaguacucuuuuuccgguucgggacguaguugaagcaacgacaagccggauaaccgcucuugagacaggaagcuuaccauggagcugcucauccugaaggccaacgcuauuaccacaauccuuacggccgugaccuucugcuuugcgagcggccagaauauuacagaagaguucuaccaauccaccuguucugcugucagcaaaggguaucugggagcccucagaacaggcugguacaccuccguuaucacaauugaacugucuaacaucaaggagaauaaaugcaacgggaccgacgccaaggugaaacuuaucaagcaggaacuggauaaguauaaaaaugcugugacggaccuccagcugcugaugcagagcacccccgccacaggauccggcucugcuauuuguagcggggucgccgugugcaagguucuccaccuggagggagaggugaacaaaaucaaguccgcgcuucugagcaccaauaaagccgucgugucucucuccaacggcguuagcgugcugacauuuaagguccuugaucugaagaauuacauugacaaacaacuccugccuauccugaacaagcagucuuguuccauuccgaauaucgaaaccgugauugaguuccagcagaaaaacaaucggcuccuggaaaucacgcgcgaguuuagcgugaacgcuggcgucacaacccccguuucuacauauaugcuuaccaauuccgagcugcucagccugaucaacgauaugccuauuaccaacgaccaaaagaaacuuauguccaauaacgugcagaucgugagacagcagucuuacagcauuaugugcaucauuaaggaagagguccuggccuaugugguucaacucccccuguacggggugaucgauacaccuuguuggaaacugcauacgagcccccucugcaccacaaauaccaaggaaggauccaacaucugucugacacggaccgaccgcggcugguacugcgauaaugcugggucugucuccuucuuuccucaggccgagacguguaaggugcagagcaacagaguuuucugcgacacaaugaacucucuuacccugccgagcgaagugaaucucugcaaugucgauauuuuuaaccccaaauaugacuguaagaucaugaccuccaaaacagaugugucuagcuccgucauuaccagccugggagcgaucgugucuugcuacggcaagacaaaauguacggccuccaauaagaaccgggggauuaucaagaccuucagcaauggaugcgacuauguuucuaacaaaggcguggacacagucuccgugggcaauacccuuuacuguguuaacaagcaagaggggcagagccuguaugugaaaggagagccuaucauuaacuuuuacgauccccucgucuucccuuccgacgaauuugaugcuucuaucagccaggugaaugagaagauuaaccagucccuggccuucauccgcaaaucugacgaacugcuccacaaugugaacgcuggcaagagcacaaccaauauuaugaucacgaccauuaucaucguuauuaucgucauucugcuuucccugaucgccguggggcuccugcuguauugcaaggccagaugaggacuaguaauaaggaaacuguaugaaugucugugggcaggaagugaagagauccuucuguaaagguuuuuggaauuaugucugcugaauaauaaacuuuuuugaaauaauaaaucugguagaaaaaugagaucuaaaaaaaaaaaaaaaaaaaaaaaaaaaaaaaaaaaaaaaaaaaaaaaaaaaaaaaaaaaaaaaaugcaucccccccccccccccccccccccccccccccaaaggcucuuuucagagccaccagaauu

SEQ ID NO: 3030 - RNA, 1931 nt, Artificial Sequence
  mRNA product Design g-4 comprising derived and/or modified sequence from HRSV(A2)__F-del_DSCav1_mut2 (opt6)
gggagacuccugucgggcggaaguaggaggaguagaguuuaaaaacaguacucuuuuuccgguucgggacguaguugaagcaacgacaagccggauaaccgcucuugagacaggaagcuuaccauggaacuccuaauacuuaaagccaaugcaauaaccacaauacuaacagcaguaacauucugcuuugcaucaggacaaaacauaacagaagaauuuuaccaaucaacauguucagcaguaagcaaaggauaccuaggagccuuacgcacagguugguacacuuccguaauaacaauagaacucucaaauauaaaagaaaacaaaugcaacggaaccgaugcaaaaguaaaacuaauaaaacaagaauuagacaaauacaaaaacgcaguaacagaccuacaauuacuuaugcaaucaacacccgcaacaggauccggcucagcaaucuguucaggaguagcaguaugcaaaguucuccaccuagaaggcgaaguaaacaaaauaaaaucagcccuauuaucuaccaauaaagcaguaguaucacuaucaaauggaguaucuguccuaaccuucaaaguacuugaccuaaaaaauuacaucgacaaacaauuacuaccaauacuuaacaaacaaucauguucaauaccaaacauugaaacaguaauagaauuucaacaaaaaaauaacagauuauuagaaauaacccgcgaauuuucaguuaacgcaggaguaacaacaccaguauccacauacauguuaacaaauucagaacucuuaucacuuauaaacgacaugcccauaacaaacgaccaaaaaaaacucaugucuaacaauguucaaauaguucgacaacaaucauacuccauaaugugcauaauaaaagaagaaguucuagcauauguuguacaacucccacucuaugguguuauagacacaccaugcuggaaacuacauacaagccccuuaugcacuacaaacacaaaagaaggcucuaauauaugucuaacccgcacagacagaggcugguauugcgauaacgcagguucaguaucauucuuuccacaagcagaaacuugcaaaguccaauccaauagagucuucugcgacacuaugaacucacucacacucccaucugaagucaauuuauguaacgucgauaucuucaacccaaaauacgacugcaaaauaaugaccucaaaaacagacguaagcucaucagucauaacuucucuaggcgcaaucgucucauguuacggcaaaacaaaauguaccgcaucaaacaaaaaucgagguauaauaaaaaccuuuucuaacggcugcgacuacguaucaaacaaaggaguagauacuguaagugucggaaacacauuauacugcgucaacaaacaagaaggacaaucccuauauguuaaaggcgaaccuaucauuaauuucuacgacccacucgucuuuccauccgacgaauuugacgcaucaauuucccaaguaaaugaaaaaauaaaccaaucccuugcauucauaagaaaaucagaugaacuauuacacaacguaaacgcaggcaaaucaacaacaaauauaaugaucacaacaauaauaaucguaauaauaguaauccuacucucacuaauagcaguaggcuuacuauuauauugcaaagccagauaaggacuaguaauaaggaaacuguaugaaugucugugggcaggaagugaagagauccuucuguaaagguuuuuggaauuaugucugcugaauaauaaacuuuuuugaaauaauaaaucugguagaaaaaugagaucuaaaaaaaaaaaaaaaaaaaaaaaaaaaaaaaaaaaaaaaaaaaaaaaaaaaaaaaaaaaaaaaaugcaucccccccccccccccccccccccccccccccaaaggcucuuuucagagccaccagaauu

SEQ ID NO: 3031 - RNA, 1931 nt, Artificial Sequence
  mRNA product Design g-4 comprising derived and/or modified sequence from HRSV(A2)__F-del_DSCav1_mut2 (opt11)
gggagacuccugucgggcggaaguaggaggaguagaguuuaaaaacaguacucuuuuuccgguucgggacguaguugaagcaacgacaagccggauaaccgcucuugagacaggaagcuuaccauggaacuucuuauccuaaaagcgaacgccauaaccacaauccuaacagcagucaccuucuguuucgccucaggacaaaacaucaccgaggaauuuuaccaauccacauguagcgcugucucaaaaggcuaccucggcgcccuccgaaccggcugguacacauccguaauaacgaucgaacucuccaacauaaaagaaaauaaaugcaacggcaccgacgccaaagucaaacuuaucaaacaagaacuagacaaauacaaaaacgccgucaccgaccuccagcuccucaugcaauccaccccagcaacaggcuccggaagcgcaaucugcucaggcgucgccguaugcaaaguacuccaccucgaaggagaagucaacaaaaucaaauccgcccuccuauccacaaacaaagcaguugucucacucuccaacgggguaagcguacugaccuucaaaguccuagaccucaaaaacuacaucgauaaacaacuccuuccaauccucaacaaacaaucaugcucuauccccaacaucgaaaccguaaucgaauuucaacaaaaaaacaaccgccuacuugaaaucacacgcgaauuuagcgucaacgcaggaguaacaacacccguguccacauauaugcucacgaacagcgaacuacuaucccugauuaacgacaugcccaucaccaacgaccaaaaaaaacuaaugagcaacaacguacaaaucguccgccaacaaagcuacucuauaaugugcaucaucaaggaagaaguccuagccuacgucguccaauuaccacucuacggcgucaucgacacacccugcuggaaacuccauacauccccccucugcaccaccaacaccaaagaaggguccaacauaugccucacucgcacagaccgcggcugguacugcgacaacgcuggcagcgucagcuucuucccccaggccgaaaccugcaaaguccaauccaacagagucuucugcgacaccaugaacucgcucacccuccccuccgaggucaaccucugcaacgucgacauauucaaccccaaauacgacugcaaaaucaugaccuccaaaaccgacgucagcucaucagucaucacaucccucggggccaucgucuccugcuacggcaaaaccaagugcaccgccucaaacaaaaaccgcggcauuaucaaaacauucuccaacggcugcgacuacgucuccaacaaaggcgucgacacagucuccgucgguaacacccucuacugcguaaauaaacaagaaggccaaucccucuacgucaaaggcgaacccaucaucaacuucuacgacccucucgucuuccccuccgacgaauuugacgccucaaucagccaaguuaacgaaaaaaucaaccaaucacucgccuucauccgcaaauccgacgaacuccuccacaacguuaacgccggcaaaucuaccacgaacaucaugaucaccaccauaaucaucguaauuaucguaauacuccuaucccucauagcaguaggccuccuacucuacugcaaagcccguuaaggacuaguaauaaggaaacuguaugaaugucugugggcaggaagugaagagauccuucuguaaagguuuuuggaauuaugucugcugaauaauaaacuuuuuugaaauaauaaaucugguagaaaaaugagaucuaaaaaaaaaaaaaaaaaaaaaaaaaaaaaaaaaaaaaaaaaaaaaaaaaaaaaaaaaaaaaaaaugcaucccccccccccccccccccccccccccccccaaaggcucuuuucagagccaccagaauu

SEQ ID NO: 3032 - RNA, 1907 nt, Artificial Sequence
  mRNA product Design g-5 comprising derived and/or modified sequence from HRSV(A2)__F-del_DSCav1_mut2 (opt1)
gggagacccgugacccggaaguuguacggcuacgcgacuuucccucccacaaacccucgcgcccuuccuuuccuacuugggcccggcagaaagcuuaccauggagcugcucauccugaaggccaacgccaucaccaccauccugacggcggugaccuucugcuucgccagcggccagaacaucaccgaggaguucuaccaguccacgugcagcgccgucuccaagggguaccucggcgcccugcggaccggcugguacaccuccgugaucaccaucgagcugagcaacaucaaggagaacaagugcaacgggaccgacgccaaggugaagcucaucaagcaggagcuggacaaguacaagaacgcggucacggaccugcagcuccugaugcaguccaccccggcaaccggcuccggcuccgccaucugcagcggcgucgccgugugcaaggugcugcaccucgagggggaggucaacaagaucaagagcgcccugcuguccaccaacaaggccguggugagccucuccaacggcgucagcgugcugaccuucaaggugcuggaccucaagaacuacaucgacaagcagcugcugcccauccugaacaagcagagcugcuccauccccaacaucgagacggugaucgaguuccagcagaagaacaaccggcuccuggagaucacccgcgaguucagcgugaacgccggggucaccacccccguguccacguacaugcugaccaacagcgagcuccugucccugaucaacgacaugccgaucaccaacgaccagaagaagcucaugagcaacaacgugcagaucguccggcagcaguccuacagcaucaugugcaucaucaaggaggaggugcuggcguacgugguccagcugccccucuacggcgugaucgacacccccugcuggaagcugcacacgagcccccugugcaccaccaacaccaaggagggguccaacaucugccucacgcgcaccgaccggggcugguacugcgacaacgccggcagcgucuccuucuucccgcaggccgagaccugcaaggugcagagcaaccgcguguucugcgacaccaugaacucccugacgcugcccagcgagguaaaccucugcaacgucgacaucuucaaccccaaguacgacugcaagaucaugaccuccaagaccgacgugagcuccagcgugaucaccucccugggggccaucgucagcugcuacggcaagacgaagugcaccgccagcaacaagaaccgggggaucaucaagaccuucuccaacggcugcgacuacgugagcaacaagggcguggacaccguguccgucgggaacacccuguacugcgugaacaagcaggagggccagagccucuacgugaagggggagcccaucaucaacuucuacgacccgcuggucuuccccuccgacgaguucgacgcgagcaucucccaggugaacgagaagaucaaccagagccuggccuucauccgcaaguccgacgagcugcuccacaacgugaacgccggcaagagcacgaccaacaucaugaucaccaccaucaucaucgucaucaucgugauccugcugucccucaucgccguggggcugcugcucuacugcaaggcccggugaggacuaguaauaaggaaacuguaugaaugucugugggcaggaagugaagagauccuucuguaaagguuuuuggaauuaugucugcugaauaauaaacuuuuuugaaauaauaaaucugguagaaaaaugagaucuaaaaaaaaaaaaaaaaaaaaaaaaaaaaaaaaaaaaaaaaaaaaaaaaaaaaaaaaaaaaaaaaugcaucccccccccccccccccccccccccccccccaaaggcucuuuucagagccaccagaauu

SEQ ID NO: 3033 - RNA, 1907 nt, Artificial Sequence
  mRNA product Design g-5 comprising derived and/or modified sequence from HRSV(A2)__F-del_DSCav1_mut2 (opt1)
gggagacccgugacccggaaguuguacggcuacgcgacuuucccucccacaaacccucgcgcccuuccuuuccuacuugggcccggcagaaagcuuaccauggagcugcucauccugaaggccaacgccaucaccaccauccugacggcggugaccuucugcuucgccagcggccagaacaucaccgaggaguucuaccaguccacgugcagcgccgucuccaagggguaccucggcgcccugcgcaccgggugguacaccagcgugaucaccaucgagcuguccaacaucaaggagaacaagugcaacggcaccgacgccaaggugaagcucaucaagcaggagcuggacaaguacaagaacgcggucacggaccugcagcuccugaugcagagcacccccgccaccggguccggcagcgccaucugcuccggcguggccgugugcaagguccugcaccucgagggggaggugaacaagaucaagagcgcgcugcuguccaccaacaaggccguggucagccucuccaacggcgugagcgugcugacguucaagguccuggaccucaagaacuacaucgacaagcagcugcugccgauccucaacaagcaguccugcagcauccccaacaucgagaccgugaucgaguuccagcagaagaacaaccggcugcuggagaucacccgcgaguucuccgugaacgccggggucaccacgcccgugagcaccuacaugcucaccaacuccgagcugcugagccucaucaacgacaugcccaucaccaacgaccagaagaagcugaugagcaacaacgugcagaucguccggcagcaguccuacagcaucaugugcaucaucaaggaggaggugcuggccuacgugguccagcucccgcuguacggcgugaucgacacgcccugcuggaagcugcacaccagcccccucugcaccaccaacacgaaggagggguccaacaucugccugacccgcaccgaccggggcugguacugcgacaacgccggcuccgugagcuucuucccccaggcggagaccugcaagguccaguccaaccgcguguucugcgacacgaugaacagccugacccucccguccgaggucaaccugugcaacguggacaucuucaaccccaaguacgacugcaagaucaugaccagcaagaccgacguguccagcuccgucaucacgagccugggggccaucguguccugcuacggcaagaccaagugcaccgccagcaacaagaaccgggggaucaucaagaccuucuccaacggcugcgacuacgugagcaacaagggcgucgacacgguguccguggggaacacccucuacugcgucaacaagcaggagggccagagccuguacgugaagggggagcccaucaucaacuucuacgacccccugguguucccgagcgacgaguucgacgccuccaucagccaggucaacgagaagaucaaccagucccucgccuucauccgcaagagcgacgagcugcugcacaacgugaacgcgggcaaguccaccaccaacaucaugaucaccacgaucaucaucgugaucaucgucauccuccugagccugaucgccguggggcuccugcuguacugcaaggcccggugaggacuaguaauaaggaaacuguaugaaugucugugggcaggaagugaagagauccuucuguaaagguuuuuggaauuaugucugcugaauaauaaacuuuuuugaaauaauaaaucugguagaaaaaugagaucuaaaaaaaaaaaaaaaaaaaaaaaaaaaaaaaaaaaaaaaaaaaaaaaaaaaaaaaaaaaaaaaaugcaucccccccccccccccccccccccccccccccaaaggcucuuuucagagccaccagaauu

SEQ ID NO: 3034 - RNA, 1907 nt, Artificial Sequence
  mRNA product Design g-5 comprising derived and/or modified sequence from HRSV(A2)__F-del_DSCav1_mut2 (opt2)
gggagacccgugacccggaaguuguacggcuacgcgacuuucccucccacaaacccucgcgcccuuccuuuccuacuugggcccggcagaaagcuuaccauggagcuccucauccucaaggccaacgccaucaccaccauccucaccgccgucaccuucugcuucgccuccggccagaacaucaccgaggaguucuaccaguccaccugcuccgccgucuccaagggcuaccucggcgcccuccgcaccggcugguacaccuccgucaucaccaucgagcucuccaacaucaaggagaacaagugcaacggcaccgacgccaaggucaagcucaucaagcaggagcucgacaaguacaagaacgccgucaccgaccuccagcuccucaugcaguccacccccgccaccggcuccggcuccgccaucugcuccggcgucgccgucugcaagguccuccaccucgagggcgaggucaacaagaucaaguccgcccuccucuccaccaacaaggccgucgucucccucuccaacggcgucuccguccucaccuucaagguccucgaccucaagaacuacaucgacaagcagcuccuccccauccucaacaagcaguccugcuccauccccaacaucgagaccgucaucgaguuccagcagaagaacaaccgccuccucgagaucacccgcgaguucuccgucaacgccggcgucaccacccccgucuccaccuacaugcucaccaacuccgagcuccucucccucaucaacgacaugcccaucaccaacgaccagaagaagcucauguccaacaacguccagaucguccgccagcaguccuacuccaucaugugcaucaucaaggaggagguccucgccuacgucguccagcucccccucuacggcgucaucgacacccccugcuggaagcuccacaccuccccccucugcaccaccaacaccaaggagggcuccaacaucugccucacccgcaccgaccgcggcugguacugcgacaacgccggcuccgucuccuucuucccccaggccgagaccugcaagguccaguccaaccgcgucuucugcgacaccaugaacucccucacccuccccuccgaggucaaccucugcaacgucgacaucuucaaccccaaguacgacugcaagaucaugaccuccaagaccgacgucuccuccuccgucaucaccucccucggcgccaucgucuccugcuacggcaagaccaagugcaccgccuccaacaagaaccgcggcaucaucaagaccuucuccaacggcugcgacuacgucuccaacaagggcgucgacaccgucuccgucggcaacacccucuacugcgucaacaagcaggagggccagucccucuacgucaagggcgagcccaucaucaacuucuacgacccccucgucuuccccuccgacgaguucgacgccuccaucucccaggucaacgagaagaucaaccagucccucgccuucauccgcaaguccgacgagcuccuccacaacgucaacgccggcaaguccaccaccaacaucaugaucaccaccaucaucaucgucaucaucgucauccuccucucccucaucgccgucggccuccuccucuacugcaaggcccgcugaggacuaguaauaaggaaacuguaugaaugucugugggcaggaagugaagagauccuucuguaaagguuuuuggaauuaugucugcugaauaauaaacuuuuuugaaauaauaaaucugguagaaaaaugagaucuaaaaaaaaaaaaaaaaaaaaaaaaaaaaaaaaaaaaaaaaaaaaaaaaaaaaaaaaaaaaaaaaugcaucccccccccccccccccccccccccccccccaaaggcucuuuucagagccaccagaauu

SEQ ID NO: 3035 - RNA, 1907 nt, Artificial Sequence
  mRNA product Design g-5 comprising derived and/or modified sequence from HRSV(A2)__F-del_DSCav1_mut2 (opt3)
gggagacccgugacccggaaguuguacggcuacgcgacuuucccucccacaaacccucgcgcccuuccuuuccuacuugggcccggcagaaagcuuaccauggagcugcucauccuuaaggccaacgcuauuaccacaauacugacugcagugacguucugcuuugccagcggccagaauaucaccgaagaguucuaccaauccacauguucugcggucucaaaaggguauuugggagcuuuaagaacugguugguacaccaguguuauuacaaucgaacugagcaacauuaaggagaauaaaugcaacggcaccgacgccaaggugaaacuaaucaagcaggaacucgauaaguauaaaaaugcaguaacugaccugcagcuucugaugcaguccacacccgccaccgggucuggaucggcuauauguucaggcguggcagucugcaagguguugcaccucgagggugagguuaacaaaaucaagagcgcccugcugaguacgaauaaagcuguggucucccucucuaacggggugagcguauuaacuuuuaagguucuggaucuuaagaauuacauugacaaacaauugcugccuauccuaaacaagcaguccuguucaauuccaaauaucgaaaccgugauagaguuccagcagaaaaacaauaggcuccuggaaauuacacgggaguuuagugucaacgccggagugacuaccccggugagcacauauaugcuuaccaauucugagcuguugucccucaucaacgauaugcccauuacgaacgaccaaaagaaacugaugucaaauaacguccagaucguucgccagcagagcuacaguaucaugugcauuauaaaggaagagguguuagcguauguagugcaacugccucucuacggcgucaucgauacuccauguuggaaacuucauacaucuccccugugcaccacuaauacaaaggaaggcuccaacauuuguuugacccgaacggaccgugggugguacugcgauaaugcaggaagcgugucguucuuuccucaggccgagaccuguaagguucagucuaacagaguguucugcgacacaaugaacucccuaacucugccaucagaagucaaucucugcaauguggauaucuuuaaccccaaauaugacuguaagauaaugaccaguaaaacagauguaagcuccucuguuauuacuagccugggugcuaucgugucaugcuacggcaagaccaaauguacagccaguaauaagaacagggggaucauuaagaccuucuccaauggaugcgacuaugucagcaacaaaggcguggacacugucucuguggguaauacgcuuuacuguguuaacaagcaagaggggcagucacuguaugugaaaggagagccuaucauuaacuuuuacgauccauugguauucccgagugacgaauuugaugcaagcauaucccaggucaaugagaagaucaaccagucucucgcuuucauucggaaaucggacgaacuguuacacaaugugaacgccggcaagagcacaaccaauaucaugaucacuaccauuauaaucguuauuaucgugauucugcuaucccucaucgcggucggccugcuuuuguauugcaaggcccgcugaggacuaguaauaaggaaacuguaugaaugucugugggcaggaagugaagagauccuucuguaaagguuuuuggaauuaugucugcugaauaauaaacuuuuuugaaauaauaaaucugguagaaaaaugagaucuaaaaaaaaaaaaaaaaaaaaaaaaaaaaaaaaaaaaaaaaaaaaaaaaaaaaaaaaaaaaaaaaugcaucccccccccccccccccccccccccccccccaaaggcucuuuucagagccaccagaauu

SEQ ID NO: 3036 - RNA, 1907 nt, Artificial Sequence
  mRNA product Design g-5 comprising derived and/or modified sequence from HRSV(A2)__F-del_DSCav1_mut2 (opt4)
gggagacccgugacccggaaguuguacggcuacgcgacuuucccucccacaaacccucgcgcccuuccuuuccuacuugggcccggcagaaagcuuaccauggagcugcugauccugaaggccaacgccaucaccaccauccugaccgccgugaccuucugcuucgccagcggccagaacaucaccgaggaguucuaccagagcaccugcagcgccgugagcaagggcuaccugggcgcccugagaaccggcugguacaccagcgugaucaccaucgagcugagcaacaucaaggagaacaagugcaacggcaccgacgccaaggugaagcugaucaagcaggagcuggacaaguacaagaacgccgugaccgaccugcagcugcugaugcagagcacccccgccaccggcagcggcagcgccaucugcagcggcguggccgugugcaaggugcugcaccuggagggcgaggugaacaagaucaagagcgcccugcugagcaccaacaaggccguggugagccugagcaacggcgugagcgugcugaccuucaaggugcuggaccugaagaacuacaucgacaagcagcugcugcccauccugaacaagcagagcugcagcauccccaacaucgagaccgugaucgaguuccagcagaagaacaacagacugcuggagaucaccagagaguucagcgugaacgccggcgugaccacccccgugagcaccuacaugcugaccaacagcgagcugcugagccugaucaacgacaugcccaucaccaacgaccagaagaagcugaugagcaacaacgugcagaucgugagacagcagagcuacagcaucaugugcaucaucaaggaggaggugcuggccuacguggugcagcugccccuguacggcgugaucgacacccccugcuggaagcugcacaccagcccccugugcaccaccaacaccaaggagggcagcaacaucugccugaccagaaccgacagaggcugguacugcgacaacgccggcagcgugagcuucuucccccaggccgagaccugcaaggugcagagcaacagaguguucugcgacaccaugaacagccugacccugcccagcgaggugaaccugugcaacguggacaucuucaaccccaaguacgacugcaagaucaugaccagcaagaccgacgugagcagcagcgugaucaccagccugggcgccaucgugagcugcuacggcaagaccaagugcaccgccagcaacaagaacagaggcaucaucaagaccuucagcaacggcugcgacuacgugagcaacaagggcguggacaccgugagcgugggcaacacccuguacugcgugaacaagcaggagggccagagccuguacgugaagggcgagcccaucaucaacuucuacgacccccugguguuccccagcgacgaguucgacgccagcaucagccaggugaacgagaagaucaaccagagccuggccuucaucagaaagagcgacgagcugcugcacaacgugaacgccggcaagagcaccaccaacaucaugaucaccaccaucaucaucgugaucaucgugauccugcugagccugaucgccgugggccugcugcuguacugcaaggccagaugaggacuaguaauaaggaaacuguaugaaugucugugggcaggaagugaagagauccuucuguaaagguuuuuggaauuaugucugcugaauaauaaacuuuuuugaaauaauaaaucugguagaaaaaugagaucuaaaaaaaaaaaaaaaaaaaaaaaaaaaaaaaaaaaaaaaaaaaaaaaaaaaaaaaaaaaaaaaaugcaucccccccccccccccccccccccccccccccaaaggcucuuuucagagccaccagaauu

SEQ ID NO: 3037 - RNA, 1907 nt, Artificial Sequence
  mRNA product Design g-5 comprising derived and/or modified sequence from HRSV(A2)__F-del_DSCav1_mut2 (opt5)
gggagacccgugacccggaaguuguacggcuacgcgacuuucccucccacaaacccucgcgcccuuccuuuccuacuugggcccggcagaaagcuuaccauggagcugcucauccugaaggccaacgcuauuaccacaauccuuacggccgugaccuucugcuuugcgagcggccagaauauuacagaagaguucuaccaauccaccuguucugcugucagcaaaggguaucugggagcccucagaacaggcugguacaccuccguuaucacaauugaacugucuaacaucaaggagaauaaaugcaacgggaccgacgccaaggugaaacuuaucaagcaggaacuggauaaguauaaaaaugcugugacggaccuccagcugcugaugcagagcacccccgccacaggauccggcucugcuauuuguagcggggucgccgugugcaagguucuccaccuggagggagaggugaacaaaaucaaguccgcgcuucugagcaccaauaaagccgucgugucucucuccaacggcguuagcgugcugacauuuaagguccuugaucugaagaauuacauugacaaacaacuccugccuauccugaacaagcagucuuguuccauuccgaauaucgaaaccgugauugaguuccagcagaaaaacaaucggcuccuggaaaucacgcgcgaguuuagcgugaacgcuggcgucacaacccccguuucuacauauaugcuuaccaauuccgagcugcucagccugaucaacgauaugccuauuaccaacgaccaaaagaaacuuauguccaauaacgugcagaucgugagacagcagucuuacagcauuaugugcaucauuaaggaagagguccuggccuaugugguucaacucccccuguacggggugaucgauacaccuuguuggaaacugcauacgagcccccucugcaccacaaauaccaaggaaggauccaacaucugucugacacggaccgaccgcggcugguacugcgauaaugcugggucugucuccuucuuuccucaggccgagacguguaaggugcagagcaacagaguuuucugcgacacaaugaacucucuuacccugccgagcgaagugaaucucugcaaugucgauauuuuuaaccccaaauaugacuguaagaucaugaccuccaaaacagaugugucuagcuccgucauuaccagccugggagcgaucgugucuugcuacggcaagacaaaauguacggccuccaauaagaaccgggggauuaucaagaccuucagcaauggaugcgacuauguuucuaacaaaggcguggacacagucuccgugggcaauacccuuuacuguguuaacaagcaagaggggcagagccuguaugugaaaggagagccuaucauuaacuuuuacgauccccucgucuucccuuccgacgaauuugaugcuucuaucagccaggugaaugagaagauuaaccagucccuggccuucauccgcaaaucugacgaacugcuccacaaugugaacgcuggcaagagcacaaccaauauuaugaucacgaccauuaucaucguuauuaucgucauucugcuuucccugaucgccguggggcuccugcuguauugcaaggccagaugaggacuaguaauaaggaaacuguaugaaugucugugggcaggaagugaagagauccuucuguaaagguuuuuggaauuaugucugcugaauaauaaacuuuuuugaaauaauaaaucugguagaaaaaugagaucuaaaaaaaaaaaaaaaaaaaaaaaaaaaaaaaaaaaaaaaaaaaaaaaaaaaaaaaaaaaaaaaaugcaucccccccccccccccccccccccccccccccaaaggcucuuuucagagccaccagaauu

SEQ ID NO: 3038 - RNA, 1907 nt, Artificial Sequence
  mRNA product Design g-5 comprising derived and/or modified sequence from HRSV(A2)__F-del_DSCav1_mut2 (opt6)
gggagacccgugacccggaaguuguacggcuacgcgacuuucccucccacaaacccucgcgcccuuccuuuccuacuugggcccggcagaaagcuuaccauggaacuccuaauacuuaaagccaaugcaauaaccacaauacuaacagcaguaacauucugcuuugcaucaggacaaaacauaacagaagaauuuuaccaaucaacauguucagcaguaagcaaaggauaccuaggagccuuacgcacagguugguacacuuccguaauaacaauagaacucucaaauauaaaagaaaacaaaugcaacggaaccgaugcaaaaguaaaacuaauaaaacaagaauuagacaaauacaaaaacgcaguaacagaccuacaauuacuuaugcaaucaacacccgcaacaggauccggcucagcaaucuguucaggaguagcaguaugcaaaguucuccaccuagaaggcgaaguaaacaaaauaaaaucagcccuauuaucuaccaauaaagcaguaguaucacuaucaaauggaguaucuguccuaaccuucaaaguacuugaccuaaaaaauuacaucgacaaacaauuacuaccaauacuuaacaaacaaucauguucaauaccaaacauugaaacaguaauagaauuucaacaaaaaaauaacagauuauuagaaauaacccgcgaauuuucaguuaacgcaggaguaacaacaccaguauccacauacauguuaacaaauucagaacucuuaucacuuauaaacgacaugcccauaacaaacgaccaaaaaaaacucaugucuaacaauguucaaauaguucgacaacaaucauacuccauaaugugcauaauaaaagaagaaguucuagcauauguuguacaacucccacucuaugguguuauagacacaccaugcuggaaacuacauacaagccccuuaugcacuacaaacacaaaagaaggcucuaauauaugucuaacccgcacagacagaggcugguauugcgauaacgcagguucaguaucauucuuuccacaagcagaaacuugcaaaguccaauccaauagagucuucugcgacacuaugaacucacucacacucccaucugaagucaauuuauguaacgucgauaucuucaacccaaaauacgacugcaaaauaaugaccucaaaaacagacguaagcucaucagucauaacuucucuaggcgcaaucgucucauguuacggcaaaacaaaauguaccgcaucaaacaaaaaucgagguauaauaaaaaccuuuucuaacggcugcgacuacguaucaaacaaaggaguagauacuguaagugucggaaacacauuauacugcgucaacaaacaagaaggacaaucccuauauguuaaaggcgaaccuaucauuaauuucuacgacccacucgucuuuccauccgacgaauuugacgcaucaauuucccaaguaaaugaaaaaauaaaccaaucccuugcauucauaagaaaaucagaugaacuauuacacaacguaaacgcaggcaaaucaacaacaaauauaaugaucacaacaauaauaaucguaauaauaguaauccuacucucacuaauagcaguaggcuuacuauuauauugcaaagccagauaaggacuaguaauaaggaaacuguaugaaugucugugggcaggaagugaagagauccuucuguaaagguuuuuggaauuaugucugcugaauaauaaacuuuuuugaaauaauaaaucugguagaaaaaugagaucuaaaaaaaaaaaaaaaaaaaaaaaaaaaaaaaaaaaaaaaaaaaaaaaaaaaaaaaaaaaaaaaaugcaucccccccccccccccccccccccccccccccaaaggcucuuuucagagccaccagaauu

SEQ ID NO: 3039 - RNA, 1907 nt, Artificial Sequence
  mRNA product Design g-5 comprising derived and/or modified sequence from HRSV(A2)__F-del_DSCav1_mut2 (opt11)
gggagacccgugacccggaaguuguacggcuacgcgacuuucccucccacaaacccucgcgcccuuccuuuccuacuugggcccggcagaaagcuuaccauggaacuucuuauccuaaaagcgaacgccauaaccacaauccuaacagcagucaccuucuguuucgccucaggacaaaacaucaccgaggaauuuuaccaauccacauguagcgcugucucaaaaggcuaccucggcgcccuccgaaccggcugguacacauccguaauaacgaucgaacucuccaacauaaaagaaaauaaaugcaacggcaccgacgccaaagucaaacuuaucaaacaagaacuagacaaauacaaaaacgccgucaccgaccuccagcuccucaugcaauccaccccagcaacaggcuccggaagcgcaaucugcucaggcgucgccguaugcaaaguacuccaccucgaaggagaagucaacaaaaucaaauccgcccuccuauccacaaacaaagcaguugucucacucuccaacgggguaagcguacugaccuucaaaguccuagaccucaaaaacuacaucgauaaacaacuccuuccaauccucaacaaacaaucaugcucuauccccaacaucgaaaccguaaucgaauuucaacaaaaaaacaaccgccuacuugaaaucacacgcgaauuuagcgucaacgcaggaguaacaacacccguguccacauauaugcucacgaacagcgaacuacuaucccugauuaacgacaugcccaucaccaacgaccaaaaaaaacuaaugagcaacaacguacaaaucguccgccaacaaagcuacucuauaaugugcaucaucaaggaagaaguccuagccuacgucguccaauuaccacucuacggcgucaucgacacacccugcuggaaacuccauacauccccccucugcaccaccaacaccaaagaaggguccaacauaugccucacucgcacagaccgcggcugguacugcgacaacgcuggcagcgucagcuucuucccccaggccgaaaccugcaaaguccaauccaacagagucuucugcgacaccaugaacucgcucacccuccccuccgaggucaaccucugcaacgucgacauauucaaccccaaauacgacugcaaaaucaugaccuccaaaaccgacgucagcucaucagucaucacaucccucggggccaucgucuccugcuacggcaaaaccaagugcaccgccucaaacaaaaaccgcggcauuaucaaaacauucuccaacggcugcgacuacgucuccaacaaaggcgucgacacagucuccgucgguaacacccucuacugcguaaauaaacaagaaggccaaucccucuacgucaaaggcgaacccaucaucaacuucuacgacccucucgucuuccccuccgacgaauuugacgccucaaucagccaaguuaacgaaaaaaucaaccaaucacucgccuucauccgcaaauccgacgaacuccuccacaacguuaacgccggcaaaucuaccacgaacaucaugaucaccaccauaaucaucguaauuaucguaauacuccuaucccucauagcaguaggccuccuacucuacugcaaagcccguuaaggacuaguaauaaggaaacuguaugaaugucugugggcaggaagugaagagauccuucuguaaagguuuuuggaauuaugucugcugaauaauaaacuuuuuugaaauaauaaaucugguagaaaaaugagaucuaaaaaaaaaaaaaaaaaaaaaaaaaaaaaaaaaaaaaaaaaaaaaaaaaaaaaaaaaaaaaaaaugcaucccccccccccccccccccccccccccccccaaaggcucuuuucagagccaccagaauu

SEQ ID NO: 3040 - RNA, 1923 nt, Artificial Sequence
  mRNA product Design h-1 comprising derived and/or modified sequence from HRSV(A2)__F-del_DSCav1_mut2 (opt1)
gggagacccgugacccggaaguuguacggcuacgcgacuuucccucccacaaacccucgcgcccuuccuuuccuacuugggcccggcagaaagcuuaccauggagcugcucauccugaaggccaacgccaucaccaccauccugacggcggugaccuucugcuucgccagcggccagaacaucaccgaggaguucuaccaguccacgugcagcgccgucuccaagggguaccucggcgcccugcggaccggcugguacaccuccgugaucaccaucgagcugagcaacaucaaggagaacaagugcaacgggaccgacgccaaggugaagcucaucaagcaggagcuggacaaguacaagaacgcggucacggaccugcagcuccugaugcaguccaccccggcaaccggcuccggcuccgccaucugcagcggcgucgccgugugcaaggugcugcaccucgagggggaggucaacaagaucaagagcgcccugcuguccaccaacaaggccguggugagccucuccaacggcgucagcgugcugaccuucaaggugcuggaccucaagaacuacaucgacaagcagcugcugcccauccugaacaagcagagcugcuccauccccaacaucgagacggugaucgaguuccagcagaagaacaaccggcuccuggagaucacccgcgaguucagcgugaacgccggggucaccacccccguguccacguacaugcugaccaacagcgagcuccugucccugaucaacgacaugccgaucaccaacgaccagaagaagcucaugagcaacaacgugcagaucguccggcagcaguccuacagcaucaugugcaucaucaaggaggaggugcuggcguacgugguccagcugccccucuacggcgugaucgacacccccugcuggaagcugcacacgagcccccugugcaccaccaacaccaaggagggguccaacaucugccucacgcgcaccgaccggggcugguacugcgacaacgccggcagcgucuccuucuucccgcaggccgagaccugcaaggugcagagcaaccgcguguucugcgacaccaugaacucccugacgcugcccagcgagguaaaccucugcaacgucgacaucuucaaccccaaguacgacugcaagaucaugaccuccaagaccgacgugagcuccagcgugaucaccucccugggggccaucgucagcugcuacggcaagacgaagugcaccgccagcaacaagaaccgggggaucaucaagaccuucuccaacggcugcgacuacgugagcaacaagggcguggacaccguguccgucgggaacacccuguacugcgugaacaagcaggagggccagagccucuacgugaagggggagcccaucaucaacuucuacgacccgcuggucuuccccuccgacgaguucgacgcgagcaucucccaggugaacgagaagaucaaccagagccuggccuucauccgcaaguccgacgagcugcuccacaacgugaacgccggcaagagcacgaccaacaucaugaucaccaccaucaucaucgucaucaucgugauccugcugucccucaucgccguggggcugcugcucuacugcaaggcccggugaggacuaguacuggcugcaucucccuuuccucuguccuccauccuucucccaggauggugaagggggaccugguacccagugauccccaccccaggauccuaaaucaugacuuaccugcuaauaaaaacucauuggaaaagugagaagaucuaaaaaaaaaaaaaaaaaaaaaaaaaaaaaaaaaaaaaaaaaaaaaaaaaaaaaaaaaaaaaaaaugcaucccccccccccccccccccccccccccccccaaaggcucuuuucagagccaccagaauu

SEQ ID NO: 3041 - RNA, 1923 nt, Artificial Sequence
  mRNA product Design h-1 comprising derived and/or modified sequence from HRSV(A2)__F-del_DSCav1_mut2 (opt1)
gggagacccgugacccggaaguuguacggcuacgcgacuuucccucccacaaacccucgcgcccuuccuuuccuacuugggcccggcagaaagcuuaccauggagcugcucauccugaaggccaacgccaucaccaccauccugacggcggugaccuucugcuucgccagcggccagaacaucaccgaggaguucuaccaguccacgugcagcgccgucuccaagggguaccucggcgcccugcgcaccgggugguacaccagcgugaucaccaucgagcuguccaacaucaaggagaacaagugcaacggcaccgacgccaaggugaagcucaucaagcaggagcuggacaaguacaagaacgcggucacggaccugcagcuccugaugcagagcacccccgccaccggguccggcagcgccaucugcuccggcguggccgugugcaagguccugcaccucgagggggaggugaacaagaucaagagcgcgcugcuguccaccaacaaggccguggucagccucuccaacggcgugagcgugcugacguucaagguccuggaccucaagaacuacaucgacaagcagcugcugccgauccucaacaagcaguccugcagcauccccaacaucgagaccgugaucgaguuccagcagaagaacaaccggcugcuggagaucacccgcgaguucuccgugaacgccggggucaccacgcccgugagcaccuacaugcucaccaacuccgagcugcugagccucaucaacgacaugcccaucaccaacgaccagaagaagcugaugagcaacaacgugcagaucguccggcagcaguccuacagcaucaugugcaucaucaaggaggaggugcuggccuacgugguccagcucccgcuguacggcgugaucgacacgcccugcuggaagcugcacaccagcccccucugcaccaccaacacgaaggagggguccaacaucugccugacccgcaccgaccggggcugguacugcgacaacgccggcuccgugagcuucuucccccaggcggagaccugcaagguccaguccaaccgcguguucugcgacacgaugaacagccugacccucccguccgaggucaaccugugcaacguggacaucuucaaccccaaguacgacugcaagaucaugaccagcaagaccgacguguccagcuccgucaucacgagccugggggccaucguguccugcuacggcaagaccaagugcaccgccagcaacaagaaccgggggaucaucaagaccuucuccaacggcugcgacuacgugagcaacaagggcgucgacacgguguccguggggaacacccucuacugcgucaacaagcaggagggccagagccuguacgugaagggggagcccaucaucaacuucuacgacccccugguguucccgagcgacgaguucgacgccuccaucagccaggucaacgagaagaucaaccagucccucgccuucauccgcaagagcgacgagcugcugcacaacgugaacgcgggcaaguccaccaccaacaucaugaucaccacgaucaucaucgugaucaucgucauccuccugagccugaucgccguggggcuccugcuguacugcaaggcccggugaggacuaguacuggcugcaucucccuuuccucuguccuccauccuucucccaggauggugaagggggaccugguacccagugauccccaccccaggauccuaaaucaugacuuaccugcuaauaaaaacucauuggaaaagugagaagaucuaaaaaaaaaaaaaaaaaaaaaaaaaaaaaaaaaaaaaaaaaaaaaaaaaaaaaaaaaaaaaaaaugcaucccccccccccccccccccccccccccccccaaaggcucuuuucagagccaccagaauu

SEQ ID NO: 3042 - RNA, 1923 nt, Artificial Sequence
  mRNA product Design h-1 comprising derived and/or modified sequence from HRSV(A2)__F-del_DSCav1_mut2 (opt2)
gggagacccgugacccggaaguuguacggcuacgcgacuuucccucccacaaacccucgcgcccuuccuuuccuacuugggcccggcagaaagcuuaccauggagcuccucauccucaaggccaacgccaucaccaccauccucaccgccgucaccuucugcuucgccuccggccagaacaucaccgaggaguucuaccaguccaccugcuccgccgucuccaagggcuaccucggcgcccuccgcaccggcugguacaccuccgucaucaccaucgagcucuccaacaucaaggagaacaagugcaacggcaccgacgccaaggucaagcucaucaagcaggagcucgacaaguacaagaacgccgucaccgaccuccagcuccucaugcaguccacccccgccaccggcuccggcuccgccaucugcuccggcgucgccgucugcaagguccuccaccucgagggcgaggucaacaagaucaaguccgcccuccucuccaccaacaaggccgucgucucccucuccaacggcgucuccguccucaccuucaagguccucgaccucaagaacuacaucgacaagcagcuccuccccauccucaacaagcaguccugcuccauccccaacaucgagaccgucaucgaguuccagcagaagaacaaccgccuccucgagaucacccgcgaguucuccgucaacgccggcgucaccacccccgucuccaccuacaugcucaccaacuccgagcuccucucccucaucaacgacaugcccaucaccaacgaccagaagaagcucauguccaacaacguccagaucguccgccagcaguccuacuccaucaugugcaucaucaaggaggagguccucgccuacgucguccagcucccccucuacggcgucaucgacacccccugcuggaagcuccacaccuccccccucugcaccaccaacaccaaggagggcuccaacaucugccucacccgcaccgaccgcggcugguacugcgacaacgccggcuccgucuccuucuucccccaggccgagaccugcaagguccaguccaaccgcgucuucugcgacaccaugaacucccucacccuccccuccgaggucaaccucugcaacgucgacaucuucaaccccaaguacgacugcaagaucaugaccuccaagaccgacgucuccuccuccgucaucaccucccucggcgccaucgucuccugcuacggcaagaccaagugcaccgccuccaacaagaaccgcggcaucaucaagaccuucuccaacggcugcgacuacgucuccaacaagggcgucgacaccgucuccgucggcaacacccucuacugcgucaacaagcaggagggccagucccucuacgucaagggcgagcccaucaucaacuucuacgacccccucgucuuccccuccgacgaguucgacgccuccaucucccaggucaacgagaagaucaaccagucccucgccuucauccgcaaguccgacgagcuccuccacaacgucaacgccggcaaguccaccaccaacaucaugaucaccaccaucaucaucgucaucaucgucauccuccucucccucaucgccgucggccuccuccucuacugcaaggcccgcugaggacuaguacuggcugcaucucccuuuccucuguccuccauccuucucccaggauggugaagggggaccugguacccagugauccccaccccaggauccuaaaucaugacuuaccugcuaauaaaaacucauuggaaaagugagaagaucuaaaaaaaaaaaaaaaaaaaaaaaaaaaaaaaaaaaaaaaaaaaaaaaaaaaaaaaaaaaaaaaaugcaucccccccccccccccccccccccccccccccaaaggcucuuuucagagccaccagaauu

SEQ ID NO: 3043 - RNA, 1923 nt, Artificial Sequence
  mRNA product Design h-1 comprising derived and/or modified sequence from HRSV(A2)__F-del_DSCav1_mut2 (opt3)
gggagacccgugacccggaaguuguacggcuacgcgacuuucccucccacaaacccucgcgcccuuccuuuccuacuugggcccggcagaaagcuuaccauggagcugcucauccuuaaggccaacgcuauuaccacaauacugacugcagugacguucugcuuugccagcggccagaauaucaccgaagaguucuaccaauccacauguucugcggucucaaaaggguauuugggagcuuuaagaacugguugguacaccaguguuauuacaaucgaacugagcaacauuaaggagaauaaaugcaacggcaccgacgccaaggugaaacuaaucaagcaggaacucgauaaguauaaaaaugcaguaacugaccugcagcuucugaugcaguccacacccgccaccgggucuggaucggcuauauguucaggcguggcagucugcaagguguugcaccucgagggugagguuaacaaaaucaagagcgcccugcugaguacgaauaaagcuguggucucccucucuaacggggugagcguauuaacuuuuaagguucuggaucuuaagaauuacauugacaaacaauugcugccuauccuaaacaagcaguccuguucaauuccaaauaucgaaaccgugauagaguuccagcagaaaaacaauaggcuccuggaaauuacacgggaguuuagugucaacgccggagugacuaccccggugagcacauauaugcuuaccaauucugagcuguugucccucaucaacgauaugcccauuacgaacgaccaaaagaaacugaugucaaauaacguccagaucguucgccagcagagcuacaguaucaugugcauuauaaaggaagagguguuagcguauguagugcaacugccucucuacggcgucaucgauacuccauguuggaaacuucauacaucuccccugugcaccacuaauacaaaggaaggcuccaacauuuguuugacccgaacggaccgugggugguacugcgauaaugcaggaagcgugucguucuuuccucaggccgagaccuguaagguucagucuaacagaguguucugcgacacaaugaacucccuaacucugccaucagaagucaaucucugcaauguggauaucuuuaaccccaaauaugacuguaagauaaugaccaguaaaacagauguaagcuccucuguuauuacuagccugggugcuaucgugucaugcuacggcaagaccaaauguacagccaguaauaagaacagggggaucauuaagaccuucuccaauggaugcgacuaugucagcaacaaaggcguggacacugucucuguggguaauacgcuuuacuguguuaacaagcaagaggggcagucacuguaugugaaaggagagccuaucauuaacuuuuacgauccauugguauucccgagugacgaauuugaugcaagcauaucccaggucaaugagaagaucaaccagucucucgcuuucauucggaaaucggacgaacuguuacacaaugugaacgccggcaagagcacaaccaauaucaugaucacuaccauuauaaucguuauuaucgugauucugcuaucccucaucgcggucggccugcuuuuguauugcaaggcccgcugaggacuaguacuggcugcaucucccuuuccucuguccuccauccuucucccaggauggugaagggggaccugguacccagugauccccaccccaggauccuaaaucaugacuuaccugcuaauaaaaacucauuggaaaagugagaagaucuaaaaaaaaaaaaaaaaaaaaaaaaaaaaaaaaaaaaaaaaaaaaaaaaaaaaaaaaaaaaaaaaugcaucccccccccccccccccccccccccccccccaaaggcucuuuucagagccaccagaauu

SEQ ID NO: 3044 - RNA, 1923 nt, Artificial Sequence
  mRNA product Design h-1 comprising derived and/or modified sequence from HRSV(A2)__F-del_DSCav1_mut2 (opt4)
gggagacccgugacccggaaguuguacggcuacgcgacuuucccucccacaaacccucgcgcccuuccuuuccuacuugggcccggcagaaagcuuaccauggagcugcugauccugaaggccaacgccaucaccaccauccugaccgccgugaccuucugcuucgccagcggccagaacaucaccgaggaguucuaccagagcaccugcagcgccgugagcaagggcuaccugggcgcccugagaaccggcugguacaccagcgugaucaccaucgagcugagcaacaucaaggagaacaagugcaacggcaccgacgccaaggugaagcugaucaagcaggagcuggacaaguacaagaacgccgugaccgaccugcagcugcugaugcagagcacccccgccaccggcagcggcagcgccaucugcagcggcguggccgugugcaaggugcugcaccuggagggcgaggugaacaagaucaagagcgcccugcugagcaccaacaaggccguggugagccugagcaacggcgugagcgugcugaccuucaaggugcuggaccugaagaacuacaucgacaagcagcugcugcccauccugaacaagcagagcugcagcauccccaacaucgagaccgugaucgaguuccagcagaagaacaacagacugcuggagaucaccagagaguucagcgugaacgccggcgugaccacccccgugagcaccuacaugcugaccaacagcgagcugcugagccugaucaacgacaugcccaucaccaacgaccagaagaagcugaugagcaacaacgugcagaucgugagacagcagagcuacagcaucaugugcaucaucaaggaggaggugcuggccuacguggugcagcugccccuguacggcgugaucgacacccccugcuggaagcugcacaccagcccccugugcaccaccaacaccaaggagggcagcaacaucugccugaccagaaccgacagaggcugguacugcgacaacgccggcagcgugagcuucuucccccaggccgagaccugcaaggugcagagcaacagaguguucugcgacaccaugaacagccugacccugcccagcgaggugaaccugugcaacguggacaucuucaaccccaaguacgacugcaagaucaugaccagcaagaccgacgugagcagcagcgugaucaccagccugggcgccaucgugagcugcuacggcaagaccaagugcaccgccagcaacaagaacagaggcaucaucaagaccuucagcaacggcugcgacuacgugagcaacaagggcguggacaccgugagcgugggcaacacccuguacugcgugaacaagcaggagggccagagccuguacgugaagggcgagcccaucaucaacuucuacgacccccugguguuccccagcgacgaguucgacgccagcaucagccaggugaacgagaagaucaaccagagccuggccuucaucagaaagagcgacgagcugcugcacaacgugaacgccggcaagagcaccaccaacaucaugaucaccaccaucaucaucgugaucaucgugauccugcugagccugaucgccgugggccugcugcuguacugcaaggccagaugaggacuaguacuggcugcaucucccuuuccucuguccuccauccuucucccaggauggugaagggggaccugguacccagugauccccaccccaggauccuaaaucaugacuuaccugcuaauaaaaacucauuggaaaagugagaagaucuaaaaaaaaaaaaaaaaaaaaaaaaaaaaaaaaaaaaaaaaaaaaaaaaaaaaaaaaaaaaaaaaugcaucccccccccccccccccccccccccccccccaaaggcucuuuucagagccaccagaauu

SEQ ID NO: 3045 - RNA, 1923 nt, Artificial Sequence
  mRNA product Design h-1 comprising derived and/or modified sequence from HRSV(A2)__F-del_DSCav1_mut2 (opt5)
gggagacccgugacccggaaguuguacggcuacgcgacuuucccucccacaaacccucgcgcccuuccuuuccuacuugggcccggcagaaagcuuaccauggagcugcucauccugaaggccaacgcuauuaccacaauccuuacggccgugaccuucugcuuugcgagcggccagaauauuacagaagaguucuaccaauccaccuguucugcugucagcaaaggguaucugggagcccucagaacaggcugguacaccuccguuaucacaauugaacugucuaacaucaaggagaauaaaugcaacgggaccgacgccaaggugaaacuuaucaagcaggaacuggauaaguauaaaaaugcugugacggaccuccagcugcugaugcagagcacccccgccacaggauccggcucugcuauuuguagcggggucgccgugugcaagguucuccaccuggagggagaggugaacaaaaucaaguccgcgcuucugagcaccaauaaagccgucgugucucucuccaacggcguuagcgugcugacauuuaagguccuugaucugaagaauuacauugacaaacaacuccugccuauccugaacaagcagucuuguuccauuccgaauaucgaaaccgugauugaguuccagcagaaaaacaaucggcuccuggaaaucacgcgcgaguuuagcgugaacgcuggcgucacaacccccguuucuacauauaugcuuaccaauuccgagcugcucagccugaucaacgauaugccuauuaccaacgaccaaaagaaacuuauguccaauaacgugcagaucgugagacagcagucuuacagcauuaugugcaucauuaaggaagagguccuggccuaugugguucaacucccccuguacggggugaucgauacaccuuguuggaaacugcauacgagcccccucugcaccacaaauaccaaggaaggauccaacaucugucugacacggaccgaccgcggcugguacugcgauaaugcugggucugucuccuucuuuccucaggccgagacguguaaggugcagagcaacagaguuuucugcgacacaaugaacucucuuacccugccgagcgaagugaaucucugcaaugucgauauuuuuaaccccaaauaugacuguaagaucaugaccuccaaaacagaugugucuagcuccgucauuaccagccugggagcgaucgugucuugcuacggcaagacaaaauguacggccuccaauaagaaccgggggauuaucaagaccuucagcaauggaugcgacuauguuucuaacaaaggcguggacacagucuccgugggcaauacccuuuacuguguuaacaagcaagaggggcagagccuguaugugaaaggagagccuaucauuaacuuuuacgauccccucgucuucccuuccgacgaauuugaugcuucuaucagccaggugaaugagaagauuaaccagucccuggccuucauccgcaaaucugacgaacugcuccacaaugugaacgcuggcaagagcacaaccaauauuaugaucacgaccauuaucaucguuauuaucgucauucugcuuucccugaucgccguggggcuccugcuguauugcaaggccagaugaggacuaguacuggcugcaucucccuuuccucuguccuccauccuucucccaggauggugaagggggaccugguacccagugauccccaccccaggauccuaaaucaugacuuaccugcuaauaaaaacucauuggaaaagugagaagaucuaaaaaaaaaaaaaaaaaaaaaaaaaaaaaaaaaaaaaaaaaaaaaaaaaaaaaaaaaaaaaaaaugcaucccccccccccccccccccccccccccccccaaaggcucuuuucagagccaccagaauu

SEQ ID NO: 3046 - RNA, 1923 nt, Artificial Sequence
  mRNA product Design h-1 comprising derived and/or modified sequence from HRSV(A2)__F-del_DSCav1_mut2 (opt6)
gggagacccgugacccggaaguuguacggcuacgcgacuuucccucccacaaacccucgcgcccuuccuuuccuacuugggcccggcagaaagcuuaccauggaacuccuaauacuuaaagccaaugcaauaaccacaauacuaacagcaguaacauucugcuuugcaucaggacaaaacauaacagaagaauuuuaccaaucaacauguucagcaguaagcaaaggauaccuaggagccuuacgcacagguugguacacuuccguaauaacaauagaacucucaaauauaaaagaaaacaaaugcaacggaaccgaugcaaaaguaaaacuaauaaaacaagaauuagacaaauacaaaaacgcaguaacagaccuacaauuacuuaugcaaucaacacccgcaacaggauccggcucagcaaucuguucaggaguagcaguaugcaaaguucuccaccuagaaggcgaaguaaacaaaauaaaaucagcccuauuaucuaccaauaaagcaguaguaucacuaucaaauggaguaucuguccuaaccuucaaaguacuugaccuaaaaaauuacaucgacaaacaauuacuaccaauacuuaacaaacaaucauguucaauaccaaacauugaaacaguaauagaauuucaacaaaaaaauaacagauuauuagaaauaacccgcgaauuuucaguuaacgcaggaguaacaacaccaguauccacauacauguuaacaaauucagaacucuuaucacuuauaaacgacaugcccauaacaaacgaccaaaaaaaacucaugucuaacaauguucaaauaguucgacaacaaucauacuccauaaugugcauaauaaaagaagaaguucuagcauauguuguacaacucccacucuaugguguuauagacacaccaugcuggaaacuacauacaagccccuuaugcacuacaaacacaaaagaaggcucuaauauaugucuaacccgcacagacagaggcugguauugcgauaacgcagguucaguaucauucuuuccacaagcagaaacuugcaaaguccaauccaauagagucuucugcgacacuaugaacucacucacacucccaucugaagucaauuuauguaacgucgauaucuucaacccaaaauacgacugcaaaauaaugaccucaaaaacagacguaagcucaucagucauaacuucucuaggcgcaaucgucucauguuacggcaaaacaaaauguaccgcaucaaacaaaaaucgagguauaauaaaaaccuuuucuaacggcugcgacuacguaucaaacaaaggaguagauacuguaagugucggaaacacauuauacugcgucaacaaacaagaaggacaaucccuauauguuaaaggcgaaccuaucauuaauuucuacgacccacucgucuuuccauccgacgaauuugacgcaucaauuucccaaguaaaugaaaaaauaaaccaaucccuugcauucauaagaaaaucagaugaacuauuacacaacguaaacgcaggcaaaucaacaacaaauauaaugaucacaacaauaauaaucguaauaauaguaauccuacucucacuaauagcaguaggcuuacuauuauauugcaaagccagauaaggacuaguacuggcugcaucucccuuuccucuguccuccauccuucucccaggauggugaagggggaccugguacccagugauccccaccccaggauccuaaaucaugacuuaccugcuaauaaaaacucauuggaaaagugagaagaucuaaaaaaaaaaaaaaaaaaaaaaaaaaaaaaaaaaaaaaaaaaaaaaaaaaaaaaaaaaaaaaaaugcaucccccccccccccccccccccccccccccccaaaggcucuuuucagagccaccagaauu

SEQ ID NO: 3047 - RNA, 1923 nt, Artificial Sequence
  mRNA product Design h-1 comprising derived and/or modified sequence from HRSV(A2)__F-del_DSCav1_mut2 (opt11)
gggagacccgugacccggaaguuguacggcuacgcgacuuucccucccacaaacccucgcgcccuuccuuuccuacuugggcccggcagaaagcuuaccauggaacuucuuauccuaaaagcgaacgccauaaccacaauccuaacagcagucaccuucuguuucgccucaggacaaaacaucaccgaggaauuuuaccaauccacauguagcgcugucucaaaaggcuaccucggcgcccuccgaaccggcugguacacauccguaauaacgaucgaacucuccaacauaaaagaaaauaaaugcaacggcaccgacgccaaagucaaacuuaucaaacaagaacuagacaaauacaaaaacgccgucaccgaccuccagcuccucaugcaauccaccccagcaacaggcuccggaagcgcaaucugcucaggcgucgccguaugcaaaguacuccaccucgaaggagaagucaacaaaaucaaauccgcccuccuauccacaaacaaagcaguugucucacucuccaacgggguaagcguacugaccuucaaaguccuagaccucaaaaacuacaucgauaaacaacuccuuccaauccucaacaaacaaucaugcucuauccccaacaucgaaaccguaaucgaauuucaacaaaaaaacaaccgccuacuugaaaucacacgcgaauuuagcgucaacgcaggaguaacaacacccguguccacauauaugcucacgaacagcgaacuacuaucccugauuaacgacaugcccaucaccaacgaccaaaaaaaacuaaugagcaacaacguacaaaucguccgccaacaaagcuacucuauaaugugcaucaucaaggaagaaguccuagccuacgucguccaauuaccacucuacggcgucaucgacacacccugcuggaaacuccauacauccccccucugcaccaccaacaccaaagaaggguccaacauaugccucacucgcacagaccgcggcugguacugcgacaacgcuggcagcgucagcuucuucccccaggccgaaaccugcaaaguccaauccaacagagucuucugcgacaccaugaacucgcucacccuccccuccgaggucaaccucugcaacgucgacauauucaaccccaaauacgacugcaaaaucaugaccuccaaaaccgacgucagcucaucagucaucacaucccucggggccaucgucuccugcuacggcaaaaccaagugcaccgccucaaacaaaaaccgcggcauuaucaaaacauucuccaacggcugcgacuacgucuccaacaaaggcgucgacacagucuccgucgguaacacccucuacugcguaaauaaacaagaaggccaaucccucuacgucaaaggcgaacccaucaucaacuucuacgacccucucgucuuccccuccgacgaauuugacgccucaaucagccaaguuaacgaaaaaaucaaccaaucacucgccuucauccgcaaauccgacgaacuccuccacaacguuaacgccggcaaaucuaccacgaacaucaugaucaccaccauaaucaucguaauuaucguaauacuccuaucccucauagcaguaggccuccuacucuacugcaaagcccguuaaggacuaguacuggcugcaucucccuuuccucuguccuccauccuucucccaggauggugaagggggaccugguacccagugauccccaccccaggauccuaaaucaugacuuaccugcuaauaaaaacucauuggaaaagugagaagaucuaaaaaaaaaaaaaaaaaaaaaaaaaaaaaaaaaaaaaaaaaaaaaaaaaaaaaaaaaaaaaaaaugcaucccccccccccccccccccccccccccccccaaaggcucuuuucagagccaccagaauu

SEQ ID NO: 3048 - RNA, 2139 nt, Artificial Sequence
  mRNA product Design h-2 comprising derived and/or modified sequence from HRSV(A2)__F-del_DSCav1_mut2 (opt1)
gggagacccgugacccggaaguuguacggcuacgcgacuuucccucccacaaacccucgcgcccuuccuuuccuacuugggcccggcagaaagcuuaccauggagcugcucauccugaaggccaacgccaucaccaccauccugacggcggugaccuucugcuucgccagcggccagaacaucaccgaggaguucuaccaguccacgugcagcgccgucuccaagggguaccucggcgcccugcggaccggcugguacaccuccgugaucaccaucgagcugagcaacaucaaggagaacaagugcaacgggaccgacgccaaggugaagcucaucaagcaggagcuggacaaguacaagaacgcggucacggaccugcagcuccugaugcaguccaccccggcaaccggcuccggcuccgccaucugcagcggcgucgccgugugcaaggugcugcaccucgagggggaggucaacaagaucaagagcgcccugcuguccaccaacaaggccguggugagccucuccaacggcgucagcgugcugaccuucaaggugcuggaccucaagaacuacaucgacaagcagcugcugcccauccugaacaagcagagcugcuccauccccaacaucgagacggugaucgaguuccagcagaagaacaaccggcuccuggagaucacccgcgaguucagcgugaacgccggggucaccacccccguguccacguacaugcugaccaacagcgagcuccugucccugaucaacgacaugccgaucaccaacgaccagaagaagcucaugagcaacaacgugcagaucguccggcagcaguccuacagcaucaugugcaucaucaaggaggaggugcuggcguacgugguccagcugccccucuacggcgugaucgacacccccugcuggaagcugcacacgagcccccugugcaccaccaacaccaaggagggguccaacaucugccucacgcgcaccgaccggggcugguacugcgacaacgccggcagcgucuccuucuucccgcaggccgagaccugcaaggugcagagcaaccgcguguucugcgacaccaugaacucccugacgcugcccagcgagguaaaccucugcaacgucgacaucuucaaccccaaguacgacugcaagaucaugaccuccaagaccgacgugagcuccagcgugaucaccucccugggggccaucgucagcugcuacggcaagacgaagugcaccgccagcaacaagaaccgggggaucaucaagaccuucuccaacggcugcgacuacgugagcaacaagggcguggacaccguguccgucgggaacacccuguacugcgugaacaagcaggagggccagagccucuacgugaagggggagcccaucaucaacuucuacgacccgcuggucuuccccuccgacgaguucgacgcgagcaucucccaggugaacgagaagaucaaccagagccuggccuucauccgcaaguccgacgagcugcuccacaacgugaacgccggcaagagcacgaccaacaucaugaucaccaccaucaucaucgucaucaucgugauccugcugucccucaucgccguggggcugcugcucuacugcaaggcccggugaggacuagugaagggaacacccaaauuuaauucagccuuaagcacaauuaauuaagagugaaacguaauuguacaagcaguuggucacccaccauagggcaugaucaacaccgcaaccuuuccuuuuucccccagugauucugaaaaaccccucuucccuucagcuugcuuagauguuccaaauuuaguaagcuuaaggcggccuacagaagaaaaagaaaaaaaaggccacaaaaguucccucucacuuucaguaaauaaaauaaaagcagcaacagaaauaaagaaauaaaugaaauucaaaaugaaauaaauauuguguugugcagcauuaaaaaaucaauaaaaauuaaaaaugagcaagaucuaaaaaaaaaaaaaaaaaaaaaaaaaaaaaaaaaaaaaaaaaaaaaaaaaaaaaaaaaaaaaaaaugcaucccccccccccccccccccccccccccccccaaaggcucuuuucagagccaccagaauu

SEQ ID NO: 3049 - RNA, 2139 nt, Artificial Sequence
  mRNA product Design h-2 comprising derived and/or modified sequence from HRSV(A2)__F-del_DSCav1_mut2 (opt1)
gggagacccgugacccggaaguuguacggcuacgcgacuuucccucccacaaacccucgcgcccuuccuuuccuacuugggcccggcagaaagcuuaccauggagcugcucauccugaaggccaacgccaucaccaccauccugacggcggugaccuucugcuucgccagcggccagaacaucaccgaggaguucuaccaguccacgugcagcgccgucuccaagggguaccucggcgcccugcgcaccgggugguacaccagcgugaucaccaucgagcuguccaacaucaaggagaacaagugcaacggcaccgacgccaaggugaagcucaucaagcaggagcuggacaaguacaagaacgcggucacggaccugcagcuccugaugcagagcacccccgccaccggguccggcagcgccaucugcuccggcguggccgugugcaagguccugcaccucgagggggaggugaacaagaucaagagcgcgcugcuguccaccaacaaggccguggucagccucuccaacggcgugagcgugcugacguucaagguccuggaccucaagaacuacaucgacaagcagcugcugccgauccucaacaagcaguccugcagcauccccaacaucgagaccgugaucgaguuccagcagaagaacaaccggcugcuggagaucacccgcgaguucuccgugaacgccggggucaccacgcccgugagcaccuacaugcucaccaacuccgagcugcugagccucaucaacgacaugcccaucaccaacgaccagaagaagcugaugagcaacaacgugcagaucguccggcagcaguccuacagcaucaugugcaucaucaaggaggaggugcuggccuacgugguccagcucccgcuguacggcgugaucgacacgcccugcuggaagcugcacaccagcccccucugcaccaccaacacgaaggagggguccaacaucugccugacccgcaccgaccggggcugguacugcgacaacgccggcuccgugagcuucuucccccaggcggagaccugcaagguccaguccaaccgcguguucugcgacacgaugaacagccugacccucccguccgaggucaaccugugcaacguggacaucuucaaccccaaguacgacugcaagaucaugaccagcaagaccgacguguccagcuccgucaucacgagccugggggccaucguguccugcuacggcaagaccaagugcaccgccagcaacaagaaccgggggaucaucaagaccuucuccaacggcugcgacuacgugagcaacaagggcgucgacacgguguccguggggaacacccucuacugcgucaacaagcaggagggccagagccuguacgugaagggggagcccaucaucaacuucuacgacccccugguguucccgagcgacgaguucgacgccuccaucagccaggucaacgagaagaucaaccagucccucgccuucauccgcaagagcgacgagcugcugcacaacgugaacgcgggcaaguccaccaccaacaucaugaucaccacgaucaucaucgugaucaucgucauccuccugagccugaucgccguggggcuccugcuguacugcaaggcccggugaggacuagugaagggaacacccaaauuuaauucagccuuaagcacaauuaauuaagagugaaacguaauuguacaagcaguuggucacccaccauagggcaugaucaacaccgcaaccuuuccuuuuucccccagugauucugaaaaaccccucuucccuucagcuugcuuagauguuccaaauuuaguaagcuuaaggcggccuacagaagaaaaagaaaaaaaaggccacaaaaguucccucucacuuucaguaaauaaaauaaaagcagcaacagaaauaaagaaauaaaugaaauucaaaaugaaauaaauauuguguugugcagcauuaaaaaaucaauaaaaauuaaaaaugagcaagaucuaaaaaaaaaaaaaaaaaaaaaaaaaaaaaaaaaaaaaaaaaaaaaaaaaaaaaaaaaaaaaaaaugcaucccccccccccccccccccccccccccccccaaaggcucuuuucagagccaccagaauu

SEQ ID NO: 3050 - RNA, 2139 nt, Artificial Sequence
  mRNA product Design h-2 comprising derived and/or modified sequence from HRSV(A2)__F-del_DSCav1_mut2 (opt2)
gggagacccgugacccggaaguuguacggcuacgcgacuuucccucccacaaacccucgcgcccuuccuuuccuacuugggcccggcagaaagcuuaccauggagcuccucauccucaaggccaacgccaucaccaccauccucaccgccgucaccuucugcuucgccuccggccagaacaucaccgaggaguucuaccaguccaccugcuccgccgucuccaagggcuaccucggcgcccuccgcaccggcugguacaccuccgucaucaccaucgagcucuccaacaucaaggagaacaagugcaacggcaccgacgccaaggucaagcucaucaagcaggagcucgacaaguacaagaacgccgucaccgaccuccagcuccucaugcaguccacccccgccaccggcuccggcuccgccaucugcuccggcgucgccgucugcaagguccuccaccucgagggcgaggucaacaagaucaaguccgcccuccucuccaccaacaaggccgucgucucccucuccaacggcgucuccguccucaccuucaagguccucgaccucaagaacuacaucgacaagcagcuccuccccauccucaacaagcaguccugcuccauccccaacaucgagaccgucaucgaguuccagcagaagaacaaccgccuccucgagaucacccgcgaguucuccgucaacgccggcgucaccacccccgucuccaccuacaugcucaccaacuccgagcuccucucccucaucaacgacaugcccaucaccaacgaccagaagaagcucauguccaacaacguccagaucguccgccagcaguccuacuccaucaugugcaucaucaaggaggagguccucgccuacgucguccagcucccccucuacggcgucaucgacacccccugcuggaagcuccacaccuccccccucugcaccaccaacaccaaggagggcuccaacaucugccucacccgcaccgaccgcggcugguacugcgacaacgccggcuccgucuccuucuucccccaggccgagaccugcaagguccaguccaaccgcgucuucugcgacaccaugaacucccucacccuccccuccgaggucaaccucugcaacgucgacaucuucaaccccaaguacgacugcaagaucaugaccuccaagaccgacgucuccuccuccgucaucaccucccucggcgccaucgucuccugcuacggcaagaccaagugcaccgccuccaacaagaaccgcggcaucaucaagaccuucuccaacggcugcgacuacgucuccaacaagggcgucgacaccgucuccgucggcaacacccucuacugcgucaacaagcaggagggccagucccucuacgucaagggcgagcccaucaucaacuucuacgacccccucgucuuccccuccgacgaguucgacgccuccaucucccaggucaacgagaagaucaaccagucccucgccuucauccgcaaguccgacgagcuccuccacaacgucaacgccggcaaguccaccaccaacaucaugaucaccaccaucaucaucgucaucaucgucauccuccucucccucaucgccgucggccuccuccucuacugcaaggcccgcugaggacuagugaagggaacacccaaauuuaauucagccuuaagcacaauuaauuaagagugaaacguaauuguacaagcaguuggucacccaccauagggcaugaucaacaccgcaaccuuuccuuuuucccccagugauucugaaaaaccccucuucccuucagcuugcuuagauguuccaaauuuaguaagcuuaaggcggccuacagaagaaaaagaaaaaaaaggccacaaaaguucccucucacuuucaguaaauaaaauaaaagcagcaacagaaauaaagaaauaaaugaaauucaaaaugaaauaaauauuguguugugcagcauuaaaaaaucaauaaaaauuaaaaaugagcaagaucuaaaaaaaaaaaaaaaaaaaaaaaaaaaaaaaaaaaaaaaaaaaaaaaaaaaaaaaaaaaaaaaaugcaucccccccccccccccccccccccccccccccaaaggcucuuuucagagccaccagaauu

SEQ ID NO: 3051 - RNA, 2139 nt, Artificial Sequence
  mRNA product Design h-2 comprising derived and/or modified sequence from HRSV(A2)__F-del_DSCav1_mut2 (opt3)
gggagacccgugacccggaaguuguacggcuacgcgacuuucccucccacaaacccucgcgcccuuccuuuccuacuugggcccggcagaaagcuuaccauggagcugcucauccuuaaggccaacgcuauuaccacaauacugacugcagugacguucugcuuugccagcggccagaauaucaccgaagaguucuaccaauccacauguucugcggucucaaaaggguauuugggagcuuuaagaacugguugguacaccaguguuauuacaaucgaacugagcaacauuaaggagaauaaaugcaacggcaccgacgccaaggugaaacuaaucaagcaggaacucgauaaguauaaaaaugcaguaacugaccugcagcuucugaugcaguccacacccgccaccgggucuggaucggcuauauguucaggcguggcagucugcaagguguugcaccucgagggugagguuaacaaaaucaagagcgcccugcugaguacgaauaaagcuguggucucccucucuaacggggugagcguauuaacuuuuaagguucuggaucuuaagaauuacauugacaaacaauugcugccuauccuaaacaagcaguccuguucaauuccaaauaucgaaaccgugauagaguuccagcagaaaaacaauaggcuccuggaaauuacacgggaguuuagugucaacgccggagugacuaccccggugagcacauauaugcuuaccaauucugagcuguugucccucaucaacgauaugcccauuacgaacgaccaaaagaaacugaugucaaauaacguccagaucguucgccagcagagcuacaguaucaugugcauuauaaaggaagagguguuagcguauguagugcaacugccucucuacggcgucaucgauacuccauguuggaaacuucauacaucuccccugugcaccacuaauacaaaggaaggcuccaacauuuguuugacccgaacggaccgugggugguacugcgauaaugcaggaagcgugucguucuuuccucaggccgagaccuguaagguucagucuaacagaguguucugcgacacaaugaacucccuaacucugccaucagaagucaaucucugcaauguggauaucuuuaaccccaaauaugacuguaagauaaugaccaguaaaacagauguaagcuccucuguuauuacuagccugggugcuaucgugucaugcuacggcaagaccaaauguacagccaguaauaagaacagggggaucauuaagaccuucuccaauggaugcgacuaugucagcaacaaaggcguggacacugucucuguggguaauacgcuuuacuguguuaacaagcaagaggggcagucacuguaugugaaaggagagccuaucauuaacuuuuacgauccauugguauucccgagugacgaauuugaugcaagcauaucccaggucaaugagaagaucaaccagucucucgcuuucauucggaaaucggacgaacuguuacacaaugugaacgccggcaagagcacaaccaauaucaugaucacuaccauuauaaucguuauuaucgugauucugcuaucccucaucgcggucggccugcuuuuguauugcaaggcccgcugaggacuagugaagggaacacccaaauuuaauucagccuuaagcacaauuaauuaagagugaaacguaauuguacaagcaguuggucacccaccauagggcaugaucaacaccgcaaccuuuccuuuuucccccagugauucugaaaaaccccucuucccuucagcuugcuuagauguuccaaauuuaguaagcuuaaggcggccuacagaagaaaaagaaaaaaaaggccacaaaaguucccucucacuuucaguaaauaaaauaaaagcagcaacagaaauaaagaaauaaaugaaauucaaaaugaaauaaauauuguguugugcagcauuaaaaaaucaauaaaaauuaaaaaugagcaagaucuaaaaaaaaaaaaaaaaaaaaaaaaaaaaaaaaaaaaaaaaaaaaaaaaaaaaaaaaaaaaaaaaugcaucccccccccccccccccccccccccccccccaaaggcucuuuucagagccaccagaauu

SEQ ID NO: 3052 - RNA, 2139 nt, Artificial Sequence
  mRNA product Design h-2 comprising derived and/or modified sequence from HRSV(A2)__F-del_DSCav1_mut2 (opt4)
gggagacccgugacccggaaguuguacggcuacgcgacuuucccucccacaaacccucgcgcccuuccuuuccuacuugggcccggcagaaagcuuaccauggagcugcugauccugaaggccaacgccaucaccaccauccugaccgccgugaccuucugcuucgccagcggccagaacaucaccgaggaguucuaccagagcaccugcagcgccgugagcaagggcuaccugggcgcccugagaaccggcugguacaccagcgugaucaccaucgagcugagcaacaucaaggagaacaagugcaacggcaccgacgccaaggugaagcugaucaagcaggagcuggacaaguacaagaacgccgugaccgaccugcagcugcugaugcagagcacccccgccaccggcagcggcagcgccaucugcagcggcguggccgugugcaaggugcugcaccuggagggcgaggugaacaagaucaagagcgcccugcugagcaccaacaaggccguggugagccugagcaacggcgugagcgugcugaccuucaaggugcuggaccugaagaacuacaucgacaagcagcugcugcccauccugaacaagcagagcugcagcauccccaacaucgagaccgugaucgaguuccagcagaagaacaacagacugcuggagaucaccagagaguucagcgugaacgccggcgugaccacccccgugagcaccuacaugcugaccaacagcgagcugcugagccugaucaacgacaugcccaucaccaacgaccagaagaagcugaugagcaacaacgugcagaucgugagacagcagagcuacagcaucaugugcaucaucaaggaggaggugcuggccuacguggugcagcugccccuguacggcgugaucgacacccccugcuggaagcugcacaccagcccccugugcaccaccaacaccaaggagggcagcaacaucugccugaccagaaccgacagaggcugguacugcgacaacgccggcagcgugagcuucuucccccaggccgagaccugcaaggugcagagcaacagaguguucugcgacaccaugaacagccugacccugcccagcgaggugaaccugugcaacguggacaucuucaaccccaaguacgacugcaagaucaugaccagcaagaccgacgugagcagcagcgugaucaccagccugggcgccaucgugagcugcuacggcaagaccaagugcaccgccagcaacaagaacagaggcaucaucaagaccuucagcaacggcugcgacuacgugagcaacaagggcguggacaccgugagcgugggcaacacccuguacugcgugaacaagcaggagggccagagccuguacgugaagggcgagcccaucaucaacuucuacgacccccugguguuccccagcgacgaguucgacgccagcaucagccaggugaacgagaagaucaaccagagccuggccuucaucagaaagagcgacgagcugcugcacaacgugaacgccggcaagagcaccaccaacaucaugaucaccaccaucaucaucgugaucaucgugauccugcugagccugaucgccgugggccugcugcuguacugcaaggccagaugaggacuagugaagggaacacccaaauuuaauucagccuuaagcacaauuaauuaagagugaaacguaauuguacaagcaguuggucacccaccauagggcaugaucaacaccgcaaccuuuccuuuuucccccagugauucugaaaaaccccucuucccuucagcuugcuuagauguuccaaauuuaguaagcuuaaggcggccuacagaagaaaaagaaaaaaaaggccacaaaaguucccucucacuuucaguaaauaaaauaaaagcagcaacagaaauaaagaaauaaaugaaauucaaaaugaaauaaauauuguguugugcagcauuaaaaaaucaauaaaaauuaaaaaugagcaagaucuaaaaaaaaaaaaaaaaaaaaaaaaaaaaaaaaaaaaaaaaaaaaaaaaaaaaaaaaaaaaaaaaugcaucccccccccccccccccccccccccccccccaaaggcucuuuucagagccaccagaauu

SEQ ID NO: 3053 - RNA, 2139 nt, Artificial Sequence
  mRNA product Design h-2 comprising derived and/or modified sequence from HRSV(A2)__F-del_DSCav1_mut2 (opt5)
gggagacccgugacccggaaguuguacggcuacgcgacuuucccucccacaaacccucgcgcccuuccuuuccuacuugggcccggcagaaagcuuaccauggagcugcucauccugaaggccaacgcuauuaccacaauccuuacggccgugaccuucugcuuugcgagcggccagaauauuacagaagaguucuaccaauccaccuguucugcugucagcaaaggguaucugggagcccucagaacaggcugguacaccuccguuaucacaauugaacugucuaacaucaaggagaauaaaugcaacgggaccgacgccaaggugaaacuuaucaagcaggaacuggauaaguauaaaaaugcugugacggaccuccagcugcugaugcagagcacccccgccacaggauccggcucugcuauuuguagcggggucgccgugugcaagguucuccaccuggagggagaggugaacaaaaucaaguccgcgcuucugagcaccaauaaagccgucgugucucucuccaacggcguuagcgugcugacauuuaagguccuugaucugaagaauuacauugacaaacaacuccugccuauccugaacaagcagucuuguuccauuccgaauaucgaaaccgugauugaguuccagcagaaaaacaaucggcuccuggaaaucacgcgcgaguuuagcgugaacgcuggcgucacaacccccguuucuacauauaugcuuaccaauuccgagcugcucagccugaucaacgauaugccuauuaccaacgaccaaaagaaacuuauguccaauaacgugcagaucgugagacagcagucuuacagcauuaugugcaucauuaaggaagagguccuggccuaugugguucaacucccccuguacggggugaucgauacaccuuguuggaaacugcauacgagcccccucugcaccacaaauaccaaggaaggauccaacaucugucugacacggaccgaccgcggcugguacugcgauaaugcugggucugucuccuucuuuccucaggccgagacguguaaggugcagagcaacagaguuuucugcgacacaaugaacucucuuacccugccgagcgaagugaaucucugcaaugucgauauuuuuaaccccaaauaugacuguaagaucaugaccuccaaaacagaugugucuagcuccgucauuaccagccugggagcgaucgugucuugcuacggcaagacaaaauguacggccuccaauaagaaccgggggauuaucaagaccuucagcaauggaugcgacuauguuucuaacaaaggcguggacacagucuccgugggcaauacccuuuacuguguuaacaagcaagaggggcagagccuguaugugaaaggagagccuaucauuaacuuuuacgauccccucgucuucccuuccgacgaauuugaugcuucuaucagccaggugaaugagaagauuaaccagucccuggccuucauccgcaaaucugacgaacugcuccacaaugugaacgcuggcaagagcacaaccaauauuaugaucacgaccauuaucaucguuauuaucgucauucugcuuucccugaucgccguggggcuccugcuguauugcaaggccagaugaggacuagugaagggaacacccaaauuuaauucagccuuaagcacaauuaauuaagagugaaacguaauuguacaagcaguuggucacccaccauagggcaugaucaacaccgcaaccuuuccuuuuucccccagugauucugaaaaaccccucuucccuucagcuugcuuagauguuccaaauuuaguaagcuuaaggcggccuacagaagaaaaagaaaaaaaaggccacaaaaguucccucucacuuucaguaaauaaaauaaaagcagcaacagaaauaaagaaauaaaugaaauucaaaaugaaauaaauauuguguugugcagcauuaaaaaaucaauaaaaauuaaaaaugagcaagaucuaaaaaaaaaaaaaaaaaaaaaaaaaaaaaaaaaaaaaaaaaaaaaaaaaaaaaaaaaaaaaaaaugcaucccccccccccccccccccccccccccccccaaaggcucuuuucagagccaccagaauu

SEQ ID NO: 3054 - RNA, 2139 nt, Artificial Sequence
  mRNA product Design h-2 comprising derived and/or modified sequence from HRSV(A2)__F-del_DSCav1_mut2 (opt6)
gggagacccgugacccggaaguuguacggcuacgcgacuuucccucccacaaacccucgcgcccuuccuuuccuacuugggcccggcagaaagcuuaccauggaacuccuaauacuuaaagccaaugcaauaaccacaauacuaacagcaguaacauucugcuuugcaucaggacaaaacauaacagaagaauuuuaccaaucaacauguucagcaguaagcaaaggauaccuaggagccuuacgcacagguugguacacuuccguaauaacaauagaacucucaaauauaaaagaaaacaaaugcaacggaaccgaugcaaaaguaaaacuaauaaaacaagaauuagacaaauacaaaaacgcaguaacagaccuacaauuacuuaugcaaucaacacccgcaacaggauccggcucagcaaucuguucaggaguagcaguaugcaaaguucuccaccuagaaggcgaaguaaacaaaauaaaaucagcccuauuaucuaccaauaaagcaguaguaucacuaucaaauggaguaucuguccuaaccuucaaaguacuugaccuaaaaaauuacaucgacaaacaauuacuaccaauacuuaacaaacaaucauguucaauaccaaacauugaaacaguaauagaauuucaacaaaaaaauaacagauuauuagaaauaacccgcgaauuuucaguuaacgcaggaguaacaacaccaguauccacauacauguuaacaaauucagaacucuuaucacuuauaaacgacaugcccauaacaaacgaccaaaaaaaacucaugucuaacaauguucaaauaguucgacaacaaucauacuccauaaugugcauaauaaaagaagaaguucuagcauauguuguacaacucccacucuaugguguuauagacacaccaugcuggaaacuacauacaagccccuuaugcacuacaaacacaaaagaaggcucuaauauaugucuaacccgcacagacagaggcugguauugcgauaacgcagguucaguaucauucuuuccacaagcagaaacuugcaaaguccaauccaauagagucuucugcgacacuaugaacucacucacacucccaucugaagucaauuuauguaacgucgauaucuucaacccaaaauacgacugcaaaauaaugaccucaaaaacagacguaagcucaucagucauaacuucucuaggcgcaaucgucucauguuacggcaaaacaaaauguaccgcaucaaacaaaaaucgagguauaauaaaaaccuuuucuaacggcugcgacuacguaucaaacaaaggaguagauacuguaagugucggaaacacauuauacugcgucaacaaacaagaaggacaaucccuauauguuaaaggcgaaccuaucauuaauuucuacgacccacucgucuuuccauccgacgaauuugacgcaucaauuucccaaguaaaugaaaaaauaaaccaaucccuugcauucauaagaaaaucagaugaacuauuacacaacguaaacgcaggcaaaucaacaacaaauauaaugaucacaacaauaauaaucguaauaauaguaauccuacucucacuaauagcaguaggcuuacuauuauauugcaaagccagauaaggacuagugaagggaacacccaaauuuaauucagccuuaagcacaauuaauuaagagugaaacguaauuguacaagcaguuggucacccaccauagggcaugaucaacaccgcaaccuuuccuuuuucccccagugauucugaaaaaccccucuucccuucagcuugcuuagauguuccaaauuuaguaagcuuaaggcggccuacagaagaaaaagaaaaaaaaggccacaaaaguucccucucacuuucaguaaauaaaauaaaagcagcaacagaaauaaagaaauaaaugaaauucaaaaugaaauaaauauuguguugugcagcauuaaaaaaucaauaaaaauuaaaaaugagcaagaucuaaaaaaaaaaaaaaaaaaaaaaaaaaaaaaaaaaaaaaaaaaaaaaaaaaaaaaaaaaaaaaaaugcaucccccccccccccccccccccccccccccccaaaggcucuuuucagagccaccagaauu

SEQ ID NO: 3055 - RNA, 2139 nt, Artificial Sequence
  mRNA product Design h-2 comprising derived and/or modified sequence from HRSV(A2)__F-del_DSCav1_mut2 (opt11)
gggagacccgugacccggaaguuguacggcuacgcgacuuucccucccacaaacccucgcgcccuuccuuuccuacuugggcccggcagaaagcuuaccauggaacuucuuauccuaaaagcgaacgccauaaccacaauccuaacagcagucaccuucuguuucgccucaggacaaaacaucaccgaggaauuuuaccaauccacauguagcgcugucucaaaaggcuaccucggcgcccuccgaaccggcugguacacauccguaauaacgaucgaacucuccaacauaaaagaaaauaaaugcaacggcaccgacgccaaagucaaacuuaucaaacaagaacuagacaaauacaaaaacgccgucaccgaccuccagcuccucaugcaauccaccccagcaacaggcuccggaagcgcaaucugcucaggcgucgccguaugcaaaguacuccaccucgaaggagaagucaacaaaaucaaauccgcccuccuauccacaaacaaagcaguugucucacucuccaacgggguaagcguacugaccuucaaaguccuagaccucaaaaacuacaucgauaaacaacuccuuccaauccucaacaaacaaucaugcucuauccccaacaucgaaaccguaaucgaauuucaacaaaaaaacaaccgccuacuugaaaucacacgcgaauuuagcgucaacgcaggaguaacaacacccguguccacauauaugcucacgaacagcgaacuacuaucccugauuaacgacaugcccaucaccaacgaccaaaaaaaacuaaugagcaacaacguacaaaucguccgccaacaaagcuacucuauaaugugcaucaucaaggaagaaguccuagccuacgucguccaauuaccacucuacggcgucaucgacacacccugcuggaaacuccauacauccccccucugcaccaccaacaccaaagaaggguccaacauaugccucacucgcacagaccgcggcugguacugcgacaacgcuggcagcgucagcuucuucccccaggccgaaaccugcaaaguccaauccaacagagucuucugcgacaccaugaacucgcucacccuccccuccgaggucaaccucugcaacgucgacauauucaaccccaaauacgacugcaaaaucaugaccuccaaaaccgacgucagcucaucagucaucacaucccucggggccaucgucuccugcuacggcaaaaccaagugcaccgccucaaacaaaaaccgcggcauuaucaaaacauucuccaacggcugcgacuacgucuccaacaaaggcgucgacacagucuccgucgguaacacccucuacugcguaaauaaacaagaaggccaaucccucuacgucaaaggcgaacccaucaucaacuucuacgacccucucgucuuccccuccgacgaauuugacgccucaaucagccaaguuaacgaaaaaaucaaccaaucacucgccuucauccgcaaauccgacgaacuccuccacaacguuaacgccggcaaaucuaccacgaacaucaugaucaccaccauaaucaucguaauuaucguaauacuccuaucccucauagcaguaggccuccuacucuacugcaaagcccguuaaggacuagugaagggaacacccaaauuuaauucagccuuaagcacaauuaauuaagagugaaacguaauuguacaagcaguuggucacccaccauagggcaugaucaacaccgcaaccuuuccuuuuucccccagugauucugaaaaaccccucuucccuucagcuugcuuagauguuccaaauuuaguaagcuuaaggcggccuacagaagaaaaagaaaaaaaaggccacaaaaguucccucucacuuucaguaaauaaaauaaaagcagcaacagaaauaaagaaauaaaugaaauucaaaaugaaauaaauauuguguugugcagcauuaaaaaaucaauaaaaauuaaaaaugagcaagaucuaaaaaaaaaaaaaaaaaaaaaaaaaaaaaaaaaaaaaaaaaaaaaaaaaaaaaaaaaaaaaaaaugcaucccccccccccccccccccccccccccccccaaaggcucuuuucagagccaccagaauu

SEQ ID NO: 3056 - RNA, 1919 nt, Artificial Sequence
  mRNA product Design h-3 comprising derived and/or modified sequence from HRSV(A2)__F-del_DSCav1_mut2 (opt1)
gggagacccgugacccggaaguuguacggcuacgcgacuuucccucccacaaacccucgcgcccuuccuuuccuacuugggcccggcagaaagcuuaccauggagcugcucauccugaaggccaacgccaucaccaccauccugacggcggugaccuucugcuucgccagcggccagaacaucaccgaggaguucuaccaguccacgugcagcgccgucuccaagggguaccucggcgcccugcggaccggcugguacaccuccgugaucaccaucgagcugagcaacaucaaggagaacaagugcaacgggaccgacgccaaggugaagcucaucaagcaggagcuggacaaguacaagaacgcggucacggaccugcagcuccugaugcaguccaccccggcaaccggcuccggcuccgccaucugcagcggcgucgccgugugcaaggugcugcaccucgagggggaggucaacaagaucaagagcgcccugcuguccaccaacaaggccguggugagccucuccaacggcgucagcgugcugaccuucaaggugcuggaccucaagaacuacaucgacaagcagcugcugcccauccugaacaagcagagcugcuccauccccaacaucgagacggugaucgaguuccagcagaagaacaaccggcuccuggagaucacccgcgaguucagcgugaacgccggggucaccacccccguguccacguacaugcugaccaacagcgagcuccugucccugaucaacgacaugccgaucaccaacgaccagaagaagcucaugagcaacaacgugcagaucguccggcagcaguccuacagcaucaugugcaucaucaaggaggaggugcuggcguacgugguccagcugccccucuacggcgugaucgacacccccugcuggaagcugcacacgagcccccugugcaccaccaacaccaaggagggguccaacaucugccucacgcgcaccgaccggggcugguacugcgacaacgccggcagcgucuccuucuucccgcaggccgagaccugcaaggugcagagcaaccgcguguucugcgacaccaugaacucccugacgcugcccagcgagguaaaccucugcaacgucgacaucuucaaccccaaguacgacugcaagaucaugaccuccaagaccgacgugagcuccagcgugaucaccucccugggggccaucgucagcugcuacggcaagacgaagugcaccgccagcaacaagaaccgggggaucaucaagaccuucuccaacggcugcgacuacgugagcaacaagggcguggacaccguguccgucgggaacacccuguacugcgugaacaagcaggagggccagagccucuacgugaagggggagcccaucaucaacuucuacgacccgcuggucuuccccuccgacgaguucgacgcgagcaucucccaggugaacgagaagaucaaccagagccuggccuucauccgcaaguccgacgagcugcuccacaacgugaacgccggcaagagcacgaccaacaucaugaucaccaccaucaucaucgucaucaucgugauccugcugucccucaucgccguggggcugcugcucuacugcaaggcccggugaggacuaguggaagcauuuuccuggcugauuaaaagaaauuacucagcuauggucaucuguuccuguuagaaggcuaugcagcauauuauauacuaugcgcauguuaugaaaugcauaauaaaaaauuuuaaaaaaucuaaaagaucuaaaaaaaaaaaaaaaaaaaaaaaaaaaaaaaaaaaaaaaaaaaaaaaaaaaaaaaaaaaaaaaaugcaucccccccccccccccccccccccccccccccaaaggcucuuuucagagccaccagaauu

SEQ ID NO: 3057 - RNA, 1919 nt, Artificial Sequence
  mRNA product Design h-3 comprising derived and/or modified sequence from HRSV(A2)__F-del_DSCav1_mut2 (opt1)
gggagacccgugacccggaaguuguacggcuacgcgacuuucccucccacaaacccucgcgcccuuccuuuccuacuugggcccggcagaaagcuuaccauggagcugcucauccugaaggccaacgccaucaccaccauccugacggcggugaccuucugcuucgccagcggccagaacaucaccgaggaguucuaccaguccacgugcagcgccgucuccaagggguaccucggcgcccugcgcaccgggugguacaccagcgugaucaccaucgagcuguccaacaucaaggagaacaagugcaacggcaccgacgccaaggugaagcucaucaagcaggagcuggacaaguacaagaacgcggucacggaccugcagcuccugaugcagagcacccccgccaccggguccggcagcgccaucugcuccggcguggccgugugcaagguccugcaccucgagggggaggugaacaagaucaagagcgcgcugcuguccaccaacaaggccguggucagccucuccaacggcgugagcgugcugacguucaagguccuggaccucaagaacuacaucgacaagcagcugcugccgauccucaacaagcaguccugcagcauccccaacaucgagaccgugaucgaguuccagcagaagaacaaccggcugcuggagaucacccgcgaguucuccgugaacgccggggucaccacgcccgugagcaccuacaugcucaccaacuccgagcugcugagccucaucaacgacaugcccaucaccaacgaccagaagaagcugaugagcaacaacgugcagaucguccggcagcaguccuacagcaucaugugcaucaucaaggaggaggugcuggccuacgugguccagcucccgcuguacggcgugaucgacacgcccugcuggaagcugcacaccagcccccucugcaccaccaacacgaaggagggguccaacaucugccugacccgcaccgaccggggcugguacugcgacaacgccggcuccgugagcuucuucccccaggcggagaccugcaagguccaguccaaccgcguguucugcgacacgaugaacagccugacccucccguccgaggucaaccugugcaacguggacaucuucaaccccaaguacgacugcaagaucaugaccagcaagaccgacguguccagcuccgucaucacgagccugggggccaucguguccugcuacggcaagaccaagugcaccgccagcaacaagaaccgggggaucaucaagaccuucuccaacggcugcgacuacgugagcaacaagggcgucgacacgguguccguggggaacacccucuacugcgucaacaagcaggagggccagagccuguacgugaagggggagcccaucaucaacuucuacgacccccugguguucccgagcgacgaguucgacgccuccaucagccaggucaacgagaagaucaaccagucccucgccuucauccgcaagagcgacgagcugcugcacaacgugaacgcgggcaaguccaccaccaacaucaugaucaccacgaucaucaucgugaucaucgucauccuccugagccugaucgccguggggcuccugcuguacugcaaggcccggugaggacuaguggaagcauuuuccuggcugauuaaaagaaauuacucagcuauggucaucuguuccuguuagaaggcuaugcagcauauuauauacuaugcgcauguuaugaaaugcauaauaaaaaauuuuaaaaaaucuaaaagaucuaaaaaaaaaaaaaaaaaaaaaaaaaaaaaaaaaaaaaaaaaaaaaaaaaaaaaaaaaaaaaaaaugcaucccccccccccccccccccccccccccccccaaaggcucuuuucagagccaccagaauu

SEQ ID NO: 3058 - RNA, 1919 nt, Artificial Sequence
  mRNA product Design h-3 comprising derived and/or modified sequence from HRSV(A2)__F-del_DSCav1_mut2 (opt2)
gggagacccgugacccggaaguuguacggcuacgcgacuuucccucccacaaacccucgcgcccuuccuuuccuacuugggcccggcagaaagcuuaccauggagcuccucauccucaaggccaacgccaucaccaccauccucaccgccgucaccuucugcuucgccuccggccagaacaucaccgaggaguucuaccaguccaccugcuccgccgucuccaagggcuaccucggcgcccuccgcaccggcugguacaccuccgucaucaccaucgagcucuccaacaucaaggagaacaagugcaacggcaccgacgccaaggucaagcucaucaagcaggagcucgacaaguacaagaacgccgucaccgaccuccagcuccucaugcaguccacccccgccaccggcuccggcuccgccaucugcuccggcgucgccgucugcaagguccuccaccucgagggcgaggucaacaagaucaaguccgcccuccucuccaccaacaaggccgucgucucccucuccaacggcgucuccguccucaccuucaagguccucgaccucaagaacuacaucgacaagcagcuccuccccauccucaacaagcaguccugcuccauccccaacaucgagaccgucaucgaguuccagcagaagaacaaccgccuccucgagaucacccgcgaguucuccgucaacgccggcgucaccacccccgucuccaccuacaugcucaccaacuccgagcuccucucccucaucaacgacaugcccaucaccaacgaccagaagaagcucauguccaacaacguccagaucguccgccagcaguccuacuccaucaugugcaucaucaaggaggagguccucgccuacgucguccagcucccccucuacggcgucaucgacacccccugcuggaagcuccacaccuccccccucugcaccaccaacaccaaggagggcuccaacaucugccucacccgcaccgaccgcggcugguacugcgacaacgccggcuccgucuccuucuucccccaggccgagaccugcaagguccaguccaaccgcgucuucugcgacaccaugaacucccucacccuccccuccgaggucaaccucugcaacgucgacaucuucaaccccaaguacgacugcaagaucaugaccuccaagaccgacgucuccuccuccgucaucaccucccucggcgccaucgucuccugcuacggcaagaccaagugcaccgccuccaacaagaaccgcggcaucaucaagaccuucuccaacggcugcgacuacgucuccaacaagggcgucgacaccgucuccgucggcaacacccucuacugcgucaacaagcaggagggccagucccucuacgucaagggcgagcccaucaucaacuucuacgacccccucgucuuccccuccgacgaguucgacgccuccaucucccaggucaacgagaagaucaaccagucccucgccuucauccgcaaguccgacgagcuccuccacaacgucaacgccggcaaguccaccaccaacaucaugaucaccaccaucaucaucgucaucaucgucauccuccucucccucaucgccgucggccuccuccucuacugcaaggcccgcugaggacuaguggaagcauuuuccuggcugauuaaaagaaauuacucagcuauggucaucuguuccuguuagaaggcuaugcagcauauuauauacuaugcgcauguuaugaaaugcauaauaaaaaauuuuaaaaaaucuaaaagaucuaaaaaaaaaaaaaaaaaaaaaaaaaaaaaaaaaaaaaaaaaaaaaaaaaaaaaaaaaaaaaaaaugcaucccccccccccccccccccccccccccccccaaaggcucuuuucagagccaccagaauu

SEQ ID NO: 3059 - RNA, 1919 nt, Artificial Sequence
  mRNA product Design h-3 comprising derived and/or modified sequence from HRSV(A2)__F-del_DSCav1_mut2 (opt3)
gggagacccgugacccggaaguuguacggcuacgcgacuuucccucccacaaacccucgcgcccuuccuuuccuacuugggcccggcagaaagcuuaccauggagcugcucauccuuaaggccaacgcuauuaccacaauacugacugcagugacguucugcuuugccagcggccagaauaucaccgaagaguucuaccaauccacauguucugcggucucaaaaggguauuugggagcuuuaagaacugguugguacaccaguguuauuacaaucgaacugagcaacauuaaggagaauaaaugcaacggcaccgacgccaaggugaaacuaaucaagcaggaacucgauaaguauaaaaaugcaguaacugaccugcagcuucugaugcaguccacacccgccaccgggucuggaucggcuauauguucaggcguggcagucugcaagguguugcaccucgagggugagguuaacaaaaucaagagcgcccugcugaguacgaauaaagcuguggucucccucucuaacggggugagcguauuaacuuuuaagguucuggaucuuaagaauuacauugacaaacaauugcugccuauccuaaacaagcaguccuguucaauuccaaauaucgaaaccgugauagaguuccagcagaaaaacaauaggcuccuggaaauuacacgggaguuuagugucaacgccggagugacuaccccggugagcacauauaugcuuaccaauucugagcuguugucccucaucaacgauaugcccauuacgaacgaccaaaagaaacugaugucaaauaacguccagaucguucgccagcagagcuacaguaucaugugcauuauaaaggaagagguguuagcguauguagugcaacugccucucuacggcgucaucgauacuccauguuggaaacuucauacaucuccccugugcaccacuaauacaaaggaaggcuccaacauuuguuugacccgaacggaccgugggugguacugcgauaaugcaggaagcgugucguucuuuccucaggccgagaccuguaagguucagucuaacagaguguucugcgacacaaugaacucccuaacucugccaucagaagucaaucucugcaauguggauaucuuuaaccccaaauaugacuguaagauaaugaccaguaaaacagauguaagcuccucuguuauuacuagccugggugcuaucgugucaugcuacggcaagaccaaauguacagccaguaauaagaacagggggaucauuaagaccuucuccaauggaugcgacuaugucagcaacaaaggcguggacacugucucuguggguaauacgcuuuacuguguuaacaagcaagaggggcagucacuguaugugaaaggagagccuaucauuaacuuuuacgauccauugguauucccgagugacgaauuugaugcaagcauaucccaggucaaugagaagaucaaccagucucucgcuuucauucggaaaucggacgaacuguuacacaaugugaacgccggcaagagcacaaccaauaucaugaucacuaccauuauaaucguuauuaucgugauucugcuaucccucaucgcggucggccugcuuuuguauugcaaggcccgcugaggacuaguggaagcauuuuccuggcugauuaaaagaaauuacucagcuauggucaucuguuccuguuagaaggcuaugcagcauauuauauacuaugcgcauguuaugaaaugcauaauaaaaaauuuuaaaaaaucuaaaagaucuaaaaaaaaaaaaaaaaaaaaaaaaaaaaaaaaaaaaaaaaaaaaaaaaaaaaaaaaaaaaaaaaugcaucccccccccccccccccccccccccccccccaaaggcucuuuucagagccaccagaauu

SEQ ID NO: 3060 - RNA, 1919 nt, Artificial Sequence
  mRNA product Design h-3 comprising derived and/or modified sequence from HRSV(A2)__F-del_DSCav1_mut2 (opt4)
gggagacccgugacccggaaguuguacggcuacgcgacuuucccucccacaaacccucgcgcccuuccuuuccuacuugggcccggcagaaagcuuaccauggagcugcugauccugaaggccaacgccaucaccaccauccugaccgccgugaccuucugcuucgccagcggccagaacaucaccgaggaguucuaccagagcaccugcagcgccgugagcaagggcuaccugggcgcccugagaaccggcugguacaccagcgugaucaccaucgagcugagcaacaucaaggagaacaagugcaacggcaccgacgccaaggugaagcugaucaagcaggagcuggacaaguacaagaacgccgugaccgaccugcagcugcugaugcagagcacccccgccaccggcagcggcagcgccaucugcagcggcguggccgugugcaaggugcugcaccuggagggcgaggugaacaagaucaagagcgcccugcugagcaccaacaaggccguggugagccugagcaacggcgugagcgugcugaccuucaaggugcuggaccugaagaacuacaucgacaagcagcugcugcccauccugaacaagcagagcugcagcauccccaacaucgagaccgugaucgaguuccagcagaagaacaacagacugcuggagaucaccagagaguucagcgugaacgccggcgugaccacccccgugagcaccuacaugcugaccaacagcgagcugcugagccugaucaacgacaugcccaucaccaacgaccagaagaagcugaugagcaacaacgugcagaucgugagacagcagagcuacagcaucaugugcaucaucaaggaggaggugcuggccuacguggugcagcugccccuguacggcgugaucgacacccccugcuggaagcugcacaccagcccccugugcaccaccaacaccaaggagggcagcaacaucugccugaccagaaccgacagaggcugguacugcgacaacgccggcagcgugagcuucuucccccaggccgagaccugcaaggugcagagcaacagaguguucugcgacaccaugaacagccugacccugcccagcgaggugaaccugugcaacguggacaucuucaaccccaaguacgacugcaagaucaugaccagcaagaccgacgugagcagcagcgugaucaccagccugggcgccaucgugagcugcuacggcaagaccaagugcaccgccagcaacaagaacagaggcaucaucaagaccuucagcaacggcugcgacuacgugagcaacaagggcguggacaccgugagcgugggcaacacccuguacugcgugaacaagcaggagggccagagccuguacgugaagggcgagcccaucaucaacuucuacgacccccugguguuccccagcgacgaguucgacgccagcaucagccaggugaacgagaagaucaaccagagccuggccuucaucagaaagagcgacgagcugcugcacaacgugaacgccggcaagagcaccaccaacaucaugaucaccaccaucaucaucgugaucaucgugauccugcugagccugaucgccgugggccugcugcuguacugcaaggccagaugaggacuaguggaagcauuuuccuggcugauuaaaagaaauuacucagcuauggucaucuguuccuguuagaaggcuaugcagcauauuauauacuaugcgcauguuaugaaaugcauaauaaaaaauuuuaaaaaaucuaaaagaucuaaaaaaaaaaaaaaaaaaaaaaaaaaaaaaaaaaaaaaaaaaaaaaaaaaaaaaaaaaaaaaaaugcaucccccccccccccccccccccccccccccccaaaggcucuuuucagagccaccagaauu

SEQ ID NO: 3061 - RNA, 1919 nt, Artificial Sequence
  mRNA product Design h-3 comprising derived and/or modified sequence from HRSV(A2)__F-del_DSCav1_mut2 (opt5)
gggagacccgugacccggaaguuguacggcuacgcgacuuucccucccacaaacccucgcgcccuuccuuuccuacuugggcccggcagaaagcuuaccauggagcugcucauccugaaggccaacgcuauuaccacaauccuuacggccgugaccuucugcuuugcgagcggccagaauauuacagaagaguucuaccaauccaccuguucugcugucagcaaaggguaucugggagcccucagaacaggcugguacaccuccguuaucacaauugaacugucuaacaucaaggagaauaaaugcaacgggaccgacgccaaggugaaacuuaucaagcaggaacuggauaaguauaaaaaugcugugacggaccuccagcugcugaugcagagcacccccgccacaggauccggcucugcuauuuguagcggggucgccgugugcaagguucuccaccuggagggagaggugaacaaaaucaaguccgcgcuucugagcaccaauaaagccgucgugucucucuccaacggcguuagcgugcugacauuuaagguccuugaucugaagaauuacauugacaaacaacuccugccuauccugaacaagcagucuuguuccauuccgaauaucgaaaccgugauugaguuccagcagaaaaacaaucggcuccuggaaaucacgcgcgaguuuagcgugaacgcuggcgucacaacccccguuucuacauauaugcuuaccaauuccgagcugcucagccugaucaacgauaugccuauuaccaacgaccaaaagaaacuuauguccaauaacgugcagaucgugagacagcagucuuacagcauuaugugcaucauuaaggaagagguccuggccuaugugguucaacucccccuguacggggugaucgauacaccuuguuggaaacugcauacgagcccccucugcaccacaaauaccaaggaaggauccaacaucugucugacacggaccgaccgcggcugguacugcgauaaugcugggucugucuccuucuuuccucaggccgagacguguaaggugcagagcaacagaguuuucugcgacacaaugaacucucuuacccugccgagcgaagugaaucucugcaaugucgauauuuuuaaccccaaauaugacuguaagaucaugaccuccaaaacagaugugucuagcuccgucauuaccagccugggagcgaucgugucuugcuacggcaagacaaaauguacggccuccaauaagaaccgggggauuaucaagaccuucagcaauggaugcgacuauguuucuaacaaaggcguggacacagucuccgugggcaauacccuuuacuguguuaacaagcaagaggggcagagccuguaugugaaaggagagccuaucauuaacuuuuacgauccccucgucuucccuuccgacgaauuugaugcuucuaucagccaggugaaugagaagauuaaccagucccuggccuucauccgcaaaucugacgaacugcuccacaaugugaacgcuggcaagagcacaaccaauauuaugaucacgaccauuaucaucguuauuaucgucauucugcuuucccugaucgccguggggcuccugcuguauugcaaggccagaugaggacuaguggaagcauuuuccuggcugauuaaaagaaauuacucagcuauggucaucuguuccuguuagaaggcuaugcagcauauuauauacuaugcgcauguuaugaaaugcauaauaaaaaauuuuaaaaaaucuaaaagaucuaaaaaaaaaaaaaaaaaaaaaaaaaaaaaaaaaaaaaaaaaaaaaaaaaaaaaaaaaaaaaaaaugcaucccccccccccccccccccccccccccccccaaaggcucuuuucagagccaccagaauu

SEQ ID NO: 3062 - RNA, 1919 nt, Artificial Sequence
  mRNA product Design h-3 comprising derived and/or modified sequence from HRSV(A2)__F-del_DSCav1_mut2 (opt6)
gggagacccgugacccggaaguuguacggcuacgcgacuuucccucccacaaacccucgcgcccuuccuuuccuacuugggcccggcagaaagcuuaccauggaacuccuaauacuuaaagccaaugcaauaaccacaauacuaacagcaguaacauucugcuuugcaucaggacaaaacauaacagaagaauuuuaccaaucaacauguucagcaguaagcaaaggauaccuaggagccuuacgcacagguugguacacuuccguaauaacaauagaacucucaaauauaaaagaaaacaaaugcaacggaaccgaugcaaaaguaaaacuaauaaaacaagaauuagacaaauacaaaaacgcaguaacagaccuacaauuacuuaugcaaucaacacccgcaacaggauccggcucagcaaucuguucaggaguagcaguaugcaaaguucuccaccuagaaggcgaaguaaacaaaauaaaaucagcccuauuaucuaccaauaaagcaguaguaucacuaucaaauggaguaucuguccuaaccuucaaaguacuugaccuaaaaaauuacaucgacaaacaauuacuaccaauacuuaacaaacaaucauguucaauaccaaacauugaaacaguaauagaauuucaacaaaaaaauaacagauuauuagaaauaacccgcgaauuuucaguuaacgcaggaguaacaacaccaguauccacauacauguuaacaaauucagaacucuuaucacuuauaaacgacaugcccauaacaaacgaccaaaaaaaacucaugucuaacaauguucaaauaguucgacaacaaucauacuccauaaugugcauaauaaaagaagaaguucuagcauauguuguacaacucccacucuaugguguuauagacacaccaugcuggaaacuacauacaagccccuuaugcacuacaaacacaaaagaaggcucuaauauaugucuaacccgcacagacagaggcugguauugcgauaacgcagguucaguaucauucuuuccacaagcagaaacuugcaaaguccaauccaauagagucuucugcgacacuaugaacucacucacacucccaucugaagucaauuuauguaacgucgauaucuucaacccaaaauacgacugcaaaauaaugaccucaaaaacagacguaagcucaucagucauaacuucucuaggcgcaaucgucucauguuacggcaaaacaaaauguaccgcaucaaacaaaaaucgagguauaauaaaaaccuuuucuaacggcugcgacuacguaucaaacaaaggaguagauacuguaagugucggaaacacauuauacugcgucaacaaacaagaaggacaaucccuauauguuaaaggcgaaccuaucauuaauuucuacgacccacucgucuuuccauccgacgaauuugacgcaucaauuucccaaguaaaugaaaaaauaaaccaaucccuugcauucauaagaaaaucagaugaacuauuacacaacguaaacgcaggcaaaucaacaacaaauauaaugaucacaacaauaauaaucguaauaauaguaauccuacucucacuaauagcaguaggcuuacuauuauauugcaaagccagauaaggacuaguggaagcauuuuccuggcugauuaaaagaaauuacucagcuauggucaucuguuccuguuagaaggcuaugcagcauauuauauacuaugcgcauguuaugaaaugcauaauaaaaaauuuuaaaaaaucuaaaagaucuaaaaaaaaaaaaaaaaaaaaaaaaaaaaaaaaaaaaaaaaaaaaaaaaaaaaaaaaaaaaaaaaugcaucccccccccccccccccccccccccccccccaaaggcucuuuucagagccaccagaauu

SEQ ID NO: 3063 - RNA, 1919 nt, Artificial Sequence
  mRNA product Design h-3 comprising derived and/or modified sequence from HRSV(A2)__F-del_DSCav1_mut2 (opt11)
gggagacccgugacccggaaguuguacggcuacgcgacuuucccucccacaaacccucgcgcccuuccuuuccuacuugggcccggcagaaagcuuaccauggaacuucuuauccuaaaagcgaacgccauaaccacaauccuaacagcagucaccuucuguuucgccucaggacaaaacaucaccgaggaauuuuaccaauccacauguagcgcugucucaaaaggcuaccucggcgcccuccgaaccggcugguacacauccguaauaacgaucgaacucuccaacauaaaagaaaauaaaugcaacggcaccgacgccaaagucaaacuuaucaaacaagaacuagacaaauacaaaaacgccgucaccgaccuccagcuccucaugcaauccaccccagcaacaggcuccggaagcgcaaucugcucaggcgucgccguaugcaaaguacuccaccucgaaggagaagucaacaaaaucaaauccgcccuccuauccacaaacaaagcaguugucucacucuccaacgggguaagcguacugaccuucaaaguccuagaccucaaaaacuacaucgauaaacaacuccuuccaauccucaacaaacaaucaugcucuauccccaacaucgaaaccguaaucgaauuucaacaaaaaaacaaccgccuacuugaaaucacacgcgaauuuagcgucaacgcaggaguaacaacacccguguccacauauaugcucacgaacagcgaacuacuaucccugauuaacgacaugcccaucaccaacgaccaaaaaaaacuaaugagcaacaacguacaaaucguccgccaacaaagcuacucuauaaugugcaucaucaaggaagaaguccuagccuacgucguccaauuaccacucuacggcgucaucgacacacccugcuggaaacuccauacauccccccucugcaccaccaacaccaaagaaggguccaacauaugccucacucgcacagaccgcggcugguacugcgacaacgcuggcagcgucagcuucuucccccaggccgaaaccugcaaaguccaauccaacagagucuucugcgacaccaugaacucgcucacccuccccuccgaggucaaccucugcaacgucgacauauucaaccccaaauacgacugcaaaaucaugaccuccaaaaccgacgucagcucaucagucaucacaucccucggggccaucgucuccugcuacggcaaaaccaagugcaccgccucaaacaaaaaccgcggcauuaucaaaacauucuccaacggcugcgacuacgucuccaacaaaggcgucgacacagucuccgucgguaacacccucuacugcguaaauaaacaagaaggccaaucccucuacgucaaaggcgaacccaucaucaacuucuacgacccucucgucuuccccuccgacgaauuugacgccucaaucagccaaguuaacgaaaaaaucaaccaaucacucgccuucauccgcaaauccgacgaacuccuccacaacguuaacgccggcaaaucuaccacgaacaucaugaucaccaccauaaucaucguaauuaucguaauacuccuaucccucauagcaguaggccuccuacucuacugcaaagcccguuaaggacuaguggaagcauuuuccuggcugauuaaaagaaauuacucagcuauggucaucuguuccuguuagaaggcuaugcagcauauuauauacuaugcgcauguuaugaaaugcauaauaaaaaauuuuaaaaaaucuaaaagaucuaaaaaaaaaaaaaaaaaaaaaaaaaaaaaaaaaaaaaaaaaaaaaaaaaaaaaaaaaaaaaaaaugcaucccccccccccccccccccccccccccccccaaaggcucuuuucagagccaccagaauu

SEQ ID NO: 3064 - RNA, 1982 nt, Artificial Sequence
  mRNA product Design h-4 comprising derived and/or modified sequence from HRSV(A2)__F-del_DSCav1_mut2 (opt1)
gggagagggcgcuuggcuugcaaggacccugagcugcggcauugaagcacacccaacccaacucgacugaagucagccucacugaaccggaucugagaaucuucucucucugggcuugccagggcucuccgaaccuagcuagcauccucuucaauuccaacuagaaagcuuaccauggagcugcucauccugaaggccaacgccaucaccaccauccugacggcggugaccuucugcuucgccagcggccagaacaucaccgaggaguucuaccaguccacgugcagcgccgucuccaagggguaccucggcgcccugcggaccggcugguacaccuccgugaucaccaucgagcugagcaacaucaaggagaacaagugcaacgggaccgacgccaaggugaagcucaucaagcaggagcuggacaaguacaagaacgcggucacggaccugcagcuccugaugcaguccaccccggcaaccggcuccggcuccgccaucugcagcggcgucgccgugugcaaggugcugcaccucgagggggaggucaacaagaucaagagcgcccugcuguccaccaacaaggccguggugagccucuccaacggcgucagcgugcugaccuucaaggugcuggaccucaagaacuacaucgacaagcagcugcugcccauccugaacaagcagagcugcuccauccccaacaucgagacggugaucgaguuccagcagaagaacaaccggcuccuggagaucacccgcgaguucagcgugaacgccggggucaccacccccguguccacguacaugcugaccaacagcgagcuccugucccugaucaacgacaugccgaucaccaacgaccagaagaagcucaugagcaacaacgugcagaucguccggcagcaguccuacagcaucaugugcaucaucaaggaggaggugcuggcguacgugguccagcugccccucuacggcgugaucgacacccccugcuggaagcugcacacgagcccccugugcaccaccaacaccaaggagggguccaacaucugccucacgcgcaccgaccggggcugguacugcgacaacgccggcagcgucuccuucuucccgcaggccgagaccugcaaggugcagagcaaccgcguguucugcgacaccaugaacucccugacgcugcccagcgagguaaaccucugcaacgucgacaucuucaaccccaaguacgacugcaagaucaugaccuccaagaccgacgugagcuccagcgugaucaccucccugggggccaucgucagcugcuacggcaagacgaagugcaccgccagcaacaagaaccgggggaucaucaagaccuucuccaacggcugcgacuacgugagcaacaagggcguggacaccguguccgucgggaacacccuguacugcgugaacaagcaggagggccagagccucuacgugaagggggagcccaucaucaacuucuacgacccgcuggucuuccccuccgacgaguucgacgcgagcaucucccaggugaacgagaagaucaaccagagccuggccuucauccgcaaguccgacgagcugcuccacaacgugaacgccggcaagagcacgaccaacaucaugaucaccaccaucaucaucgucaucaucgugauccugcugucccucaucgccguggggcugcugcucuacugcaaggcccggugaggacuaguaauaaggaaacuguaugaaugucugugggcaggaagugaagagauccuucuguaaagguuuuuggaauuaugucugcugaauaauaaacuuuuuugaaauaauaaaucugguagaaaaaugagaucuaaaaaaaaaaaaaaaaaaaaaaaaaaaaaaaaaaaaaaaaaaaaaaaaaaaaaaaaaaaaaaaaugcaucccccccccccccccccccccccccccccccaaaggcucuuuucagagccaccagaauu

SEQ ID NO: 3065 - RNA, 1982 nt, Artificial Sequence
  mRNA product Design h-4 comprising derived and/or modified sequence from HRSV(A2)__F-del_DSCav1_mut2 (opt1)
gggagagggcgcuuggcuugcaaggacccugagcugcggcauugaagcacacccaacccaacucgacugaagucagccucacugaaccggaucugagaaucuucucucucugggcuugccagggcucuccgaaccuagcuagcauccucuucaauuccaacuagaaagcuuaccauggagcugcucauccugaaggccaacgccaucaccaccauccugacggcggugaccuucugcuucgccagcggccagaacaucaccgaggaguucuaccaguccacgugcagcgccgucuccaagggguaccucggcgcccugcgcaccgggugguacaccagcgugaucaccaucgagcuguccaacaucaaggagaacaagugcaacggcaccgacgccaaggugaagcucaucaagcaggagcuggacaaguacaagaacgcggucacggaccugcagcuccugaugcagagcacccccgccaccggguccggcagcgccaucugcuccggcguggccgugugcaagguccugcaccucgagggggaggugaacaagaucaagagcgcgcugcuguccaccaacaaggccguggucagccucuccaacggcgugagcgugcugacguucaagguccuggaccucaagaacuacaucgacaagcagcugcugccgauccucaacaagcaguccugcagcauccccaacaucgagaccgugaucgaguuccagcagaagaacaaccggcugcuggagaucacccgcgaguucuccgugaacgccggggucaccacgcccgugagcaccuacaugcucaccaacuccgagcugcugagccucaucaacgacaugcccaucaccaacgaccagaagaagcugaugagcaacaacgugcagaucguccggcagcaguccuacagcaucaugugcaucaucaaggaggaggugcuggccuacgugguccagcucccgcuguacggcgugaucgacacgcccugcuggaagcugcacaccagcccccucugcaccaccaacacgaaggagggguccaacaucugccugacccgcaccgaccggggcugguacugcgacaacgccggcuccgugagcuucuucccccaggcggagaccugcaagguccaguccaaccgcguguucugcgacacgaugaacagccugacccucccguccgaggucaaccugugcaacguggacaucuucaaccccaaguacgacugcaagaucaugaccagcaagaccgacguguccagcuccgucaucacgagccugggggccaucguguccugcuacggcaagaccaagugcaccgccagcaacaagaaccgggggaucaucaagaccuucuccaacggcugcgacuacgugagcaacaagggcgucgacacgguguccguggggaacacccucuacugcgucaacaagcaggagggccagagccuguacgugaagggggagcccaucaucaacuucuacgacccccugguguucccgagcgacgaguucgacgccuccaucagccaggucaacgagaagaucaaccagucccucgccuucauccgcaagagcgacgagcugcugcacaacgugaacgcgggcaaguccaccaccaacaucaugaucaccacgaucaucaucgugaucaucgucauccuccugagccugaucgccguggggcuccugcuguacugcaaggcccggugaggacuaguaauaaggaaacuguaugaaugucugugggcaggaagugaagagauccuucuguaaagguuuuuggaauuaugucugcugaauaauaaacuuuuuugaaauaauaaaucugguagaaaaaugagaucuaaaaaaaaaaaaaaaaaaaaaaaaaaaaaaaaaaaaaaaaaaaaaaaaaaaaaaaaaaaaaaaaugcaucccccccccccccccccccccccccccccccaaaggcucuuuucagagccaccagaauu

SEQ ID NO: 3066 - RNA, 1982 nt, Artificial Sequence
  mRNA product Design h-4 comprising derived and/or modified sequence from HRSV(A2)__F-del_DSCav1_mut2 (opt2)
gggagagggcgcuuggcuugcaaggacccugagcugcggcauugaagcacacccaacccaacucgacugaagucagccucacugaaccggaucugagaaucuucucucucugggcuugccagggcucuccgaaccuagcuagcauccucuucaauuccaacuagaaagcuuaccauggagcuccucauccucaaggccaacgccaucaccaccauccucaccgccgucaccuucugcuucgccuccggccagaacaucaccgaggaguucuaccaguccaccugcuccgccgucuccaagggcuaccucggcgcccuccgcaccggcugguacaccuccgucaucaccaucgagcucuccaacaucaaggagaacaagugcaacggcaccgacgccaaggucaagcucaucaagcaggagcucgacaaguacaagaacgccgucaccgaccuccagcuccucaugcaguccacccccgccaccggcuccggcuccgccaucugcuccggcgucgccgucugcaagguccuccaccucgagggcgaggucaacaagaucaaguccgcccuccucuccaccaacaaggccgucgucucccucuccaacggcgucuccguccucaccuucaagguccucgaccucaagaacuacaucgacaagcagcuccuccccauccucaacaagcaguccugcuccauccccaacaucgagaccgucaucgaguuccagcagaagaacaaccgccuccucgagaucacccgcgaguucuccgucaacgccggcgucaccacccccgucuccaccuacaugcucaccaacuccgagcuccucucccucaucaacgacaugcccaucaccaacgaccagaagaagcucauguccaacaacguccagaucguccgccagcaguccuacuccaucaugugcaucaucaaggaggagguccucgccuacgucguccagcucccccucuacggcgucaucgacacccccugcuggaagcuccacaccuccccccucugcaccaccaacaccaaggagggcuccaacaucugccucacccgcaccgaccgcggcugguacugcgacaacgccggcuccgucuccuucuucccccaggccgagaccugcaagguccaguccaaccgcgucuucugcgacaccaugaacucccucacccuccccuccgaggucaaccucugcaacgucgacaucuucaaccccaaguacgacugcaagaucaugaccuccaagaccgacgucuccuccuccgucaucaccucccucggcgccaucgucuccugcuacggcaagaccaagugcaccgccuccaacaagaaccgcggcaucaucaagaccuucuccaacggcugcgacuacgucuccaacaagggcgucgacaccgucuccgucggcaacacccucuacugcgucaacaagcaggagggccagucccucuacgucaagggcgagcccaucaucaacuucuacgacccccucgucuuccccuccgacgaguucgacgccuccaucucccaggucaacgagaagaucaaccagucccucgccuucauccgcaaguccgacgagcuccuccacaacgucaacgccggcaaguccaccaccaacaucaugaucaccaccaucaucaucgucaucaucgucauccuccucucccucaucgccgucggccuccuccucuacugcaaggcccgcugaggacuaguaauaaggaaacuguaugaaugucugugggcaggaagugaagagauccuucuguaaagguuuuuggaauuaugucugcugaauaauaaacuuuuuugaaauaauaaaucugguagaaaaaugagaucuaaaaaaaaaaaaaaaaaaaaaaaaaaaaaaaaaaaaaaaaaaaaaaaaaaaaaaaaaaaaaaaaugcaucccccccccccccccccccccccccccccccaaaggcucuuuucagagccaccagaauu

SEQ ID NO: 3067 - RNA, 1982 nt, Artificial Sequence
  mRNA product Design h-4 comprising derived and/or modified sequence from HRSV(A2)__F-del_DSCav1_mut2 (opt3)
gggagagggcgcuuggcuugcaaggacccugagcugcggcauugaagcacacccaacccaacucgacugaagucagccucacugaaccggaucugagaaucuucucucucugggcuugccagggcucuccgaaccuagcuagcauccucuucaauuccaacuagaaagcuuaccauggagcugcucauccuuaaggccaacgcuauuaccacaauacugacugcagugacguucugcuuugccagcggccagaauaucaccgaagaguucuaccaauccacauguucugcggucucaaaaggguauuugggagcuuuaagaacugguugguacaccaguguuauuacaaucgaacugagcaacauuaaggagaauaaaugcaacggcaccgacgccaaggugaaacuaaucaagcaggaacucgauaaguauaaaaaugcaguaacugaccugcagcuucugaugcaguccacacccgccaccgggucuggaucggcuauauguucaggcguggcagucugcaagguguugcaccucgagggugagguuaacaaaaucaagagcgcccugcugaguacgaauaaagcuguggucucccucucuaacggggugagcguauuaacuuuuaagguucuggaucuuaagaauuacauugacaaacaauugcugccuauccuaaacaagcaguccuguucaauuccaaauaucgaaaccgugauagaguuccagcagaaaaacaauaggcuccuggaaauuacacgggaguuuagugucaacgccggagugacuaccccggugagcacauauaugcuuaccaauucugagcuguugucccucaucaacgauaugcccauuacgaacgaccaaaagaaacugaugucaaauaacguccagaucguucgccagcagagcuacaguaucaugugcauuauaaaggaagagguguuagcguauguagugcaacugccucucuacggcgucaucgauacuccauguuggaaacuucauacaucuccccugugcaccacuaauacaaaggaaggcuccaacauuuguuugacccgaacggaccgugggugguacugcgauaaugcaggaagcgugucguucuuuccucaggccgagaccuguaagguucagucuaacagaguguucugcgacacaaugaacucccuaacucugccaucagaagucaaucucugcaauguggauaucuuuaaccccaaauaugacuguaagauaaugaccaguaaaacagauguaagcuccucuguuauuacuagccugggugcuaucgugucaugcuacggcaagaccaaauguacagccaguaauaagaacagggggaucauuaagaccuucuccaauggaugcgacuaugucagcaacaaaggcguggacacugucucuguggguaauacgcuuuacuguguuaacaagcaagaggggcagucacuguaugugaaaggagagccuaucauuaacuuuuacgauccauugguauucccgagugacgaauuugaugcaagcauaucccaggucaaugagaagaucaaccagucucucgcuuucauucggaaaucggacgaacuguuacacaaugugaacgccggcaagagcacaaccaauaucaugaucacuaccauuauaaucguuauuaucgugauucugcuaucccucaucgcggucggccugcuuuuguauugcaaggcccgcugaggacuaguaauaaggaaacuguaugaaugucugugggcaggaagugaagagauccuucuguaaagguuuuuggaauuaugucugcugaauaauaaacuuuuuugaaauaauaaaucugguagaaaaaugagaucuaaaaaaaaaaaaaaaaaaaaaaaaaaaaaaaaaaaaaaaaaaaaaaaaaaaaaaaaaaaaaaaaugcaucccccccccccccccccccccccccccccccaaaggcucuuuucagagccaccagaauu

SEQ ID NO: 3068 - RNA, 1982 nt, Artificial Sequence
  mRNA product Design h-4 comprising derived and/or modified sequence from HRSV(A2)__F-del_DSCav1_mut2 (opt4)
gggagagggcgcuuggcuugcaaggacccugagcugcggcauugaagcacacccaacccaacucgacugaagucagccucacugaaccggaucugagaaucuucucucucugggcuugccagggcucuccgaaccuagcuagcauccucuucaauuccaacuagaaagcuuaccauggagcugcugauccugaaggccaacgccaucaccaccauccugaccgccgugaccuucugcuucgccagcggccagaacaucaccgaggaguucuaccagagcaccugcagcgccgugagcaagggcuaccugggcgcccugagaaccggcugguacaccagcgugaucaccaucgagcugagcaacaucaaggagaacaagugcaacggcaccgacgccaaggugaagcugaucaagcaggagcuggacaaguacaagaacgccgugaccgaccugcagcugcugaugcagagcacccccgccaccggcagcggcagcgccaucugcagcggcguggccgugugcaaggugcugcaccuggagggcgaggugaacaagaucaagagcgcccugcugagcaccaacaaggccguggugagccugagcaacggcgugagcgugcugaccuucaaggugcuggaccugaagaacuacaucgacaagcagcugcugcccauccugaacaagcagagcugcagcauccccaacaucgagaccgugaucgaguuccagcagaagaacaacagacugcuggagaucaccagagaguucagcgugaacgccggcgugaccacccccgugagcaccuacaugcugaccaacagcgagcugcugagccugaucaacgacaugcccaucaccaacgaccagaagaagcugaugagcaacaacgugcagaucgugagacagcagagcuacagcaucaugugcaucaucaaggaggaggugcuggccuacguggugcagcugccccuguacggcgugaucgacacccccugcuggaagcugcacaccagcccccugugcaccaccaacaccaaggagggcagcaacaucugccugaccagaaccgacagaggcugguacugcgacaacgccggcagcgugagcuucuucccccaggccgagaccugcaaggugcagagcaacagaguguucugcgacaccaugaacagccugacccugcccagcgaggugaaccugugcaacguggacaucuucaaccccaaguacgacugcaagaucaugaccagcaagaccgacgugagcagcagcgugaucaccagccugggcgccaucgugagcugcuacggcaagaccaagugcaccgccagcaacaagaacagaggcaucaucaagaccuucagcaacggcugcgacuacgugagcaacaagggcguggacaccgugagcgugggcaacacccuguacugcgugaacaagcaggagggccagagccuguacgugaagggcgagcccaucaucaacuucuacgacccccugguguuccccagcgacgaguucgacgccagcaucagccaggugaacgagaagaucaaccagagccuggccuucaucagaaagagcgacgagcugcugcacaacgugaacgccggcaagagcaccaccaacaucaugaucaccaccaucaucaucgugaucaucgugauccugcugagccugaucgccgugggccugcugcuguacugcaaggccagaugaggacuaguaauaaggaaacuguaugaaugucugugggcaggaagugaagagauccuucuguaaagguuuuuggaauuaugucugcugaauaauaaacuuuuuugaaauaauaaaucugguagaaaaaugagaucuaaaaaaaaaaaaaaaaaaaaaaaaaaaaaaaaaaaaaaaaaaaaaaaaaaaaaaaaaaaaaaaaugcaucccccccccccccccccccccccccccccccaaaggcucuuuucagagccaccagaauu

SEQ ID NO: 3069 - RNA, 1982 nt, Artificial Sequence
  mRNA product Design h-4 comprising derived and/or modified sequence from HRSV(A2)__F-del_DSCav1_mut2 (opt5)
gggagagggcgcuuggcuugcaaggacccugagcugcggcauugaagcacacccaacccaacucgacugaagucagccucacugaaccggaucugagaaucuucucucucugggcuugccagggcucuccgaaccuagcuagcauccucuucaauuccaacuagaaagcuuaccauggagcugcucauccugaaggccaacgcuauuaccacaauccuuacggccgugaccuucugcuuugcgagcggccagaauauuacagaagaguucuaccaauccaccuguucugcugucagcaaaggguaucugggagcccucagaacaggcugguacaccuccguuaucacaauugaacugucuaacaucaaggagaauaaaugcaacgggaccgacgccaaggugaaacuuaucaagcaggaacuggauaaguauaaaaaugcugugacggaccuccagcugcugaugcagagcacccccgccacaggauccggcucugcuauuuguagcggggucgccgugugcaagguucuccaccuggagggagaggugaacaaaaucaaguccgcgcuucugagcaccaauaaagccgucgugucucucuccaacggcguuagcgugcugacauuuaagguccuugaucugaagaauuacauugacaaacaacuccugccuauccugaacaagcagucuuguuccauuccgaauaucgaaaccgugauugaguuccagcagaaaaacaaucggcuccuggaaaucacgcgcgaguuuagcgugaacgcuggcgucacaacccccguuucuacauauaugcuuaccaauuccgagcugcucagccugaucaacgauaugccuauuaccaacgaccaaaagaaacuuauguccaauaacgugcagaucgugagacagcagucuuacagcauuaugugcaucauuaaggaagagguccuggccuaugugguucaacucccccuguacggggugaucgauacaccuuguuggaaacugcauacgagcccccucugcaccacaaauaccaaggaaggauccaacaucugucugacacggaccgaccgcggcugguacugcgauaaugcugggucugucuccuucuuuccucaggccgagacguguaaggugcagagcaacagaguuuucugcgacacaaugaacucucuuacccugccgagcgaagugaaucucugcaaugucgauauuuuuaaccccaaauaugacuguaagaucaugaccuccaaaacagaugugucuagcuccgucauuaccagccugggagcgaucgugucuugcuacggcaagacaaaauguacggccuccaauaagaaccgggggauuaucaagaccuucagcaauggaugcgacuauguuucuaacaaaggcguggacacagucuccgugggcaauacccuuuacuguguuaacaagcaagaggggcagagccuguaugugaaaggagagccuaucauuaacuuuuacgauccccucgucuucccuuccgacgaauuugaugcuucuaucagccaggugaaugagaagauuaaccagucccuggccuucauccgcaaaucugacgaacugcuccacaaugugaacgcuggcaagagcacaaccaauauuaugaucacgaccauuaucaucguuauuaucgucauucugcuuucccugaucgccguggggcuccugcuguauugcaaggccagaugaggacuaguaauaaggaaacuguaugaaugucugugggcaggaagugaagagauccuucuguaaagguuuuuggaauuaugucugcugaauaauaaacuuuuuugaaauaauaaaucugguagaaaaaugagaucuaaaaaaaaaaaaaaaaaaaaaaaaaaaaaaaaaaaaaaaaaaaaaaaaaaaaaaaaaaaaaaaaugcaucccccccccccccccccccccccccccccccaaaggcucuuuucagagccaccagaauu

SEQ ID NO: 3070 - RNA, 1982 nt, Artificial Sequence
  mRNA product Design h-4 comprising derived and/or modified sequence from HRSV(A2)__F-del_DSCav1_mut2 (opt6)
gggagagggcgcuuggcuugcaaggacccugagcugcggcauugaagcacacccaacccaacucgacugaagucagccucacugaaccggaucugagaaucuucucucucugggcuugccagggcucuccgaaccuagcuagcauccucuucaauuccaacuagaaagcuuaccauggaacuccuaauacuuaaagccaaugcaauaaccacaauacuaacagcaguaacauucugcuuugcaucaggacaaaacauaacagaagaauuuuaccaaucaacauguucagcaguaagcaaaggauaccuaggagccuuacgcacagguugguacacuuccguaauaacaauagaacucucaaauauaaaagaaaacaaaugcaacggaaccgaugcaaaaguaaaacuaauaaaacaagaauuagacaaauacaaaaacgcaguaacagaccuacaauuacuuaugcaaucaacacccgcaacaggauccggcucagcaaucuguucaggaguagcaguaugcaaaguucuccaccuagaaggcgaaguaaacaaaauaaaaucagcccuauuaucuaccaauaaagcaguaguaucacuaucaaauggaguaucuguccuaaccuucaaaguacuugaccuaaaaaauuacaucgacaaacaauuacuaccaauacuuaacaaacaaucauguucaauaccaaacauugaaacaguaauagaauuucaacaaaaaaauaacagauuauuagaaauaacccgcgaauuuucaguuaacgcaggaguaacaacaccaguauccacauacauguuaacaaauucagaacucuuaucacuuauaaacgacaugcccauaacaaacgaccaaaaaaaacucaugucuaacaauguucaaauaguucgacaacaaucauacuccauaaugugcauaauaaaagaagaaguucuagcauauguuguacaacucccacucuaugguguuauagacacaccaugcuggaaacuacauacaagccccuuaugcacuacaaacacaaaagaaggcucuaauauaugucuaacccgcacagacagaggcugguauugcgauaacgcagguucaguaucauucuuuccacaagcagaaacuugcaaaguccaauccaauagagucuucugcgacacuaugaacucacucacacucccaucugaagucaauuuauguaacgucgauaucuucaacccaaaauacgacugcaaaauaaugaccucaaaaacagacguaagcucaucagucauaacuucucuaggcgcaaucgucucauguuacggcaaaacaaaauguaccgcaucaaacaaaaaucgagguauaauaaaaaccuuuucuaacggcugcgacuacguaucaaacaaaggaguagauacuguaagugucggaaacacauuauacugcgucaacaaacaagaaggacaaucccuauauguuaaaggcgaaccuaucauuaauuucuacgacccacucgucuuuccauccgacgaauuugacgcaucaauuucccaaguaaaugaaaaaauaaaccaaucccuugcauucauaagaaaaucagaugaacuauuacacaacguaaacgcaggcaaaucaacaacaaauauaaugaucacaacaauaauaaucguaauaauaguaauccuacucucacuaauagcaguaggcuuacuauuauauugcaaagccagauaaggacuaguaauaaggaaacuguaugaaugucugugggcaggaagugaagagauccuucuguaaagguuuuuggaauuaugucugcugaauaauaaacuuuuuugaaauaauaaaucugguagaaaaaugagaucuaaaaaaaaaaaaaaaaaaaaaaaaaaaaaaaaaaaaaaaaaaaaaaaaaaaaaaaaaaaaaaaaugcaucccccccccccccccccccccccccccccccaaaggcucuuuucagagccaccagaauu

SEQ ID NO: 3071 - RNA, 1982 nt, Artificial Sequence
  mRNA product Design h-4 comprising derived and/or modified sequence from HRSV(A2)__F-del_DSCav1_mut2 (opt11)
gggagagggcgcuuggcuugcaaggacccugagcugcggcauugaagcacacccaacccaacucgacugaagucagccucacugaaccggaucugagaaucuucucucucugggcuugccagggcucuccgaaccuagcuagcauccucuucaauuccaacuagaaagcuuaccauggaacuucuuauccuaaaagcgaacgccauaaccacaauccuaacagcagucaccuucuguuucgccucaggacaaaacaucaccgaggaauuuuaccaauccacauguagcgcugucucaaaaggcuaccucggcgcccuccgaaccggcugguacacauccguaauaacgaucgaacucuccaacauaaaagaaaauaaaugcaacggcaccgacgccaaagucaaacuuaucaaacaagaacuagacaaauacaaaaacgccgucaccgaccuccagcuccucaugcaauccaccccagcaacaggcuccggaagcgcaaucugcucaggcgucgccguaugcaaaguacuccaccucgaaggagaagucaacaaaaucaaauccgcccuccuauccacaaacaaagcaguugucucacucuccaacgggguaagcguacugaccuucaaaguccuagaccucaaaaacuacaucgauaaacaacuccuuccaauccucaacaaacaaucaugcucuauccccaacaucgaaaccguaaucgaauuucaacaaaaaaacaaccgccuacuugaaaucacacgcgaauuuagcgucaacgcaggaguaacaacacccguguccacauauaugcucacgaacagcgaacuacuaucccugauuaacgacaugcccaucaccaacgaccaaaaaaaacuaaugagcaacaacguacaaaucguccgccaacaaagcuacucuauaaugugcaucaucaaggaagaaguccuagccuacgucguccaauuaccacucuacggcgucaucgacacacccugcuggaaacuccauacauccccccucugcaccaccaacaccaaagaaggguccaacauaugccucacucgcacagaccgcggcugguacugcgacaacgcuggcagcgucagcuucuucccccaggccgaaaccugcaaaguccaauccaacagagucuucugcgacaccaugaacucgcucacccuccccuccgaggucaaccucugcaacgucgacauauucaaccccaaauacgacugcaaaaucaugaccuccaaaaccgacgucagcucaucagucaucacaucccucggggccaucgucuccugcuacggcaaaaccaagugcaccgccucaaacaaaaaccgcggcauuaucaaaacauucuccaacggcugcgacuacgucuccaacaaaggcgucgacacagucuccgucgguaacacccucuacugcguaaauaaacaagaaggccaaucccucuacgucaaaggcgaacccaucaucaacuucuacgacccucucgucuuccccuccgacgaauuugacgccucaaucagccaaguuaacgaaaaaaucaaccaaucacucgccuucauccgcaaauccgacgaacuccuccacaacguuaacgccggcaaaucuaccacgaacaucaugaucaccaccauaaucaucguaauuaucguaauacuccuaucccucauagcaguaggccuccuacucuacugcaaagcccguuaaggacuaguaauaaggaaacuguaugaaugucugugggcaggaagugaagagauccuucuguaaagguuuuuggaauuaugucugcugaauaauaaacuuuuuugaaauaauaaaucugguagaaaaaugagaucuaaaaaaaaaaaaaaaaaaaaaaaaaaaaaaaaaaaaaaaaaaaaaaaaaaaaaaaaaaaaaaaaugcaucccccccccccccccccccccccccccccccaaaggcucuuuucagagccaccagaauu

SEQ ID NO: 3072 - RNA, 1998 nt, Artificial Sequence
  mRNA product Design h-5 comprising derived and/or modified sequence from HRSV(A2)__F-del_DSCav1_mut2 (opt1)
gggagagggcgcuuggcuugcaaggacccugagcugcggcauugaagcacacccaacccaacucgacugaagucagccucacugaaccggaucugagaaucuucucucucugggcuugccagggcucuccgaaccuagcuagcauccucuucaauuccaacuagaaagcuuaccauggagcugcucauccugaaggccaacgccaucaccaccauccugacggcggugaccuucugcuucgccagcggccagaacaucaccgaggaguucuaccaguccacgugcagcgccgucuccaagggguaccucggcgcccugcggaccggcugguacaccuccgugaucaccaucgagcugagcaacaucaaggagaacaagugcaacgggaccgacgccaaggugaagcucaucaagcaggagcuggacaaguacaagaacgcggucacggaccugcagcuccugaugcaguccaccccggcaaccggcuccggcuccgccaucugcagcggcgucgccgugugcaaggugcugcaccucgagggggaggucaacaagaucaagagcgcccugcuguccaccaacaaggccguggugagccucuccaacggcgucagcgugcugaccuucaaggugcuggaccucaagaacuacaucgacaagcagcugcugcccauccugaacaagcagagcugcuccauccccaacaucgagacggugaucgaguuccagcagaagaacaaccggcuccuggagaucacccgcgaguucagcgugaacgccggggucaccacccccguguccacguacaugcugaccaacagcgagcuccugucccugaucaacgacaugccgaucaccaacgaccagaagaagcucaugagcaacaacgugcagaucguccggcagcaguccuacagcaucaugugcaucaucaaggaggaggugcuggcguacgugguccagcugccccucuacggcgugaucgacacccccugcuggaagcugcacacgagcccccugugcaccaccaacaccaaggagggguccaacaucugccucacgcgcaccgaccggggcugguacugcgacaacgccggcagcgucuccuucuucccgcaggccgagaccugcaaggugcagagcaaccgcguguucugcgacaccaugaacucccugacgcugcccagcgagguaaaccucugcaacgucgacaucuucaaccccaaguacgacugcaagaucaugaccuccaagaccgacgugagcuccagcgugaucaccucccugggggccaucgucagcugcuacggcaagacgaagugcaccgccagcaacaagaaccgggggaucaucaagaccuucuccaacggcugcgacuacgugagcaacaagggcguggacaccguguccgucgggaacacccuguacugcgugaacaagcaggagggccagagccucuacgugaagggggagcccaucaucaacuucuacgacccgcuggucuuccccuccgacgaguucgacgcgagcaucucccaggugaacgagaagaucaaccagagccuggccuucauccgcaaguccgacgagcugcuccacaacgugaacgccggcaagagcacgaccaacaucaugaucaccaccaucaucaucgucaucaucgugauccugcugucccucaucgccguggggcugcugcucuacugcaaggcccggugaggacuaguacuggcugcaucucccuuuccucuguccuccauccuucucccaggauggugaagggggaccugguacccagugauccccaccccaggauccuaaaucaugacuuaccugcuaauaaaaacucauuggaaaagugagaagaucuaaaaaaaaaaaaaaaaaaaaaaaaaaaaaaaaaaaaaaaaaaaaaaaaaaaaaaaaaaaaaaaaugcaucccccccccccccccccccccccccccccccaaaggcucuuuucagagccaccagaauu

SEQ ID NO: 3073 - RNA, 1998 nt, Artificial Sequence
  mRNA product Design h-5 comprising derived and/or modified sequence from HRSV(A2)__F-del_DSCav1_mut2 (opt1)
gggagagggcgcuuggcuugcaaggacccugagcugcggcauugaagcacacccaacccaacucgacugaagucagccucacugaaccggaucugagaaucuucucucucugggcuugccagggcucuccgaaccuagcuagcauccucuucaauuccaacuagaaagcuuaccauggagcugcucauccugaaggccaacgccaucaccaccauccugacggcggugaccuucugcuucgccagcggccagaacaucaccgaggaguucuaccaguccacgugcagcgccgucuccaagggguaccucggcgcccugcgcaccgggugguacaccagcgugaucaccaucgagcuguccaacaucaaggagaacaagugcaacggcaccgacgccaaggugaagcucaucaagcaggagcuggacaaguacaagaacgcggucacggaccugcagcuccugaugcagagcacccccgccaccggguccggcagcgccaucugcuccggcguggccgugugcaagguccugcaccucgagggggaggugaacaagaucaagagcgcgcugcuguccaccaacaaggccguggucagccucuccaacggcgugagcgugcugacguucaagguccuggaccucaagaacuacaucgacaagcagcugcugccgauccucaacaagcaguccugcagcauccccaacaucgagaccgugaucgaguuccagcagaagaacaaccggcugcuggagaucacccgcgaguucuccgugaacgccggggucaccacgcccgugagcaccuacaugcucaccaacuccgagcugcugagccucaucaacgacaugcccaucaccaacgaccagaagaagcugaugagcaacaacgugcagaucguccggcagcaguccuacagcaucaugugcaucaucaaggaggaggugcuggccuacgugguccagcucccgcuguacggcgugaucgacacgcccugcuggaagcugcacaccagcccccucugcaccaccaacacgaaggagggguccaacaucugccugacccgcaccgaccggggcugguacugcgacaacgccggcuccgugagcuucuucccccaggcggagaccugcaagguccaguccaaccgcguguucugcgacacgaugaacagccugacccucccguccgaggucaaccugugcaacguggacaucuucaaccccaaguacgacugcaagaucaugaccagcaagaccgacguguccagcuccgucaucacgagccugggggccaucguguccugcuacggcaagaccaagugcaccgccagcaacaagaaccgggggaucaucaagaccuucuccaacggcugcgacuacgugagcaacaagggcgucgacacgguguccguggggaacacccucuacugcgucaacaagcaggagggccagagccuguacgugaagggggagcccaucaucaacuucuacgacccccugguguucccgagcgacgaguucgacgccuccaucagccaggucaacgagaagaucaaccagucccucgccuucauccgcaagagcgacgagcugcugcacaacgugaacgcgggcaaguccaccaccaacaucaugaucaccacgaucaucaucgugaucaucgucauccuccugagccugaucgccguggggcuccugcuguacugcaaggcccggugaggacuaguacuggcugcaucucccuuuccucuguccuccauccuucucccaggauggugaagggggaccugguacccagugauccccaccccaggauccuaaaucaugacuuaccugcuaauaaaaacucauuggaaaagugagaagaucuaaaaaaaaaaaaaaaaaaaaaaaaaaaaaaaaaaaaaaaaaaaaaaaaaaaaaaaaaaaaaaaaugcaucccccccccccccccccccccccccccccccaaaggcucuuuucagagccaccagaauu

SEQ ID NO: 3074 - RNA, 1998 nt, Artificial Sequence
  mRNA product Design h-5 comprising derived and/or modified sequence from HRSV(A2)__F-del_DSCav1_mut2 (opt2)
gggagagggcgcuuggcuugcaaggacccugagcugcggcauugaagcacacccaacccaacucgacugaagucagccucacugaaccggaucugagaaucuucucucucugggcuugccagggcucuccgaaccuagcuagcauccucuucaauuccaacuagaaagcuuaccauggagcuccucauccucaaggccaacgccaucaccaccauccucaccgccgucaccuucugcuucgccuccggccagaacaucaccgaggaguucuaccaguccaccugcuccgccgucuccaagggcuaccucggcgcccuccgcaccggcugguacaccuccgucaucaccaucgagcucuccaacaucaaggagaacaagugcaacggcaccgacgccaaggucaagcucaucaagcaggagcucgacaaguacaagaacgccgucaccgaccuccagcuccucaugcaguccacccccgccaccggcuccggcuccgccaucugcuccggcgucgccgucugcaagguccuccaccucgagggcgaggucaacaagaucaaguccgcccuccucuccaccaacaaggccgucgucucccucuccaacggcgucuccguccucaccuucaagguccucgaccucaagaacuacaucgacaagcagcuccuccccauccucaacaagcaguccugcuccauccccaacaucgagaccgucaucgaguuccagcagaagaacaaccgccuccucgagaucacccgcgaguucuccgucaacgccggcgucaccacccccgucuccaccuacaugcucaccaacuccgagcuccucucccucaucaacgacaugcccaucaccaacgaccagaagaagcucauguccaacaacguccagaucguccgccagcaguccuacuccaucaugugcaucaucaaggaggagguccucgccuacgucguccagcucccccucuacggcgucaucgacacccccugcuggaagcuccacaccuccccccucugcaccaccaacaccaaggagggcuccaacaucugccucacccgcaccgaccgcggcugguacugcgacaacgccggcuccgucuccuucuucccccaggccgagaccugcaagguccaguccaaccgcgucuucugcgacaccaugaacucccucacccuccccuccgaggucaaccucugcaacgucgacaucuucaaccccaaguacgacugcaagaucaugaccuccaagaccgacgucuccuccuccgucaucaccucccucggcgccaucgucuccugcuacggcaagaccaagugcaccgccuccaacaagaaccgcggcaucaucaagaccuucuccaacggcugcgacuacgucuccaacaagggcgucgacaccgucuccgucggcaacacccucuacugcgucaacaagcaggagggccagucccucuacgucaagggcgagcccaucaucaacuucuacgacccccucgucuuccccuccgacgaguucgacgccuccaucucccaggucaacgagaagaucaaccagucccucgccuucauccgcaaguccgacgagcuccuccacaacgucaacgccggcaaguccaccaccaacaucaugaucaccaccaucaucaucgucaucaucgucauccuccucucccucaucgccgucggccuccuccucuacugcaaggcccgcugaggacuaguacuggcugcaucucccuuuccucuguccuccauccuucucccaggauggugaagggggaccugguacccagugauccccaccccaggauccuaaaucaugacuuaccugcuaauaaaaacucauuggaaaagugagaagaucuaaaaaaaaaaaaaaaaaaaaaaaaaaaaaaaaaaaaaaaaaaaaaaaaaaaaaaaaaaaaaaaaugcaucccccccccccccccccccccccccccccccaaaggcucuuuucagagccaccagaauu

SEQ ID NO: 3075 - RNA, 1998 nt, Artificial Sequence
  mRNA product Design h-5 comprising derived and/or modified sequence from HRSV(A2)__F-del_DSCav1_mut2 (opt3)
gggagagggcgcuuggcuugcaaggacccugagcugcggcauugaagcacacccaacccaacucgacugaagucagccucacugaaccggaucugagaaucuucucucucugggcuugccagggcucuccgaaccuagcuagcauccucuucaauuccaacuagaaagcuuaccauggagcugcucauccuuaaggccaacgcuauuaccacaauacugacugcagugacguucugcuuugccagcggccagaauaucaccgaagaguucuaccaauccacauguucugcggucucaaaaggguauuugggagcuuuaagaacugguugguacaccaguguuauuacaaucgaacugagcaacauuaaggagaauaaaugcaacggcaccgacgccaaggugaaacuaaucaagcaggaacucgauaaguauaaaaaugcaguaacugaccugcagcuucugaugcaguccacacccgccaccgggucuggaucggcuauauguucaggcguggcagucugcaagguguugcaccucgagggugagguuaacaaaaucaagagcgcccugcugaguacgaauaaagcuguggucucccucucuaacggggugagcguauuaacuuuuaagguucuggaucuuaagaauuacauugacaaacaauugcugccuauccuaaacaagcaguccuguucaauuccaaauaucgaaaccgugauagaguuccagcagaaaaacaauaggcuccuggaaauuacacgggaguuuagugucaacgccggagugacuaccccggugagcacauauaugcuuaccaauucugagcuguugucccucaucaacgauaugcccauuacgaacgaccaaaagaaacugaugucaaauaacguccagaucguucgccagcagagcuacaguaucaugugcauuauaaaggaagagguguuagcguauguagugcaacugccucucuacggcgucaucgauacuccauguuggaaacuucauacaucuccccugugcaccacuaauacaaaggaaggcuccaacauuuguuugacccgaacggaccgugggugguacugcgauaaugcaggaagcgugucguucuuuccucaggccgagaccuguaagguucagucuaacagaguguucugcgacacaaugaacucccuaacucugccaucagaagucaaucucugcaauguggauaucuuuaaccccaaauaugacuguaagauaaugaccaguaaaacagauguaagcuccucuguuauuacuagccugggugcuaucgugucaugcuacggcaagaccaaauguacagccaguaauaagaacagggggaucauuaagaccuucuccaauggaugcgacuaugucagcaacaaaggcguggacacugucucuguggguaauacgcuuuacuguguuaacaagcaagaggggcagucacuguaugugaaaggagagccuaucauuaacuuuuacgauccauugguauucccgagugacgaauuugaugcaagcauaucccaggucaaugagaagaucaaccagucucucgcuuucauucggaaaucggacgaacuguuacacaaugugaacgccggcaagagcacaaccaauaucaugaucacuaccauuauaaucguuauuaucgugauucugcuaucccucaucgcggucggccugcuuuuguauugcaaggcccgcugaggacuaguacuggcugcaucucccuuuccucuguccuccauccuucucccaggauggugaagggggaccugguacccagugauccccaccccaggauccuaaaucaugacuuaccugcuaauaaaaacucauuggaaaagugagaagaucuaaaaaaaaaaaaaaaaaaaaaaaaaaaaaaaaaaaaaaaaaaaaaaaaaaaaaaaaaaaaaaaaugcaucccccccccccccccccccccccccccccccaaaggcucuuuucagagccaccagaauu

SEQ ID NO: 3076 - RNA, 1998 nt, Artificial Sequence
  mRNA product Design h-5 comprising derived and/or modified sequence from HRSV(A2)__F-del_DSCav1_mut2 (opt4)
gggagagggcgcuuggcuugcaaggacccugagcugcggcauugaagcacacccaacccaacucgacugaagucagccucacugaaccggaucugagaaucuucucucucugggcuugccagggcucuccgaaccuagcuagcauccucuucaauuccaacuagaaagcuuaccauggagcugcugauccugaaggccaacgccaucaccaccauccugaccgccgugaccuucugcuucgccagcggccagaacaucaccgaggaguucuaccagagcaccugcagcgccgugagcaagggcuaccugggcgcccugagaaccggcugguacaccagcgugaucaccaucgagcugagcaacaucaaggagaacaagugcaacggcaccgacgccaaggugaagcugaucaagcaggagcuggacaaguacaagaacgccgugaccgaccugcagcugcugaugcagagcacccccgccaccggcagcggcagcgccaucugcagcggcguggccgugugcaaggugcugcaccuggagggcgaggugaacaagaucaagagcgcccugcugagcaccaacaaggccguggugagccugagcaacggcgugagcgugcugaccuucaaggugcuggaccugaagaacuacaucgacaagcagcugcugcccauccugaacaagcagagcugcagcauccccaacaucgagaccgugaucgaguuccagcagaagaacaacagacugcuggagaucaccagagaguucagcgugaacgccggcgugaccacccccgugagcaccuacaugcugaccaacagcgagcugcugagccugaucaacgacaugcccaucaccaacgaccagaagaagcugaugagcaacaacgugcagaucgugagacagcagagcuacagcaucaugugcaucaucaaggaggaggugcuggccuacguggugcagcugccccuguacggcgugaucgacacccccugcuggaagcugcacaccagcccccugugcaccaccaacaccaaggagggcagcaacaucugccugaccagaaccgacagaggcugguacugcgacaacgccggcagcgugagcuucuucccccaggccgagaccugcaaggugcagagcaacagaguguucugcgacaccaugaacagccugacccugcccagcgaggugaaccugugcaacguggacaucuucaaccccaaguacgacugcaagaucaugaccagcaagaccgacgugagcagcagcgugaucaccagccugggcgccaucgugagcugcuacggcaagaccaagugcaccgccagcaacaagaacagaggcaucaucaagaccuucagcaacggcugcgacuacgugagcaacaagggcguggacaccgugagcgugggcaacacccuguacugcgugaacaagcaggagggccagagccuguacgugaagggcgagcccaucaucaacuucuacgacccccugguguuccccagcgacgaguucgacgccagcaucagccaggugaacgagaagaucaaccagagccuggccuucaucagaaagagcgacgagcugcugcacaacgugaacgccggcaagagcaccaccaacaucaugaucaccaccaucaucaucgugaucaucgugauccugcugagccugaucgccgugggccugcugcuguacugcaaggccagaugaggacuaguacuggcugcaucucccuuuccucuguccuccauccuucucccaggauggugaagggggaccugguacccagugauccccaccccaggauccuaaaucaugacuuaccugcuaauaaaaacucauuggaaaagugagaagaucuaaaaaaaaaaaaaaaaaaaaaaaaaaaaaaaaaaaaaaaaaaaaaaaaaaaaaaaaaaaaaaaaugcaucccccccccccccccccccccccccccccccaaaggcucuuuucagagccaccagaauu

SEQ ID NO: 3077 - RNA, 1998 nt, Artificial Sequence
  mRNA product Design h-5 comprising derived and/or modified sequence from HRSV(A2)__F-del_DSCav1_mut2 (opt5)
gggagagggcgcuuggcuugcaaggacccugagcugcggcauugaagcacacccaacccaacucgacugaagucagccucacugaaccggaucugagaaucuucucucucugggcuugccagggcucuccgaaccuagcuagcauccucuucaauuccaacuagaaagcuuaccauggagcugcucauccugaaggccaacgcuauuaccacaauccuuacggccgugaccuucugcuuugcgagcggccagaauauuacagaagaguucuaccaauccaccuguucugcugucagcaaaggguaucugggagcccucagaacaggcugguacaccuccguuaucacaauugaacugucuaacaucaaggagaauaaaugcaacgggaccgacgccaaggugaaacuuaucaagcaggaacuggauaaguauaaaaaugcugugacggaccuccagcugcugaugcagagcacccccgccacaggauccggcucugcuauuuguagcggggucgccgugugcaagguucuccaccuggagggagaggugaacaaaaucaaguccgcgcuucugagcaccaauaaagccgucgugucucucuccaacggcguuagcgugcugacauuuaagguccuugaucugaagaauuacauugacaaacaacuccugccuauccugaacaagcagucuuguuccauuccgaauaucgaaaccgugauugaguuccagcagaaaaacaaucggcuccuggaaaucacgcgcgaguuuagcgugaacgcuggcgucacaacccccguuucuacauauaugcuuaccaauuccgagcugcucagccugaucaacgauaugccuauuaccaacgaccaaaagaaacuuauguccaauaacgugcagaucgugagacagcagucuuacagcauuaugugcaucauuaaggaagagguccuggccuaugugguucaacucccccuguacggggugaucgauacaccuuguuggaaacugcauacgagcccccucugcaccacaaauaccaaggaaggauccaacaucugucugacacggaccgaccgcggcugguacugcgauaaugcugggucugucuccuucuuuccucaggccgagacguguaaggugcagagcaacagaguuuucugcgacacaaugaacucucuuacccugccgagcgaagugaaucucugcaaugucgauauuuuuaaccccaaauaugacuguaagaucaugaccuccaaaacagaugugucuagcuccgucauuaccagccugggagcgaucgugucuugcuacggcaagacaaaauguacggccuccaauaagaaccgggggauuaucaagaccuucagcaauggaugcgacuauguuucuaacaaaggcguggacacagucuccgugggcaauacccuuuacuguguuaacaagcaagaggggcagagccuguaugugaaaggagagccuaucauuaacuuuuacgauccccucgucuucccuuccgacgaauuugaugcuucuaucagccaggugaaugagaagauuaaccagucccuggccuucauccgcaaaucugacgaacugcuccacaaugugaacgcuggcaagagcacaaccaauauuaugaucacgaccauuaucaucguuauuaucgucauucugcuuucccugaucgccguggggcuccugcuguauugcaaggccagaugaggacuaguacuggcugcaucucccuuuccucuguccuccauccuucucccaggauggugaagggggaccugguacccagugauccccaccccaggauccuaaaucaugacuuaccugcuaauaaaaacucauuggaaaagugagaagaucuaaaaaaaaaaaaaaaaaaaaaaaaaaaaaaaaaaaaaaaaaaaaaaaaaaaaaaaaaaaaaaaaugcaucccccccccccccccccccccccccccccccaaaggcucuuuucagagccaccagaauu

SEQ ID NO: 3078 - RNA, 1998 nt, Artificial Sequence
  mRNA product Design h-5 comprising derived and/or modified sequence from HRSV(A2)__F-del_DSCav1_mut2 (opt6)
gggagagggcgcuuggcuugcaaggacccugagcugcggcauugaagcacacccaacccaacucgacugaagucagccucacugaaccggaucugagaaucuucucucucugggcuugccagggcucuccgaaccuagcuagcauccucuucaauuccaacuagaaagcuuaccauggaacuccuaauacuuaaagccaaugcaauaaccacaauacuaacagcaguaacauucugcuuugcaucaggacaaaacauaacagaagaauuuuaccaaucaacauguucagcaguaagcaaaggauaccuaggagccuuacgcacagguugguacacuuccguaauaacaauagaacucucaaauauaaaagaaaacaaaugcaacggaaccgaugcaaaaguaaaacuaauaaaacaagaauuagacaaauacaaaaacgcaguaacagaccuacaauuacuuaugcaaucaacacccgcaacaggauccggcucagcaaucuguucaggaguagcaguaugcaaaguucuccaccuagaaggcgaaguaaacaaaauaaaaucagcccuauuaucuaccaauaaagcaguaguaucacuaucaaauggaguaucuguccuaaccuucaaaguacuugaccuaaaaaauuacaucgacaaacaauuacuaccaauacuuaacaaacaaucauguucaauaccaaacauugaaacaguaauagaauuucaacaaaaaaauaacagauuauuagaaauaacccgcgaauuuucaguuaacgcaggaguaacaacaccaguauccacauacauguuaacaaauucagaacucuuaucacuuauaaacgacaugcccauaacaaacgaccaaaaaaaacucaugucuaacaauguucaaauaguucgacaacaaucauacuccauaaugugcauaauaaaagaagaaguucuagcauauguuguacaacucccacucuaugguguuauagacacaccaugcuggaaacuacauacaagccccuuaugcacuacaaacacaaaagaaggcucuaauauaugucuaacccgcacagacagaggcugguauugcgauaacgcagguucaguaucauucuuuccacaagcagaaacuugcaaaguccaauccaauagagucuucugcgacacuaugaacucacucacacucccaucugaagucaauuuauguaacgucgauaucuucaacccaaaauacgacugcaaaauaaugaccucaaaaacagacguaagcucaucagucauaacuucucuaggcgcaaucgucucauguuacggcaaaacaaaauguaccgcaucaaacaaaaaucgagguauaauaaaaaccuuuucuaacggcugcgacuacguaucaaacaaaggaguagauacuguaagugucggaaacacauuauacugcgucaacaaacaagaaggacaaucccuauauguuaaaggcgaaccuaucauuaauuucuacgacccacucgucuuuccauccgacgaauuugacgcaucaauuucccaaguaaaugaaaaaauaaaccaaucccuugcauucauaagaaaaucagaugaacuauuacacaacguaaacgcaggcaaaucaacaacaaauauaaugaucacaacaauaauaaucguaauaauaguaauccuacucucacuaauagcaguaggcuuacuauuauauugcaaagccagauaaggacuaguacuggcugcaucucccuuuccucuguccuccauccuucucccaggauggugaagggggaccugguacccagugauccccaccccaggauccuaaaucaugacuuaccugcuaauaaaaacucauuggaaaagugagaagaucuaaaaaaaaaaaaaaaaaaaaaaaaaaaaaaaaaaaaaaaaaaaaaaaaaaaaaaaaaaaaaaaaugcaucccccccccccccccccccccccccccccccaaaggcucuuuucagagccaccagaauu

SEQ ID NO: 3079 - RNA, 1998 nt, Artificial Sequence
  mRNA product Design h-5 comprising derived and/or modified sequence from HRSV(A2)__F-del_DSCav1_mut2 (opt11)
gggagagggcgcuuggcuugcaaggacccugagcugcggcauugaagcacacccaacccaacucgacugaagucagccucacugaaccggaucugagaaucuucucucucugggcuugccagggcucuccgaaccuagcuagcauccucuucaauuccaacuagaaagcuuaccauggaacuucuuauccuaaaagcgaacgccauaaccacaauccuaacagcagucaccuucuguuucgccucaggacaaaacaucaccgaggaauuuuaccaauccacauguagcgcugucucaaaaggcuaccucggcgcccuccgaaccggcugguacacauccguaauaacgaucgaacucuccaacauaaaagaaaauaaaugcaacggcaccgacgccaaagucaaacuuaucaaacaagaacuagacaaauacaaaaacgccgucaccgaccuccagcuccucaugcaauccaccccagcaacaggcuccggaagcgcaaucugcucaggcgucgccguaugcaaaguacuccaccucgaaggagaagucaacaaaaucaaauccgcccuccuauccacaaacaaagcaguugucucacucuccaacgggguaagcguacugaccuucaaaguccuagaccucaaaaacuacaucgauaaacaacuccuuccaauccucaacaaacaaucaugcucuauccccaacaucgaaaccguaaucgaauuucaacaaaaaaacaaccgccuacuugaaaucacacgcgaauuuagcgucaacgcaggaguaacaacacccguguccacauauaugcucacgaacagcgaacuacuaucccugauuaacgacaugcccaucaccaacgaccaaaaaaaacuaaugagcaacaacguacaaaucguccgccaacaaagcuacucuauaaugugcaucaucaaggaagaaguccuagccuacgucguccaauuaccacucuacggcgucaucgacacacccugcuggaaacuccauacauccccccucugcaccaccaacaccaaagaaggguccaacauaugccucacucgcacagaccgcggcugguacugcgacaacgcuggcagcgucagcuucuucccccaggccgaaaccugcaaaguccaauccaacagagucuucugcgacaccaugaacucgcucacccuccccuccgaggucaaccucugcaacgucgacauauucaaccccaaauacgacugcaaaaucaugaccuccaaaaccgacgucagcucaucagucaucacaucccucggggccaucgucuccugcuacggcaaaaccaagugcaccgccucaaacaaaaaccgcggcauuaucaaaacauucuccaacggcugcgacuacgucuccaacaaaggcgucgacacagucuccgucgguaacacccucuacugcguaaauaaacaagaaggccaaucccucuacgucaaaggcgaacccaucaucaacuucuacgacccucucgucuuccccuccgacgaauuugacgccucaaucagccaaguuaacgaaaaaaucaaccaaucacucgccuucauccgcaaauccgacgaacuccuccacaacguuaacgccggcaaaucuaccacgaacaucaugaucaccaccauaaucaucguaauuaucguaauacuccuaucccucauagcaguaggccuccuacucuacugcaaagcccguuaaggacuaguacuggcugcaucucccuuuccucuguccuccauccuucucccaggauggugaagggggaccugguacccagugauccccaccccaggauccuaaaucaugacuuaccugcuaauaaaaacucauuggaaaagugagaagaucuaaaaaaaaaaaaaaaaaaaaaaaaaaaaaaaaaaaaaaaaaaaaaaaaaaaaaaaaaaaaaaaaugcaucccccccccccccccccccccccccccccccaaaggcucuuuucagagccaccagaauu

SEQ ID NO: 3080 - RNA, 1931 nt, Artificial Sequence
  mRNA product Design i-1 comprising derived and/or modified sequence from HRSV(A2)__F-del_DSCav1_mut2 (opt1)
gggagagggcgcuuggcuugcaaggacccugagcugcggcauugaagcacacccaacccaacucgacugaagucagccucacugaaccggaucugagaaucuucucucucugggcuugccagggcucuccgaaccuagcuagcauccucuucaauuccaacuagaaagcuuaccauggagcugcucauccugaaggccaacgccaucaccaccauccugacggcggugaccuucugcuucgccagcggccagaacaucaccgaggaguucuaccaguccacgugcagcgccgucuccaagggguaccucggcgcccugcggaccggcugguacaccuccgugaucaccaucgagcugagcaacaucaaggagaacaagugcaacgggaccgacgccaaggugaagcucaucaagcaggagcuggacaaguacaagaacgcggucacggaccugcagcuccugaugcaguccaccccggcaaccggcuccggcuccgccaucugcagcggcgucgccgugugcaaggugcugcaccucgagggggaggucaacaagaucaagagcgcccugcuguccaccaacaaggccguggugagccucuccaacggcgucagcgugcugaccuucaaggugcuggaccucaagaacuacaucgacaagcagcugcugcccauccugaacaagcagagcugcuccauccccaacaucgagacggugaucgaguuccagcagaagaacaaccggcuccuggagaucacccgcgaguucagcgugaacgccggggucaccacccccguguccacguacaugcugaccaacagcgagcuccugucccugaucaacgacaugccgaucaccaacgaccagaagaagcucaugagcaacaacgugcagaucguccggcagcaguccuacagcaucaugugcaucaucaaggaggaggugcuggcguacgugguccagcugccccucuacggcgugaucgacacccccugcuggaagcugcacacgagcccccugugcaccaccaacaccaaggagggguccaacaucugccucacgcgcaccgaccggggcugguacugcgacaacgccggcagcgucuccuucuucccgcaggccgagaccugcaaggugcagagcaaccgcguguucugcgacaccaugaacucccugacgcugcccagcgagguaaaccucugcaacgucgacaucuucaaccccaaguacgacugcaagaucaugaccuccaagaccgacgugagcuccagcgugaucaccucccugggggccaucgucagcugcuacggcaagacgaagugcaccgccagcaacaagaaccgggggaucaucaagaccuucuccaacggcugcgacuacgugagcaacaagggcguggacaccguguccgucgggaacacccuguacugcgugaacaagcaggagggccagagccucuacgugaagggggagcccaucaucaacuucuacgacccgcuggucuuccccuccgacgaguucgacgcgagcaucucccaggugaacgagaagaucaaccagagccuggccuucauccgcaaguccgacgagcugcuccacaacgugaacgccggcaagagcacgaccaacaucaugaucaccaccaucaucaucgucaucaucgugauccugcugucccucaucgccguggggcugcugcucuacugcaaggcccggugaggacuaguguccaccugucccuccugggcugcuggauugucucguuuuccugccaaauaaacaggaucagcgcuuuacagaucuaaaaaaaaaaaaaaaaaaaaaaaaaaaaaaaaaaaaaaaaaaaaaaaaaaaaaaaaaaaaaaaaugcaucccccccccccccccccccccccccccccccaaaggcucuuuucagagccaccagaauu

SEQ ID NO: 3081 - RNA, 1931 nt, Artificial Sequence
  mRNA product Design i-1 comprising derived and/or modified sequence from HRSV(A2)__F-del_DSCav1_mut2 (opt1)
gggagagggcgcuuggcuugcaaggacccugagcugcggcauugaagcacacccaacccaacucgacugaagucagccucacugaaccggaucugagaaucuucucucucugggcuugccagggcucuccgaaccuagcuagcauccucuucaauuccaacuagaaagcuuaccauggagcugcucauccugaaggccaacgccaucaccaccauccugacggcggugaccuucugcuucgccagcggccagaacaucaccgaggaguucuaccaguccacgugcagcgccgucuccaagggguaccucggcgcccugcgcaccgggugguacaccagcgugaucaccaucgagcuguccaacaucaaggagaacaagugcaacggcaccgacgccaaggugaagcucaucaagcaggagcuggacaaguacaagaacgcggucacggaccugcagcuccugaugcagagcacccccgccaccggguccggcagcgccaucugcuccggcguggccgugugcaagguccugcaccucgagggggaggugaacaagaucaagagcgcgcugcuguccaccaacaaggccguggucagccucuccaacggcgugagcgugcugacguucaagguccuggaccucaagaacuacaucgacaagcagcugcugccgauccucaacaagcaguccugcagcauccccaacaucgagaccgugaucgaguuccagcagaagaacaaccggcugcuggagaucacccgcgaguucuccgugaacgccggggucaccacgcccgugagcaccuacaugcucaccaacuccgagcugcugagccucaucaacgacaugcccaucaccaacgaccagaagaagcugaugagcaacaacgugcagaucguccggcagcaguccuacagcaucaugugcaucaucaaggaggaggugcuggccuacgugguccagcucccgcuguacggcgugaucgacacgcccugcuggaagcugcacaccagcccccucugcaccaccaacacgaaggagggguccaacaucugccugacccgcaccgaccggggcugguacugcgacaacgccggcuccgugagcuucuucccccaggcggagaccugcaagguccaguccaaccgcguguucugcgacacgaugaacagccugacccucccguccgaggucaaccugugcaacguggacaucuucaaccccaaguacgacugcaagaucaugaccagcaagaccgacguguccagcuccgucaucacgagccugggggccaucguguccugcuacggcaagaccaagugcaccgccagcaacaagaaccgggggaucaucaagaccuucuccaacggcugcgacuacgugagcaacaagggcgucgacacgguguccguggggaacacccucuacugcgucaacaagcaggagggccagagccuguacgugaagggggagcccaucaucaacuucuacgacccccugguguucccgagcgacgaguucgacgccuccaucagccaggucaacgagaagaucaaccagucccucgccuucauccgcaagagcgacgagcugcugcacaacgugaacgcgggcaaguccaccaccaacaucaugaucaccacgaucaucaucgugaucaucgucauccuccugagccugaucgccguggggcuccugcuguacugcaaggcccggugaggacuaguguccaccugucccuccugggcugcuggauugucucguuuuccugccaaauaaacaggaucagcgcuuuacagaucuaaaaaaaaaaaaaaaaaaaaaaaaaaaaaaaaaaaaaaaaaaaaaaaaaaaaaaaaaaaaaaaaugcaucccccccccccccccccccccccccccccccaaaggcucuuuucagagccaccagaauu

SEQ ID NO: 3082 - RNA, 1931 nt, Artificial Sequence
  mRNA product Design i-1 comprising derived and/or modified sequence from HRSV(A2)__F-del_DSCav1_mut2 (opt2)
gggagagggcgcuuggcuugcaaggacccugagcugcggcauugaagcacacccaacccaacucgacugaagucagccucacugaaccggaucugagaaucuucucucucugggcuugccagggcucuccgaaccuagcuagcauccucuucaauuccaacuagaaagcuuaccauggagcuccucauccucaaggccaacgccaucaccaccauccucaccgccgucaccuucugcuucgccuccggccagaacaucaccgaggaguucuaccaguccaccugcuccgccgucuccaagggcuaccucggcgcccuccgcaccggcugguacaccuccgucaucaccaucgagcucuccaacaucaaggagaacaagugcaacggcaccgacgccaaggucaagcucaucaagcaggagcucgacaaguacaagaacgccgucaccgaccuccagcuccucaugcaguccacccccgccaccggcuccggcuccgccaucugcuccggcgucgccgucugcaagguccuccaccucgagggcgaggucaacaagaucaaguccgcccuccucuccaccaacaaggccgucgucucccucuccaacggcgucuccguccucaccuucaagguccucgaccucaagaacuacaucgacaagcagcuccuccccauccucaacaagcaguccugcuccauccccaacaucgagaccgucaucgaguuccagcagaagaacaaccgccuccucgagaucacccgcgaguucuccgucaacgccggcgucaccacccccgucuccaccuacaugcucaccaacuccgagcuccucucccucaucaacgacaugcccaucaccaacgaccagaagaagcucauguccaacaacguccagaucguccgccagcaguccuacuccaucaugugcaucaucaaggaggagguccucgccuacgucguccagcucccccucuacggcgucaucgacacccccugcuggaagcuccacaccuccccccucugcaccaccaacaccaaggagggcuccaacaucugccucacccgcaccgaccgcggcugguacugcgacaacgccggcuccgucuccuucuucccccaggccgagaccugcaagguccaguccaaccgcgucuucugcgacaccaugaacucccucacccuccccuccgaggucaaccucugcaacgucgacaucuucaaccccaaguacgacugcaagaucaugaccuccaagaccgacgucuccuccuccgucaucaccucccucggcgccaucgucuccugcuacggcaagaccaagugcaccgccuccaacaagaaccgcggcaucaucaagaccuucuccaacggcugcgacuacgucuccaacaagggcgucgacaccgucuccgucggcaacacccucuacugcgucaacaagcaggagggccagucccucuacgucaagggcgagcccaucaucaacuucuacgacccccucgucuuccccuccgacgaguucgacgccuccaucucccaggucaacgagaagaucaaccagucccucgccuucauccgcaaguccgacgagcuccuccacaacgucaacgccggcaaguccaccaccaacaucaugaucaccaccaucaucaucgucaucaucgucauccuccucucccucaucgccgucggccuccuccucuacugcaaggcccgcugaggacuaguguccaccugucccuccugggcugcuggauugucucguuuuccugccaaauaaacaggaucagcgcuuuacagaucuaaaaaaaaaaaaaaaaaaaaaaaaaaaaaaaaaaaaaaaaaaaaaaaaaaaaaaaaaaaaaaaaugcaucccccccccccccccccccccccccccccccaaaggcucuuuucagagccaccagaauu

SEQ ID NO: 3083 - RNA, 1931 nt, Artificial Sequence
  mRNA product Design i-1 comprising derived and/or modified sequence from HRSV(A2)__F-del_DSCav1_mut2 (opt3)
gggagagggcgcuuggcuugcaaggacccugagcugcggcauugaagcacacccaacccaacucgacugaagucagccucacugaaccggaucugagaaucuucucucucugggcuugccagggcucuccgaaccuagcuagcauccucuucaauuccaacuagaaagcuuaccauggagcugcucauccuuaaggccaacgcuauuaccacaauacugacugcagugacguucugcuuugccagcggccagaauaucaccgaagaguucuaccaauccacauguucugcggucucaaaaggguauuugggagcuuuaagaacugguugguacaccaguguuauuacaaucgaacugagcaacauuaaggagaauaaaugcaacggcaccgacgccaaggugaaacuaaucaagcaggaacucgauaaguauaaaaaugcaguaacugaccugcagcuucugaugcaguccacacccgccaccgggucuggaucggcuauauguucaggcguggcagucugcaagguguugcaccucgagggugagguuaacaaaaucaagagcgcccugcugaguacgaauaaagcuguggucucccucucuaacggggugagcguauuaacuuuuaagguucuggaucuuaagaauuacauugacaaacaauugcugccuauccuaaacaagcaguccuguucaauuccaaauaucgaaaccgugauagaguuccagcagaaaaacaauaggcuccuggaaauuacacgggaguuuagugucaacgccggagugacuaccccggugagcacauauaugcuuaccaauucugagcuguugucccucaucaacgauaugcccauuacgaacgaccaaaagaaacugaugucaaauaacguccagaucguucgccagcagagcuacaguaucaugugcauuauaaaggaagagguguuagcguauguagugcaacugccucucuacggcgucaucgauacuccauguuggaaacuucauacaucuccccugugcaccacuaauacaaaggaaggcuccaacauuuguuugacccgaacggaccgugggugguacugcgauaaugcaggaagcgugucguucuuuccucaggccgagaccuguaagguucagucuaacagaguguucugcgacacaaugaacucccuaacucugccaucagaagucaaucucugcaauguggauaucuuuaaccccaaauaugacuguaagauaaugaccaguaaaacagauguaagcuccucuguuauuacuagccugggugcuaucgugucaugcuacggcaagaccaaauguacagccaguaauaagaacagggggaucauuaagaccuucuccaauggaugcgacuaugucagcaacaaaggcguggacacugucucuguggguaauacgcuuuacuguguuaacaagcaagaggggcagucacuguaugugaaaggagagccuaucauuaacuuuuacgauccauugguauucccgagugacgaauuugaugcaagcauaucccaggucaaugagaagaucaaccagucucucgcuuucauucggaaaucggacgaacuguuacacaaugugaacgccggcaagagcacaaccaauaucaugaucacuaccauuauaaucguuauuaucgugauucugcuaucccucaucgcggucggccugcuuuuguauugcaaggcccgcugaggacuaguguccaccugucccuccugggcugcuggauugucucguuuuccugccaaauaaacaggaucagcgcuuuacagaucuaaaaaaaaaaaaaaaaaaaaaaaaaaaaaaaaaaaaaaaaaaaaaaaaaaaaaaaaaaaaaaaaugcaucccccccccccccccccccccccccccccccaaaggcucuuuucagagccaccagaauu

SEQ ID NO: 3084 - RNA, 1931 nt, Artificial Sequence
  mRNA product Design i-1 comprising derived and/or modified sequence from HRSV(A2)__F-del_DSCav1_mut2 (opt4)
gggagagggcgcuuggcuugcaaggacccugagcugcggcauugaagcacacccaacccaacucgacugaagucagccucacugaaccggaucugagaaucuucucucucugggcuugccagggcucuccgaaccuagcuagcauccucuucaauuccaacuagaaagcuuaccauggagcugcugauccugaaggccaacgccaucaccaccauccugaccgccgugaccuucugcuucgccagcggccagaacaucaccgaggaguucuaccagagcaccugcagcgccgugagcaagggcuaccugggcgcccugagaaccggcugguacaccagcgugaucaccaucgagcugagcaacaucaaggagaacaagugcaacggcaccgacgccaaggugaagcugaucaagcaggagcuggacaaguacaagaacgccgugaccgaccugcagcugcugaugcagagcacccccgccaccggcagcggcagcgccaucugcagcggcguggccgugugcaaggugcugcaccuggagggcgaggugaacaagaucaagagcgcccugcugagcaccaacaaggccguggugagccugagcaacggcgugagcgugcugaccuucaaggugcuggaccugaagaacuacaucgacaagcagcugcugcccauccugaacaagcagagcugcagcauccccaacaucgagaccgugaucgaguuccagcagaagaacaacagacugcuggagaucaccagagaguucagcgugaacgccggcgugaccacccccgugagcaccuacaugcugaccaacagcgagcugcugagccugaucaacgacaugcccaucaccaacgaccagaagaagcugaugagcaacaacgugcagaucgugagacagcagagcuacagcaucaugugcaucaucaaggaggaggugcuggccuacguggugcagcugccccuguacggcgugaucgacacccccugcuggaagcugcacaccagcccccugugcaccaccaacaccaaggagggcagcaacaucugccugaccagaaccgacagaggcugguacugcgacaacgccggcagcgugagcuucuucccccaggccgagaccugcaaggugcagagcaacagaguguucugcgacaccaugaacagccugacccugcccagcgaggugaaccugugcaacguggacaucuucaaccccaaguacgacugcaagaucaugaccagcaagaccgacgugagcagcagcgugaucaccagccugggcgccaucgugagcugcuacggcaagaccaagugcaccgccagcaacaagaacagaggcaucaucaagaccuucagcaacggcugcgacuacgugagcaacaagggcguggacaccgugagcgugggcaacacccuguacugcgugaacaagcaggagggccagagccuguacgugaagggcgagcccaucaucaacuucuacgacccccugguguuccccagcgacgaguucgacgccagcaucagccaggugaacgagaagaucaaccagagccuggccuucaucagaaagagcgacgagcugcugcacaacgugaacgccggcaagagcaccaccaacaucaugaucaccaccaucaucaucgugaucaucgugauccugcugagccugaucgccgugggccugcugcuguacugcaaggccagaugaggacuaguguccaccugucccuccugggcugcuggauugucucguuuuccugccaaauaaacaggaucagcgcuuuacagaucuaaaaaaaaaaaaaaaaaaaaaaaaaaaaaaaaaaaaaaaaaaaaaaaaaaaaaaaaaaaaaaaaugcaucccccccccccccccccccccccccccccccaaaggcucuuuucagagccaccagaauu

SEQ ID NO: 3085 - RNA, 1931 nt, Artificial Sequence
  mRNA product Design i-1 comprising derived and/or modified sequence from HRSV(A2)__F-del_DSCav1_mut2 (opt5)
gggagagggcgcuuggcuugcaaggacccugagcugcggcauugaagcacacccaacccaacucgacugaagucagccucacugaaccggaucugagaaucuucucucucugggcuugccagggcucuccgaaccuagcuagcauccucuucaauuccaacuagaaagcuuaccauggagcugcucauccugaaggccaacgcuauuaccacaauccuuacggccgugaccuucugcuuugcgagcggccagaauauuacagaagaguucuaccaauccaccuguucugcugucagcaaaggguaucugggagcccucagaacaggcugguacaccuccguuaucacaauugaacugucuaacaucaaggagaauaaaugcaacgggaccgacgccaaggugaaacuuaucaagcaggaacuggauaaguauaaaaaugcugugacggaccuccagcugcugaugcagagcacccccgccacaggauccggcucugcuauuuguagcggggucgccgugugcaagguucuccaccuggagggagaggugaacaaaaucaaguccgcgcuucugagcaccaauaaagccgucgugucucucuccaacggcguuagcgugcugacauuuaagguccuugaucugaagaauuacauugacaaacaacuccugccuauccugaacaagcagucuuguuccauuccgaauaucgaaaccgugauugaguuccagcagaaaaacaaucggcuccuggaaaucacgcgcgaguuuagcgugaacgcuggcgucacaacccccguuucuacauauaugcuuaccaauuccgagcugcucagccugaucaacgauaugccuauuaccaacgaccaaaagaaacuuauguccaauaacgugcagaucgugagacagcagucuuacagcauuaugugcaucauuaaggaagagguccuggccuaugugguucaacucccccuguacggggugaucgauacaccuuguuggaaacugcauacgagcccccucugcaccacaaauaccaaggaaggauccaacaucugucugacacggaccgaccgcggcugguacugcgauaaugcugggucugucuccuucuuuccucaggccgagacguguaaggugcagagcaacagaguuuucugcgacacaaugaacucucuuacccugccgagcgaagugaaucucugcaaugucgauauuuuuaaccccaaauaugacuguaagaucaugaccuccaaaacagaugugucuagcuccgucauuaccagccugggagcgaucgugucuugcuacggcaagacaaaauguacggccuccaauaagaaccgggggauuaucaagaccuucagcaauggaugcgacuauguuucuaacaaaggcguggacacagucuccgugggcaauacccuuuacuguguuaacaagcaagaggggcagagccuguaugugaaaggagagccuaucauuaacuuuuacgauccccucgucuucccuuccgacgaauuugaugcuucuaucagccaggugaaugagaagauuaaccagucccuggccuucauccgcaaaucugacgaacugcuccacaaugugaacgcuggcaagagcacaaccaauauuaugaucacgaccauuaucaucguuauuaucgucauucugcuuucccugaucgccguggggcuccugcuguauugcaaggccagaugaggacuaguguccaccugucccuccugggcugcuggauugucucguuuuccugccaaauaaacaggaucagcgcuuuacagaucuaaaaaaaaaaaaaaaaaaaaaaaaaaaaaaaaaaaaaaaaaaaaaaaaaaaaaaaaaaaaaaaaugcaucccccccccccccccccccccccccccccccaaaggcucuuuucagagccaccagaauu

SEQ ID NO: 3086 - RNA, 1931 nt, Artificial Sequence
  mRNA product Design i-1 comprising derived and/or modified sequence from HRSV(A2)__F-del_DSCav1_mut2 (opt6)
gggagagggcgcuuggcuugcaaggacccugagcugcggcauugaagcacacccaacccaacucgacugaagucagccucacugaaccggaucugagaaucuucucucucugggcuugccagggcucuccgaaccuagcuagcauccucuucaauuccaacuagaaagcuuaccauggaacuccuaauacuuaaagccaaugcaauaaccacaauacuaacagcaguaacauucugcuuugcaucaggacaaaacauaacagaagaauuuuaccaaucaacauguucagcaguaagcaaaggauaccuaggagccuuacgcacagguugguacacuuccguaauaacaauagaacucucaaauauaaaagaaaacaaaugcaacggaaccgaugcaaaaguaaaacuaauaaaacaagaauuagacaaauacaaaaacgcaguaacagaccuacaauuacuuaugcaaucaacacccgcaacaggauccggcucagcaaucuguucaggaguagcaguaugcaaaguucuccaccuagaaggcgaaguaaacaaaauaaaaucagcccuauuaucuaccaauaaagcaguaguaucacuaucaaauggaguaucuguccuaaccuucaaaguacuugaccuaaaaaauuacaucgacaaacaauuacuaccaauacuuaacaaacaaucauguucaauaccaaacauugaaacaguaauagaauuucaacaaaaaaauaacagauuauuagaaauaacccgcgaauuuucaguuaacgcaggaguaacaacaccaguauccacauacauguuaacaaauucagaacucuuaucacuuauaaacgacaugcccauaacaaacgaccaaaaaaaacucaugucuaacaauguucaaauaguucgacaacaaucauacuccauaaugugcauaauaaaagaagaaguucuagcauauguuguacaacucccacucuaugguguuauagacacaccaugcuggaaacuacauacaagccccuuaugcacuacaaacacaaaagaaggcucuaauauaugucuaacccgcacagacagaggcugguauugcgauaacgcagguucaguaucauucuuuccacaagcagaaacuugcaaaguccaauccaauagagucuucugcgacacuaugaacucacucacacucccaucugaagucaauuuauguaacgucgauaucuucaacccaaaauacgacugcaaaauaaugaccucaaaaacagacguaagcucaucagucauaacuucucuaggcgcaaucgucucauguuacggcaaaacaaaauguaccgcaucaaacaaaaaucgagguauaauaaaaaccuuuucuaacggcugcgacuacguaucaaacaaaggaguagauacuguaagugucggaaacacauuauacugcgucaacaaacaagaaggacaaucccuauauguuaaaggcgaaccuaucauuaauuucuacgacccacucgucuuuccauccgacgaauuugacgcaucaauuucccaaguaaaugaaaaaauaaaccaaucccuugcauucauaagaaaaucagaugaacuauuacacaacguaaacgcaggcaaaucaacaacaaauauaaugaucacaacaauaauaaucguaauaauaguaauccuacucucacuaauagcaguaggcuuacuauuauauugcaaagccagauaaggacuaguguccaccugucccuccugggcugcuggauugucucguuuuccugccaaauaaacaggaucagcgcuuuacagaucuaaaaaaaaaaaaaaaaaaaaaaaaaaaaaaaaaaaaaaaaaaaaaaaaaaaaaaaaaaaaaaaaugcaucccccccccccccccccccccccccccccccaaaggcucuuuucagagccaccagaauu

SEQ ID NO: 3087 - RNA, 1931 nt, Artificial Sequence
  mRNA product Design i-1 comprising derived and/or modified sequence from HRSV(A2)__F-del_DSCav1_mut2 (opt11)
gggagagggcgcuuggcuugcaaggacccugagcugcggcauugaagcacacccaacccaacucgacugaagucagccucacugaaccggaucugagaaucuucucucucugggcuugccagggcucuccgaaccuagcuagcauccucuucaauuccaacuagaaagcuuaccauggaacuucuuauccuaaaagcgaacgccauaaccacaauccuaacagcagucaccuucuguuucgccucaggacaaaacaucaccgaggaauuuuaccaauccacauguagcgcugucucaaaaggcuaccucggcgcccuccgaaccggcugguacacauccguaauaacgaucgaacucuccaacauaaaagaaaauaaaugcaacggcaccgacgccaaagucaaacuuaucaaacaagaacuagacaaauacaaaaacgccgucaccgaccuccagcuccucaugcaauccaccccagcaacaggcuccggaagcgcaaucugcucaggcgucgccguaugcaaaguacuccaccucgaaggagaagucaacaaaaucaaauccgcccuccuauccacaaacaaagcaguugucucacucuccaacgggguaagcguacugaccuucaaaguccuagaccucaaaaacuacaucgauaaacaacuccuuccaauccucaacaaacaaucaugcucuauccccaacaucgaaaccguaaucgaauuucaacaaaaaaacaaccgccuacuugaaaucacacgcgaauuuagcgucaacgcaggaguaacaacacccguguccacauauaugcucacgaacagcgaacuacuaucccugauuaacgacaugcccaucaccaacgaccaaaaaaaacuaaugagcaacaacguacaaaucguccgccaacaaagcuacucuauaaugugcaucaucaaggaagaaguccuagccuacgucguccaauuaccacucuacggcgucaucgacacacccugcuggaaacuccauacauccccccucugcaccaccaacaccaaagaaggguccaacauaugccucacucgcacagaccgcggcugguacugcgacaacgcuggcagcgucagcuucuucccccaggccgaaaccugcaaaguccaauccaacagagucuucugcgacaccaugaacucgcucacccuccccuccgaggucaaccucugcaacgucgacauauucaaccccaaauacgacugcaaaaucaugaccuccaaaaccgacgucagcucaucagucaucacaucccucggggccaucgucuccugcuacggcaaaaccaagugcaccgccucaaacaaaaaccgcggcauuaucaaaacauucuccaacggcugcgacuacgucuccaacaaaggcgucgacacagucuccgucgguaacacccucuacugcguaaauaaacaagaaggccaaucccucuacgucaaaggcgaacccaucaucaacuucuacgacccucucgucuuccccuccgacgaauuugacgccucaaucagccaaguuaacgaaaaaaucaaccaaucacucgccuucauccgcaaauccgacgaacuccuccacaacguuaacgccggcaaaucuaccacgaacaucaugaucaccaccauaaucaucguaauuaucguaauacuccuaucccucauagcaguaggccuccuacucuacugcaaagcccguuaaggacuaguguccaccugucccuccugggcugcuggauugucucguuuuccugccaaauaaacaggaucagcgcuuuacagaucuaaaaaaaaaaaaaaaaaaaaaaaaaaaaaaaaaaaaaaaaaaaaaaaaaaaaaaaaaaaaaaaaugcaucccccccccccccccccccccccccccccccaaaggcucuuuucagagccaccagaauu

SEQ ID NO: 3088 - RNA, 1931 nt, Artificial Sequence
  mRNA product Design i-2 comprising derived and/or modified sequence from HRSV(A2)__F-del_DSCav1_mut2 (opt1)
gggagaggcgcugccuacggagguggcagccaucuccuucucggcaucaagcuuaccauggagcugcucauccugaaggccaacgccaucaccaccauccugacggcggugaccuucugcuucgccagcggccagaacaucaccgaggaguucuaccaguccacgugcagcgccgucuccaagggguaccucggcgcccugcggaccggcugguacaccuccgugaucaccaucgagcugagcaacaucaaggagaacaagugcaacgggaccgacgccaaggugaagcucaucaagcaggagcuggacaaguacaagaacgcggucacggaccugcagcuccugaugcaguccaccccggcaaccggcuccggcuccgccaucugcagcggcgucgccgugugcaaggugcugcaccucgagggggaggucaacaagaucaagagcgcccugcuguccaccaacaaggccguggugagccucuccaacggcgucagcgugcugaccuucaaggugcuggaccucaagaacuacaucgacaagcagcugcugcccauccugaacaagcagagcugcuccauccccaacaucgagacggugaucgaguuccagcagaagaacaaccggcuccuggagaucacccgcgaguucagcgugaacgccggggucaccacccccguguccacguacaugcugaccaacagcgagcuccugucccugaucaacgacaugccgaucaccaacgaccagaagaagcucaugagcaacaacgugcagaucguccggcagcaguccuacagcaucaugugcaucaucaaggaggaggugcuggcguacgugguccagcugccccucuacggcgugaucgacacccccugcuggaagcugcacacgagcccccugugcaccaccaacaccaaggagggguccaacaucugccucacgcgcaccgaccggggcugguacugcgacaacgccggcagcgucuccuucuucccgcaggccgagaccugcaaggugcagagcaaccgcguguucugcgacaccaugaacucccugacgcugcccagcgagguaaaccucugcaacgucgacaucuucaaccccaaguacgacugcaagaucaugaccuccaagaccgacgugagcuccagcgugaucaccucccugggggccaucgucagcugcuacggcaagacgaagugcaccgccagcaacaagaaccgggggaucaucaagaccuucuccaacggcugcgacuacgugagcaacaagggcguggacaccguguccgucgggaacacccuguacugcgugaacaagcaggagggccagagccucuacgugaagggggagcccaucaucaacuucuacgacccgcuggucuuccccuccgacgaguucgacgcgagcaucucccaggugaacgagaagaucaaccagagccuggccuucauccgcaaguccgacgagcugcuccacaacgugaacgccggcaagagcacgaccaacaucaugaucaccaccaucaucaucgucaucaucgugauccugcugucccucaucgccguggggcugcugcucuacugcaaggcccggugaggacuagugcaucacauuuaaaagcaucucagccuaccaugagaauaagagaaagaaaaugaagaucaauagcuuauucaucucuuuuucuuuuucguugguguaaagccaacacccugucuaaaaaacauaaauuucuuuaaucauuuugccucuuuucucugugcuucaauuaauaaaaaauggaaagaaccuagaucuaaaaaaaaaaaaaaaaaaaaaaaaaaaaaaaaaaaaaaaaaaaaaaaaaaaaaaaaaaaaaaaaugcaucccccccccccccccccccccccccccccccaaaggcucuuuucagagccaccagaauu

SEQ ID NO: 3089 - RNA, 1931 nt, Artificial Sequence
  mRNA product Design i-2 comprising derived and/or modified sequence from HRSV(A2)__F-del_DSCav1_mut2 (opt1)
gggagaggcgcugccuacggagguggcagccaucuccuucucggcaucaagcuuaccauggagcugcucauccugaaggccaacgccaucaccaccauccugacggcggugaccuucugcuucgccagcggccagaacaucaccgaggaguucuaccaguccacgugcagcgccgucuccaagggguaccucggcgcccugcgcaccgggugguacaccagcgugaucaccaucgagcuguccaacaucaaggagaacaagugcaacggcaccgacgccaaggugaagcucaucaagcaggagcuggacaaguacaagaacgcggucacggaccugcagcuccugaugcagagcacccccgccaccggguccggcagcgccaucugcuccggcguggccgugugcaagguccugcaccucgagggggaggugaacaagaucaagagcgcgcugcuguccaccaacaaggccguggucagccucuccaacggcgugagcgugcugacguucaagguccuggaccucaagaacuacaucgacaagcagcugcugccgauccucaacaagcaguccugcagcauccccaacaucgagaccgugaucgaguuccagcagaagaacaaccggcugcuggagaucacccgcgaguucuccgugaacgccggggucaccacgcccgugagcaccuacaugcucaccaacuccgagcugcugagccucaucaacgacaugcccaucaccaacgaccagaagaagcugaugagcaacaacgugcagaucguccggcagcaguccuacagcaucaugugcaucaucaaggaggaggugcuggccuacgugguccagcucccgcuguacggcgugaucgacacgcccugcuggaagcugcacaccagcccccucugcaccaccaacacgaaggagggguccaacaucugccugacccgcaccgaccggggcugguacugcgacaacgccggcuccgugagcuucuucccccaggcggagaccugcaagguccaguccaaccgcguguucugcgacacgaugaacagccugacccucccguccgaggucaaccugugcaacguggacaucuucaaccccaaguacgacugcaagaucaugaccagcaagaccgacguguccagcuccgucaucacgagccugggggccaucguguccugcuacggcaagaccaagugcaccgccagcaacaagaaccgggggaucaucaagaccuucuccaacggcugcgacuacgugagcaacaagggcgucgacacgguguccguggggaacacccucuacugcgucaacaagcaggagggccagagccuguacgugaagggggagcccaucaucaacuucuacgacccccugguguucccgagcgacgaguucgacgccuccaucagccaggucaacgagaagaucaaccagucccucgccuucauccgcaagagcgacgagcugcugcacaacgugaacgcgggcaaguccaccaccaacaucaugaucaccacgaucaucaucgugaucaucgucauccuccugagccugaucgccguggggcuccugcuguacugcaaggcccggugaggacuagugcaucacauuuaaaagcaucucagccuaccaugagaauaagagaaagaaaaugaagaucaauagcuuauucaucucuuuuucuuuuucguugguguaaagccaacacccugucuaaaaaacauaaauuucuuuaaucauuuugccucuuuucucugugcuucaauuaauaaaaaauggaaagaaccuagaucuaaaaaaaaaaaaaaaaaaaaaaaaaaaaaaaaaaaaaaaaaaaaaaaaaaaaaaaaaaaaaaaaugcaucccccccccccccccccccccccccccccccaaaggcucuuuucagagccaccagaauu

SEQ ID NO: 3090 - RNA, 1931 nt, Artificial Sequence
  mRNA product Design i-2 comprising derived and/or modified sequence from HRSV(A2)__F-del_DSCav1_mut2 (opt2)
gggagaggcgcugccuacggagguggcagccaucuccuucucggcaucaagcuuaccauggagcuccucauccucaaggccaacgccaucaccaccauccucaccgccgucaccuucugcuucgccuccggccagaacaucaccgaggaguucuaccaguccaccugcuccgccgucuccaagggcuaccucggcgcccuccgcaccggcugguacaccuccgucaucaccaucgagcucuccaacaucaaggagaacaagugcaacggcaccgacgccaaggucaagcucaucaagcaggagcucgacaaguacaagaacgccgucaccgaccuccagcuccucaugcaguccacccccgccaccggcuccggcuccgccaucugcuccggcgucgccgucugcaagguccuccaccucgagggcgaggucaacaagaucaaguccgcccuccucuccaccaacaaggccgucgucucccucuccaacggcgucuccguccucaccuucaagguccucgaccucaagaacuacaucgacaagcagcuccuccccauccucaacaagcaguccugcuccauccccaacaucgagaccgucaucgaguuccagcagaagaacaaccgccuccucgagaucacccgcgaguucuccgucaacgccggcgucaccacccccgucuccaccuacaugcucaccaacuccgagcuccucucccucaucaacgacaugcccaucaccaacgaccagaagaagcucauguccaacaacguccagaucguccgccagcaguccuacuccaucaugugcaucaucaaggaggagguccucgccuacgucguccagcucccccucuacggcgucaucgacacccccugcuggaagcuccacaccuccccccucugcaccaccaacaccaaggagggcuccaacaucugccucacccgcaccgaccgcggcugguacugcgacaacgccggcuccgucuccuucuucccccaggccgagaccugcaagguccaguccaaccgcgucuucugcgacaccaugaacucccucacccuccccuccgaggucaaccucugcaacgucgacaucuucaaccccaaguacgacugcaagaucaugaccuccaagaccgacgucuccuccuccgucaucaccucccucggcgccaucgucuccugcuacggcaagaccaagugcaccgccuccaacaagaaccgcggcaucaucaagaccuucuccaacggcugcgacuacgucuccaacaagggcgucgacaccgucuccgucggcaacacccucuacugcgucaacaagcaggagggccagucccucuacgucaagggcgagcccaucaucaacuucuacgacccccucgucuuccccuccgacgaguucgacgccuccaucucccaggucaacgagaagaucaaccagucccucgccuucauccgcaaguccgacgagcuccuccacaacgucaacgccggcaaguccaccaccaacaucaugaucaccaccaucaucaucgucaucaucgucauccuccucucccucaucgccgucggccuccuccucuacugcaaggcccgcugaggacuagugcaucacauuuaaaagcaucucagccuaccaugagaauaagagaaagaaaaugaagaucaauagcuuauucaucucuuuuucuuuuucguugguguaaagccaacacccugucuaaaaaacauaaauuucuuuaaucauuuugccucuuuucucugugcuucaauuaauaaaaaauggaaagaaccuagaucuaaaaaaaaaaaaaaaaaaaaaaaaaaaaaaaaaaaaaaaaaaaaaaaaaaaaaaaaaaaaaaaaugcaucccccccccccccccccccccccccccccccaaaggcucuuuucagagccaccagaauu

SEQ ID NO: 3091 - RNA, 1931 nt, Artificial Sequence
  mRNA product Design i-2 comprising derived and/or modified sequence from HRSV(A2)__F-del_DSCav1_mut2 (opt3)
gggagaggcgcugccuacggagguggcagccaucuccuucucggcaucaagcuuaccauggagcugcucauccuuaaggccaacgcuauuaccacaauacugacugcagugacguucugcuuugccagcggccagaauaucaccgaagaguucuaccaauccacauguucugcggucucaaaaggguauuugggagcuuuaagaacugguugguacaccaguguuauuacaaucgaacugagcaacauuaaggagaauaaaugcaacggcaccgacgccaaggugaaacuaaucaagcaggaacucgauaaguauaaaaaugcaguaacugaccugcagcuucugaugcaguccacacccgccaccgggucuggaucggcuauauguucaggcguggcagucugcaagguguugcaccucgagggugagguuaacaaaaucaagagcgcccugcugaguacgaauaaagcuguggucucccucucuaacggggugagcguauuaacuuuuaagguucuggaucuuaagaauuacauugacaaacaauugcugccuauccuaaacaagcaguccuguucaauuccaaauaucgaaaccgugauagaguuccagcagaaaaacaauaggcuccuggaaauuacacgggaguuuagugucaacgccggagugacuaccccggugagcacauauaugcuuaccaauucugagcuguugucccucaucaacgauaugcccauuacgaacgaccaaaagaaacugaugucaaauaacguccagaucguucgccagcagagcuacaguaucaugugcauuauaaaggaagagguguuagcguauguagugcaacugccucucuacggcgucaucgauacuccauguuggaaacuucauacaucuccccugugcaccacuaauacaaaggaaggcuccaacauuuguuugacccgaacggaccgugggugguacugcgauaaugcaggaagcgugucguucuuuccucaggccgagaccuguaagguucagucuaacagaguguucugcgacacaaugaacucccuaacucugccaucagaagucaaucucugcaauguggauaucuuuaaccccaaauaugacuguaagauaaugaccaguaaaacagauguaagcuccucuguuauuacuagccugggugcuaucgugucaugcuacggcaagaccaaauguacagccaguaauaagaacagggggaucauuaagaccuucuccaauggaugcgacuaugucagcaacaaaggcguggacacugucucuguggguaauacgcuuuacuguguuaacaagcaagaggggcagucacuguaugugaaaggagagccuaucauuaacuuuuacgauccauugguauucccgagugacgaauuugaugcaagcauaucccaggucaaugagaagaucaaccagucucucgcuuucauucggaaaucggacgaacuguuacacaaugugaacgccggcaagagcacaaccaauaucaugaucacuaccauuauaaucguuauuaucgugauucugcuaucccucaucgcggucggccugcuuuuguauugcaaggcccgcugaggacuagugcaucacauuuaaaagcaucucagccuaccaugagaauaagagaaagaaaaugaagaucaauagcuuauucaucucuuuuucuuuuucguugguguaaagccaacacccugucuaaaaaacauaaauuucuuuaaucauuuugccucuuuucucugugcuucaauuaauaaaaaauggaaagaaccuagaucuaaaaaaaaaaaaaaaaaaaaaaaaaaaaaaaaaaaaaaaaaaaaaaaaaaaaaaaaaaaaaaaaugcaucccccccccccccccccccccccccccccccaaaggcucuuuucagagccaccagaauu

SEQ ID NO: 3092 - RNA, 1931 nt, Artificial Sequence
  mRNA product Design i-2 comprising derived and/or modified sequence from HRSV(A2)__F-del_DSCav1_mut2 (opt4)
gggagaggcgcugccuacggagguggcagccaucuccuucucggcaucaagcuuaccauggagcugcugauccugaaggccaacgccaucaccaccauccugaccgccgugaccuucugcuucgccagcggccagaacaucaccgaggaguucuaccagagcaccugcagcgccgugagcaagggcuaccugggcgcccugagaaccggcugguacaccagcgugaucaccaucgagcugagcaacaucaaggagaacaagugcaacggcaccgacgccaaggugaagcugaucaagcaggagcuggacaaguacaagaacgccgugaccgaccugcagcugcugaugcagagcacccccgccaccggcagcggcagcgccaucugcagcggcguggccgugugcaaggugcugcaccuggagggcgaggugaacaagaucaagagcgcccugcugagcaccaacaaggccguggugagccugagcaacggcgugagcgugcugaccuucaaggugcuggaccugaagaacuacaucgacaagcagcugcugcccauccugaacaagcagagcugcagcauccccaacaucgagaccgugaucgaguuccagcagaagaacaacagacugcuggagaucaccagagaguucagcgugaacgccggcgugaccacccccgugagcaccuacaugcugaccaacagcgagcugcugagccugaucaacgacaugcccaucaccaacgaccagaagaagcugaugagcaacaacgugcagaucgugagacagcagagcuacagcaucaugugcaucaucaaggaggaggugcuggccuacguggugcagcugccccuguacggcgugaucgacacccccugcuggaagcugcacaccagcccccugugcaccaccaacaccaaggagggcagcaacaucugccugaccagaaccgacagaggcugguacugcgacaacgccggcagcgugagcuucuucccccaggccgagaccugcaaggugcagagcaacagaguguucugcgacaccaugaacagccugacccugcccagcgaggugaaccugugcaacguggacaucuucaaccccaaguacgacugcaagaucaugaccagcaagaccgacgugagcagcagcgugaucaccagccugggcgccaucgugagcugcuacggcaagaccaagugcaccgccagcaacaagaacagaggcaucaucaagaccuucagcaacggcugcgacuacgugagcaacaagggcguggacaccgugagcgugggcaacacccuguacugcgugaacaagcaggagggccagagccuguacgugaagggcgagcccaucaucaacuucuacgacccccugguguuccccagcgacgaguucgacgccagcaucagccaggugaacgagaagaucaaccagagccuggccuucaucagaaagagcgacgagcugcugcacaacgugaacgccggcaagagcaccaccaacaucaugaucaccaccaucaucaucgugaucaucgugauccugcugagccugaucgccgugggccugcugcuguacugcaaggccagaugaggacuagugcaucacauuuaaaagcaucucagccuaccaugagaauaagagaaagaaaaugaagaucaauagcuuauucaucucuuuuucuuuuucguugguguaaagccaacacccugucuaaaaaacauaaauuucuuuaaucauuuugccucuuuucucugugcuucaauuaauaaaaaauggaaagaaccuagaucuaaaaaaaaaaaaaaaaaaaaaaaaaaaaaaaaaaaaaaaaaaaaaaaaaaaaaaaaaaaaaaaaugcaucccccccccccccccccccccccccccccccaaaggcucuuuucagagccaccagaauu

SEQ ID NO: 3093 - RNA, 1931 nt, Artificial Sequence
  mRNA product Design i-2 comprising derived and/or modified sequence from HRSV(A2)__F-del_DSCav1_mut2 (opt5)
gggagaggcgcugccuacggagguggcagccaucuccuucucggcaucaagcuuaccauggagcugcucauccugaaggccaacgcuauuaccacaauccuuacggccgugaccuucugcuuugcgagcggccagaauauuacagaagaguucuaccaauccaccuguucugcugucagcaaaggguaucugggagcccucagaacaggcugguacaccuccguuaucacaauugaacugucuaacaucaaggagaauaaaugcaacgggaccgacgccaaggugaaacuuaucaagcaggaacuggauaaguauaaaaaugcugugacggaccuccagcugcugaugcagagcacccccgccacaggauccggcucugcuauuuguagcggggucgccgugugcaagguucuccaccuggagggagaggugaacaaaaucaaguccgcgcuucugagcaccaauaaagccgucgugucucucuccaacggcguuagcgugcugacauuuaagguccuugaucugaagaauuacauugacaaacaacuccugccuauccugaacaagcagucuuguuccauuccgaauaucgaaaccgugauugaguuccagcagaaaaacaaucggcuccuggaaaucacgcgcgaguuuagcgugaacgcuggcgucacaacccccguuucuacauauaugcuuaccaauuccgagcugcucagccugaucaacgauaugccuauuaccaacgaccaaaagaaacuuauguccaauaacgugcagaucgugagacagcagucuuacagcauuaugugcaucauuaaggaagagguccuggccuaugugguucaacucccccuguacggggugaucgauacaccuuguuggaaacugcauacgagcccccucugcaccacaaauaccaaggaaggauccaacaucugucugacacggaccgaccgcggcugguacugcgauaaugcugggucugucuccuucuuuccucaggccgagacguguaaggugcagagcaacagaguuuucugcgacacaaugaacucucuuacccugccgagcgaagugaaucucugcaaugucgauauuuuuaaccccaaauaugacuguaagaucaugaccuccaaaacagaugugucuagcuccgucauuaccagccugggagcgaucgugucuugcuacggcaagacaaaauguacggccuccaauaagaaccgggggauuaucaagaccuucagcaauggaugcgacuauguuucuaacaaaggcguggacacagucuccgugggcaauacccuuuacuguguuaacaagcaagaggggcagagccuguaugugaaaggagagccuaucauuaacuuuuacgauccccucgucuucccuuccgacgaauuugaugcuucuaucagccaggugaaugagaagauuaaccagucccuggccuucauccgcaaaucugacgaacugcuccacaaugugaacgcuggcaagagcacaaccaauauuaugaucacgaccauuaucaucguuauuaucgucauucugcuuucccugaucgccguggggcuccugcuguauugcaaggccagaugaggacuagugcaucacauuuaaaagcaucucagccuaccaugagaauaagagaaagaaaaugaagaucaauagcuuauucaucucuuuuucuuuuucguugguguaaagccaacacccugucuaaaaaacauaaauuucuuuaaucauuuugccucuuuucucugugcuucaauuaauaaaaaauggaaagaaccuagaucuaaaaaaaaaaaaaaaaaaaaaaaaaaaaaaaaaaaaaaaaaaaaaaaaaaaaaaaaaaaaaaaaugcaucccccccccccccccccccccccccccccccaaaggcucuuuucagagccaccagaauu

SEQ ID NO: 3094 - RNA, 1931 nt, Artificial Sequence
  mRNA product Design i-2 comprising derived and/or modified sequence from HRSV(A2)__F-del_DSCav1_mut2 (opt6)
gggagaggcgcugccuacggagguggcagccaucuccuucucggcaucaagcuuaccauggaacuccuaauacuuaaagccaaugcaauaaccacaauacuaacagcaguaacauucugcuuugcaucaggacaaaacauaacagaagaauuuuaccaaucaacauguucagcaguaagcaaaggauaccuaggagccuuacgcacagguugguacacuuccguaauaacaauagaacucucaaauauaaaagaaaacaaaugcaacggaaccgaugcaaaaguaaaacuaauaaaacaagaauuagacaaauacaaaaacgcaguaacagaccuacaauuacuuaugcaaucaacacccgcaacaggauccggcucagcaaucuguucaggaguagcaguaugcaaaguucuccaccuagaaggcgaaguaaacaaaauaaaaucagcccuauuaucuaccaauaaagcaguaguaucacuaucaaauggaguaucuguccuaaccuucaaaguacuugaccuaaaaaauuacaucgacaaacaauuacuaccaauacuuaacaaacaaucauguucaauaccaaacauugaaacaguaauagaauuucaacaaaaaaauaacagauuauuagaaauaacccgcgaauuuucaguuaacgcaggaguaacaacaccaguauccacauacauguuaacaaauucagaacucuuaucacuuauaaacgacaugcccauaacaaacgaccaaaaaaaacucaugucuaacaauguucaaauaguucgacaacaaucauacuccauaaugugcauaauaaaagaagaaguucuagcauauguuguacaacucccacucuaugguguuauagacacaccaugcuggaaacuacauacaagccccuuaugcacuacaaacacaaaagaaggcucuaauauaugucuaacccgcacagacagaggcugguauugcgauaacgcagguucaguaucauucuuuccacaagcagaaacuugcaaaguccaauccaauagagucuucugcgacacuaugaacucacucacacucccaucugaagucaauuuauguaacgucgauaucuucaacccaaaauacgacugcaaaauaaugaccucaaaaacagacguaagcucaucagucauaacuucucuaggcgcaaucgucucauguuacggcaaaacaaaauguaccgcaucaaacaaaaaucgagguauaauaaaaaccuuuucuaacggcugcgacuacguaucaaacaaaggaguagauacuguaagugucggaaacacauuauacugcgucaacaaacaagaaggacaaucccuauauguuaaaggcgaaccuaucauuaauuucuacgacccacucgucuuuccauccgacgaauuugacgcaucaauuucccaaguaaaugaaaaaauaaaccaaucccuugcauucauaagaaaaucagaugaacuauuacacaacguaaacgcaggcaaaucaacaacaaauauaaugaucacaacaauaauaaucguaauaauaguaauccuacucucacuaauagcaguaggcuuacuauuauauugcaaagccagauaaggacuagugcaucacauuuaaaagcaucucagccuaccaugagaauaagagaaagaaaaugaagaucaauagcuuauucaucucuuuuucuuuuucguugguguaaagccaacacccugucuaaaaaacauaaauuucuuuaaucauuuugccucuuuucucugugcuucaauuaauaaaaaauggaaagaaccuagaucuaaaaaaaaaaaaaaaaaaaaaaaaaaaaaaaaaaaaaaaaaaaaaaaaaaaaaaaaaaaaaaaaugcaucccccccccccccccccccccccccccccccaaaggcucuuuucagagccaccagaauu

SEQ ID NO: 3095 - RNA, 1931 nt, Artificial Sequence
  mRNA product Design i-2 comprising derived and/or modified sequence from HRSV(A2)__F-del_DSCav1_mut2 (opt11)
gggagaggcgcugccuacggagguggcagccaucuccuucucggcaucaagcuuaccauggaacuucuuauccuaaaagcgaacgccauaaccacaauccuaacagcagucaccuucuguuucgccucaggacaaaacaucaccgaggaauuuuaccaauccacauguagcgcugucucaaaaggcuaccucggcgcccuccgaaccggcugguacacauccguaauaacgaucgaacucuccaacauaaaagaaaauaaaugcaacggcaccgacgccaaagucaaacuuaucaaacaagaacuagacaaauacaaaaacgccgucaccgaccuccagcuccucaugcaauccaccccagcaacaggcuccggaagcgcaaucugcucaggcgucgccguaugcaaaguacuccaccucgaaggagaagucaacaaaaucaaauccgcccuccuauccacaaacaaagcaguugucucacucuccaacgggguaagcguacugaccuucaaaguccuagaccucaaaaacuacaucgauaaacaacuccuuccaauccucaacaaacaaucaugcucuauccccaacaucgaaaccguaaucgaauuucaacaaaaaaacaaccgccuacuugaaaucacacgcgaauuuagcgucaacgcaggaguaacaacacccguguccacauauaugcucacgaacagcgaacuacuaucccugauuaacgacaugcccaucaccaacgaccaaaaaaaacuaaugagcaacaacguacaaaucguccgccaacaaagcuacucuauaaugugcaucaucaaggaagaaguccuagccuacgucguccaauuaccacucuacggcgucaucgacacacccugcuggaaacuccauacauccccccucugcaccaccaacaccaaagaaggguccaacauaugccucacucgcacagaccgcggcugguacugcgacaacgcuggcagcgucagcuucuucccccaggccgaaaccugcaaaguccaauccaacagagucuucugcgacaccaugaacucgcucacccuccccuccgaggucaaccucugcaacgucgacauauucaaccccaaauacgacugcaaaaucaugaccuccaaaaccgacgucagcucaucagucaucacaucccucggggccaucgucuccugcuacggcaaaaccaagugcaccgccucaaacaaaaaccgcggcauuaucaaaacauucuccaacggcugcgacuacgucuccaacaaaggcgucgacacagucuccgucgguaacacccucuacugcguaaauaaacaagaaggccaaucccucuacgucaaaggcgaacccaucaucaacuucuacgacccucucgucuuccccuccgacgaauuugacgccucaaucagccaaguuaacgaaaaaaucaaccaaucacucgccuucauccgcaaauccgacgaacuccuccacaacguuaacgccggcaaaucuaccacgaacaucaugaucaccaccauaaucaucguaauuaucguaauacuccuaucccucauagcaguaggccuccuacucuacugcaaagcccguuaaggacuagugcaucacauuuaaaagcaucucagccuaccaugagaauaagagaaagaaaaugaagaucaauagcuuauucaucucuuuuucuuuuucguugguguaaagccaacacccugucuaaaaaacauaaauuucuuuaaucauuuugccucuuuucucugugcuucaauuaauaaaaaauggaaagaaccuagaucuaaaaaaaaaaaaaaaaaaaaaaaaaaaaaaaaaaaaaaaaaaaaaaaaaaaaaaaaaaaaaaaaugcaucccccccccccccccccccccccccccccccaaaggcucuuuucagagccaccagaauu

SEQ ID NO: 3096 - RNA, 1927 nt, Artificial Sequence
  mRNA product Design i-2 comprising derived and/or modified sequence from HRSV(A2)__F-del_DSCav1_mut2 (opt1)
ggggcgcugccuacggagguggcagccaucuccuucucggcaucaagcuuaccauggagcugcucauccugaaggccaacgccaucaccaccauccugacggcggugaccuucugcuucgccagcggccagaacaucaccgaggaguucuaccaguccacgugcagcgccgucuccaagggguaccucggcgcccugcggaccggcugguacaccuccgugaucaccaucgagcugagcaacaucaaggagaacaagugcaacgggaccgacgccaaggugaagcucaucaagcaggagcuggacaaguacaagaacgcggucacggaccugcagcuccugaugcaguccaccccggcaaccggcuccggcuccgccaucugcagcggcgucgccgugugcaaggugcugcaccucgagggggaggucaacaagaucaagagcgcccugcuguccaccaacaaggccguggugagccucuccaacggcgucagcgugcugaccuucaaggugcuggaccucaagaacuacaucgacaagcagcugcugcccauccugaacaagcagagcugcuccauccccaacaucgagacggugaucgaguuccagcagaagaacaaccggcuccuggagaucacccgcgaguucagcgugaacgccggggucaccacccccguguccacguacaugcugaccaacagcgagcuccugucccugaucaacgacaugccgaucaccaacgaccagaagaagcucaugagcaacaacgugcagaucguccggcagcaguccuacagcaucaugugcaucaucaaggaggaggugcuggcguacgugguccagcugccccucuacggcgugaucgacacccccugcuggaagcugcacacgagcccccugugcaccaccaacaccaaggagggguccaacaucugccucacgcgcaccgaccggggcugguacugcgacaacgccggcagcgucuccuucuucccgcaggccgagaccugcaaggugcagagcaaccgcguguucugcgacaccaugaacucccugacgcugcccagcgagguaaaccucugcaacgucgacaucuucaaccccaaguacgacugcaagaucaugaccuccaagaccgacgugagcuccagcgugaucaccucccugggggccaucgucagcugcuacggcaagacgaagugcaccgccagcaacaagaaccgggggaucaucaagaccuucuccaacggcugcgacuacgugagcaacaagggcguggacaccguguccgucgggaacacccuguacugcgugaacaagcaggagggccagagccucuacgugaagggggagcccaucaucaacuucuacgacccgcuggucuuccccuccgacgaguucgacgcgagcaucucccaggugaacgagaagaucaaccagagccuggccuucauccgcaaguccgacgagcugcuccacaacgugaacgccggcaagagcacgaccaacaucaugaucaccaccaucaucaucgucaucaucgugauccugcugucccucaucgccguggggcugcugcucuacugcaaggcccggugaggacuagugcaucacauuuaaaagcaucucagccuaccaugagaauaagagaaagaaaaugaagaucaauagcuuauucaucucuuuuucuuuuucguugguguaaagccaacacccugucuaaaaaacauaaauuucuuuaaucauuuugccucuuuucucugugcuucaauuaauaaaaaauggaaagaaccuagaucuaaaaaaaaaaaaaaaaaaaaaaaaaaaaaaaaaaaaaaaaaaaaaaaaaaaaaaaaaaaaaaaaugcaucccccccccccccccccccccccccccccccaaaggcucuuuucagagccaccagaauu

SEQ ID NO: 3097 - RNA, 1927 nt, Artificial Sequence
  mRNA product Design i-2 comprising derived and/or modified sequence from HRSV(A2)__F-del_DSCav1_mut2 (opt1)
ggggcgcugccuacggagguggcagccaucuccuucucggcaucaagcuuaccauggagcugcucauccugaaggccaacgccaucaccaccauccugacggcggugaccuucugcuucgccagcggccagaacaucaccgaggaguucuaccaguccacgugcagcgccgucuccaagggguaccucggcgcccugcgcaccgggugguacaccagcgugaucaccaucgagcuguccaacaucaaggagaacaagugcaacggcaccgacgccaaggugaagcucaucaagcaggagcuggacaaguacaagaacgcggucacggaccugcagcuccugaugcagagcacccccgccaccggguccggcagcgccaucugcuccggcguggccgugugcaagguccugcaccucgagggggaggugaacaagaucaagagcgcgcugcuguccaccaacaaggccguggucagccucuccaacggcgugagcgugcugacguucaagguccuggaccucaagaacuacaucgacaagcagcugcugccgauccucaacaagcaguccugcagcauccccaacaucgagaccgugaucgaguuccagcagaagaacaaccggcugcuggagaucacccgcgaguucuccgugaacgccggggucaccacgcccgugagcaccuacaugcucaccaacuccgagcugcugagccucaucaacgacaugcccaucaccaacgaccagaagaagcugaugagcaacaacgugcagaucguccggcagcaguccuacagcaucaugugcaucaucaaggaggaggugcuggccuacgugguccagcucccgcuguacggcgugaucgacacgcccugcuggaagcugcacaccagcccccucugcaccaccaacacgaaggagggguccaacaucugccugacccgcaccgaccggggcugguacugcgacaacgccggcuccgugagcuucuucccccaggcggagaccugcaagguccaguccaaccgcguguucugcgacacgaugaacagccugacccucccguccgaggucaaccugugcaacguggacaucuucaaccccaaguacgacugcaagaucaugaccagcaagaccgacguguccagcuccgucaucacgagccugggggccaucguguccugcuacggcaagaccaagugcaccgccagcaacaagaaccgggggaucaucaagaccuucuccaacggcugcgacuacgugagcaacaagggcgucgacacgguguccguggggaacacccucuacugcgucaacaagcaggagggccagagccuguacgugaagggggagcccaucaucaacuucuacgacccccugguguucccgagcgacgaguucgacgccuccaucagccaggucaacgagaagaucaaccagucccucgccuucauccgcaagagcgacgagcugcugcacaacgugaacgcgggcaaguccaccaccaacaucaugaucaccacgaucaucaucgugaucaucgucauccuccugagccugaucgccguggggcuccugcuguacugcaaggcccggugaggacuagugcaucacauuuaaaagcaucucagccuaccaugagaauaagagaaagaaaaugaagaucaauagcuuauucaucucuuuuucuuuuucguugguguaaagccaacacccugucuaaaaaacauaaauuucuuuaaucauuuugccucuuuucucugugcuucaauuaauaaaaaauggaaagaaccuagaucuaaaaaaaaaaaaaaaaaaaaaaaaaaaaaaaaaaaaaaaaaaaaaaaaaaaaaaaaaaaaaaaaugcaucccccccccccccccccccccccccccccccaaaggcucuuuucagagccaccagaauu

SEQ ID NO: 3098 - RNA, 1927 nt, Artificial Sequence
  mRNA product Design i-2 comprising derived and/or modified sequence from HRSV(A2)__F-del_DSCav1_mut2 (opt2)
ggggcgcugccuacggagguggcagccaucuccuucucggcaucaagcuuaccauggagcuccucauccucaaggccaacgccaucaccaccauccucaccgccgucaccuucugcuucgccuccggccagaacaucaccgaggaguucuaccaguccaccugcuccgccgucuccaagggcuaccucggcgcccuccgcaccggcugguacaccuccgucaucaccaucgagcucuccaacaucaaggagaacaagugcaacggcaccgacgccaaggucaagcucaucaagcaggagcucgacaaguacaagaacgccgucaccgaccuccagcuccucaugcaguccacccccgccaccggcuccggcuccgccaucugcuccggcgucgccgucugcaagguccuccaccucgagggcgaggucaacaagaucaaguccgcccuccucuccaccaacaaggccgucgucucccucuccaacggcgucuccguccucaccuucaagguccucgaccucaagaacuacaucgacaagcagcuccuccccauccucaacaagcaguccugcuccauccccaacaucgagaccgucaucgaguuccagcagaagaacaaccgccuccucgagaucacccgcgaguucuccgucaacgccggcgucaccacccccgucuccaccuacaugcucaccaacuccgagcuccucucccucaucaacgacaugcccaucaccaacgaccagaagaagcucauguccaacaacguccagaucguccgccagcaguccuacuccaucaugugcaucaucaaggaggagguccucgccuacgucguccagcucccccucuacggcgucaucgacacccccugcuggaagcuccacaccuccccccucugcaccaccaacaccaaggagggcuccaacaucugccucacccgcaccgaccgcggcugguacugcgacaacgccggcuccgucuccuucuucccccaggccgagaccugcaagguccaguccaaccgcgucuucugcgacaccaugaacucccucacccuccccuccgaggucaaccucugcaacgucgacaucuucaaccccaaguacgacugcaagaucaugaccuccaagaccgacgucuccuccuccgucaucaccucccucggcgccaucgucuccugcuacggcaagaccaagugcaccgccuccaacaagaaccgcggcaucaucaagaccuucuccaacggcugcgacuacgucuccaacaagggcgucgacaccgucuccgucggcaacacccucuacugcgucaacaagcaggagggccagucccucuacgucaagggcgagcccaucaucaacuucuacgacccccucgucuuccccuccgacgaguucgacgccuccaucucccaggucaacgagaagaucaaccagucccucgccuucauccgcaaguccgacgagcuccuccacaacgucaacgccggcaaguccaccaccaacaucaugaucaccaccaucaucaucgucaucaucgucauccuccucucccucaucgccgucggccuccuccucuacugcaaggcccgcugaggacuagugcaucacauuuaaaagcaucucagccuaccaugagaauaagagaaagaaaaugaagaucaauagcuuauucaucucuuuuucuuuuucguugguguaaagccaacacccugucuaaaaaacauaaauuucuuuaaucauuuugccucuuuucucugugcuucaauuaauaaaaaauggaaagaaccuagaucuaaaaaaaaaaaaaaaaaaaaaaaaaaaaaaaaaaaaaaaaaaaaaaaaaaaaaaaaaaaaaaaaugcaucccccccccccccccccccccccccccccccaaaggcucuuuucagagccaccagaauu

SEQ ID NO: 3099 - RNA, 1927 nt, Artificial Sequence
  mRNA product Design i-2 comprising derived and/or modified sequence from HRSV(A2)__F-del_DSCav1_mut2 (opt3)
ggggcgcugccuacggagguggcagccaucuccuucucggcaucaagcuuaccauggagcugcucauccuuaaggccaacgcuauuaccacaauacugacugcagugacguucugcuuugccagcggccagaauaucaccgaagaguucuaccaauccacauguucugcggucucaaaaggguauuugggagcuuuaagaacugguugguacaccaguguuauuacaaucgaacugagcaacauuaaggagaauaaaugcaacggcaccgacgccaaggugaaacuaaucaagcaggaacucgauaaguauaaaaaugcaguaacugaccugcagcuucugaugcaguccacacccgccaccgggucuggaucggcuauauguucaggcguggcagucugcaagguguugcaccucgagggugagguuaacaaaaucaagagcgcccugcugaguacgaauaaagcuguggucucccucucuaacggggugagcguauuaacuuuuaagguucuggaucuuaagaauuacauugacaaacaauugcugccuauccuaaacaagcaguccuguucaauuccaaauaucgaaaccgugauagaguuccagcagaaaaacaauaggcuccuggaaauuacacgggaguuuagugucaacgccggagugacuaccccggugagcacauauaugcuuaccaauucugagcuguugucccucaucaacgauaugcccauuacgaacgaccaaaagaaacugaugucaaauaacguccagaucguucgccagcagagcuacaguaucaugugcauuauaaaggaagagguguuagcguauguagugcaacugccucucuacggcgucaucgauacuccauguuggaaacuucauacaucuccccugugcaccacuaauacaaaggaaggcuccaacauuuguuugacccgaacggaccgugggugguacugcgauaaugcaggaagcgugucguucuuuccucaggccgagaccuguaagguucagucuaacagaguguucugcgacacaaugaacucccuaacucugccaucagaagucaaucucugcaauguggauaucuuuaaccccaaauaugacuguaagauaaugaccaguaaaacagauguaagcuccucuguuauuacuagccugggugcuaucgugucaugcuacggcaagaccaaauguacagccaguaauaagaacagggggaucauuaagaccuucuccaauggaugcgacuaugucagcaacaaaggcguggacacugucucuguggguaauacgcuuuacuguguuaacaagcaagaggggcagucacuguaugugaaaggagagccuaucauuaacuuuuacgauccauugguauucccgagugacgaauuugaugcaagcauaucccaggucaaugagaagaucaaccagucucucgcuuucauucggaaaucggacgaacuguuacacaaugugaacgccggcaagagcacaaccaauaucaugaucacuaccauuauaaucguuauuaucgugauucugcuaucccucaucgcggucggccugcuuuuguauugcaaggcccgcugaggacuagugcaucacauuuaaaagcaucucagccuaccaugagaauaagagaaagaaaaugaagaucaauagcuuauucaucucuuuuucuuuuucguugguguaaagccaacacccugucuaaaaaacauaaauuucuuuaaucauuuugccucuuuucucugugcuucaauuaauaaaaaauggaaagaaccuagaucuaaaaaaaaaaaaaaaaaaaaaaaaaaaaaaaaaaaaaaaaaaaaaaaaaaaaaaaaaaaaaaaaugcaucccccccccccccccccccccccccccccccaaaggcucuuuucagagccaccagaauu

SEQ ID NO: 3100 - RNA, 1927 nt, Artificial Sequence
  mRNA product Design i-2 comprising derived and/or modified sequence from HRSV(A2)__F-del_DSCav1_mut2 (opt4)
ggggcgcugccuacggagguggcagccaucuccuucucggcaucaagcuuaccauggagcugcugauccugaaggccaacgccaucaccaccauccugaccgccgugaccuucugcuucgccagcggccagaacaucaccgaggaguucuaccagagcaccugcagcgccgugagcaagggcuaccugggcgcccugagaaccggcugguacaccagcgugaucaccaucgagcugagcaacaucaaggagaacaagugcaacggcaccgacgccaaggugaagcugaucaagcaggagcuggacaaguacaagaacgccgugaccgaccugcagcugcugaugcagagcacccccgccaccggcagcggcagcgccaucugcagcggcguggccgugugcaaggugcugcaccuggagggcgaggugaacaagaucaagagcgcccugcugagcaccaacaaggccguggugagccugagcaacggcgugagcgugcugaccuucaaggugcuggaccugaagaacuacaucgacaagcagcugcugcccauccugaacaagcagagcugcagcauccccaacaucgagaccgugaucgaguuccagcagaagaacaacagacugcuggagaucaccagagaguucagcgugaacgccggcgugaccacccccgugagcaccuacaugcugaccaacagcgagcugcugagccugaucaacgacaugcccaucaccaacgaccagaagaagcugaugagcaacaacgugcagaucgugagacagcagagcuacagcaucaugugcaucaucaaggaggaggugcuggccuacguggugcagcugccccuguacggcgugaucgacacccccugcuggaagcugcacaccagcccccugugcaccaccaacaccaaggagggcagcaacaucugccugaccagaaccgacagaggcugguacugcgacaacgccggcagcgugagcuucuucccccaggccgagaccugcaaggugcagagcaacagaguguucugcgacaccaugaacagccugacccugcccagcgaggugaaccugugcaacguggacaucuucaaccccaaguacgacugcaagaucaugaccagcaagaccgacgugagcagcagcgugaucaccagccugggcgccaucgugagcugcuacggcaagaccaagugcaccgccagcaacaagaacagaggcaucaucaagaccuucagcaacggcugcgacuacgugagcaacaagggcguggacaccgugagcgugggcaacacccuguacugcgugaacaagcaggagggccagagccuguacgugaagggcgagcccaucaucaacuucuacgacccccugguguuccccagcgacgaguucgacgccagcaucagccaggugaacgagaagaucaaccagagccuggccuucaucagaaagagcgacgagcugcugcacaacgugaacgccggcaagagcaccaccaacaucaugaucaccaccaucaucaucgugaucaucgugauccugcugagccugaucgccgugggccugcugcuguacugcaaggccagaugaggacuagugcaucacauuuaaaagcaucucagccuaccaugagaauaagagaaagaaaaugaagaucaauagcuuauucaucucuuuuucuuuuucguugguguaaagccaacacccugucuaaaaaacauaaauuucuuuaaucauuuugccucuuuucucugugcuucaauuaauaaaaaauggaaagaaccuagaucuaaaaaaaaaaaaaaaaaaaaaaaaaaaaaaaaaaaaaaaaaaaaaaaaaaaaaaaaaaaaaaaaugcaucccccccccccccccccccccccccccccccaaaggcucuuuucagagccaccagaauu

SEQ ID NO: 3101 - RNA, 1927 nt, Artificial Sequence
  mRNA product Design i-2 comprising derived and/or modified sequence from HRSV(A2)__F-del_DSCav1_mut2 (opt5)
ggggcgcugccuacggagguggcagccaucuccuucucggcaucaagcuuaccauggagcugcucauccugaaggccaacgcuauuaccacaauccuuacggccgugaccuucugcuuugcgagcggccagaauauuacagaagaguucuaccaauccaccuguucugcugucagcaaaggguaucugggagcccucagaacaggcugguacaccuccguuaucacaauugaacugucuaacaucaaggagaauaaaugcaacgggaccgacgccaaggugaaacuuaucaagcaggaacuggauaaguauaaaaaugcugugacggaccuccagcugcugaugcagagcacccccgccacaggauccggcucugcuauuuguagcggggucgccgugugcaagguucuccaccuggagggagaggugaacaaaaucaaguccgcgcuucugagcaccaauaaagccgucgugucucucuccaacggcguuagcgugcugacauuuaagguccuugaucugaagaauuacauugacaaacaacuccugccuauccugaacaagcagucuuguuccauuccgaauaucgaaaccgugauugaguuccagcagaaaaacaaucggcuccuggaaaucacgcgcgaguuuagcgugaacgcuggcgucacaacccccguuucuacauauaugcuuaccaauuccgagcugcucagccugaucaacgauaugccuauuaccaacgaccaaaagaaacuuauguccaauaacgugcagaucgugagacagcagucuuacagcauuaugugcaucauuaaggaagagguccuggccuaugugguucaacucccccuguacggggugaucgauacaccuuguuggaaacugcauacgagcccccucugcaccacaaauaccaaggaaggauccaacaucugucugacacggaccgaccgcggcugguacugcgauaaugcugggucugucuccuucuuuccucaggccgagacguguaaggugcagagcaacagaguuuucugcgacacaaugaacucucuuacccugccgagcgaagugaaucucugcaaugucgauauuuuuaaccccaaauaugacuguaagaucaugaccuccaaaacagaugugucuagcuccgucauuaccagccugggagcgaucgugucuugcuacggcaagacaaaauguacggccuccaauaagaaccgggggauuaucaagaccuucagcaauggaugcgacuauguuucuaacaaaggcguggacacagucuccgugggcaauacccuuuacuguguuaacaagcaagaggggcagagccuguaugugaaaggagagccuaucauuaacuuuuacgauccccucgucuucccuuccgacgaauuugaugcuucuaucagccaggugaaugagaagauuaaccagucccuggccuucauccgcaaaucugacgaacugcuccacaaugugaacgcuggcaagagcacaaccaauauuaugaucacgaccauuaucaucguuauuaucgucauucugcuuucccugaucgccguggggcuccugcuguauugcaaggccagaugaggacuagugcaucacauuuaaaagcaucucagccuaccaugagaauaagagaaagaaaaugaagaucaauagcuuauucaucucuuuuucuuuuucguugguguaaagccaacacccugucuaaaaaacauaaauuucuuuaaucauuuugccucuuuucucugugcuucaauuaauaaaaaauggaaagaaccuagaucuaaaaaaaaaaaaaaaaaaaaaaaaaaaaaaaaaaaaaaaaaaaaaaaaaaaaaaaaaaaaaaaaugcaucccccccccccccccccccccccccccccccaaaggcucuuuucagagccaccagaauu

SEQ ID NO: 3102 - RNA, 1927 nt, Artificial Sequence
  mRNA product Design i-2 comprising derived and/or modified sequence from HRSV(A2)__F-del_DSCav1_mut2 (opt6)
ggggcgcugccuacggagguggcagccaucuccuucucggcaucaagcuuaccauggaacuccuaauacuuaaagccaaugcaauaaccacaauacuaacagcaguaacauucugcuuugcaucaggacaaaacauaacagaagaauuuuaccaaucaacauguucagcaguaagcaaaggauaccuaggagccuuacgcacagguugguacacuuccguaauaacaauagaacucucaaauauaaaagaaaacaaaugcaacggaaccgaugcaaaaguaaaacuaauaaaacaagaauuagacaaauacaaaaacgcaguaacagaccuacaauuacuuaugcaaucaacacccgcaacaggauccggcucagcaaucuguucaggaguagcaguaugcaaaguucuccaccuagaaggcgaaguaaacaaaauaaaaucagcccuauuaucuaccaauaaagcaguaguaucacuaucaaauggaguaucuguccuaaccuucaaaguacuugaccuaaaaaauuacaucgacaaacaauuacuaccaauacuuaacaaacaaucauguucaauaccaaacauugaaacaguaauagaauuucaacaaaaaaauaacagauuauuagaaauaacccgcgaauuuucaguuaacgcaggaguaacaacaccaguauccacauacauguuaacaaauucagaacucuuaucacuuauaaacgacaugcccauaacaaacgaccaaaaaaaacucaugucuaacaauguucaaauaguucgacaacaaucauacuccauaaugugcauaauaaaagaagaaguucuagcauauguuguacaacucccacucuaugguguuauagacacaccaugcuggaaacuacauacaagccccuuaugcacuacaaacacaaaagaaggcucuaauauaugucuaacccgcacagacagaggcugguauugcgauaacgcagguucaguaucauucuuuccacaagcagaaacuugcaaaguccaauccaauagagucuucugcgacacuaugaacucacucacacucccaucugaagucaauuuauguaacgucgauaucuucaacccaaaauacgacugcaaaauaaugaccucaaaaacagacguaagcucaucagucauaacuucucuaggcgcaaucgucucauguuacggcaaaacaaaauguaccgcaucaaacaaaaaucgagguauaauaaaaaccuuuucuaacggcugcgacuacguaucaaacaaaggaguagauacuguaagugucggaaacacauuauacugcgucaacaaacaagaaggacaaucccuauauguuaaaggcgaaccuaucauuaauuucuacgacccacucgucuuuccauccgacgaauuugacgcaucaauuucccaaguaaaugaaaaaauaaaccaaucccuugcauucauaagaaaaucagaugaacuauuacacaacguaaacgcaggcaaaucaacaacaaauauaaugaucacaacaauaauaaucguaauaauaguaauccuacucucacuaauagcaguaggcuuacuauuauauugcaaagccagauaaggacuagugcaucacauuuaaaagcaucucagccuaccaugagaauaagagaaagaaaaugaagaucaauagcuuauucaucucuuuuucuuuuucguugguguaaagccaacacccugucuaaaaaacauaaauuucuuuaaucauuuugccucuuuucucugugcuucaauuaauaaaaaauggaaagaaccuagaucuaaaaaaaaaaaaaaaaaaaaaaaaaaaaaaaaaaaaaaaaaaaaaaaaaaaaaaaaaaaaaaaaugcaucccccccccccccccccccccccccccccccaaaggcucuuuucagagccaccagaauu

SEQ ID NO: 3103 - RNA, 1927 nt, Artificial Sequence
  mRNA product Design i-2 comprising derived and/or modified sequence from HRSV(A2)__F-del_DSCav1_mut2 (opt11)
ggggcgcugccuacggagguggcagccaucuccuucucggcaucaagcuuaccauggaacuucuuauccuaaaagcgaacgccauaaccacaauccuaacagcagucaccuucuguuucgccucaggacaaaacaucaccgaggaauuuuaccaauccacauguagcgcugucucaaaaggcuaccucggcgcccuccgaaccggcugguacacauccguaauaacgaucgaacucuccaacauaaaagaaaauaaaugcaacggcaccgacgccaaagucaaacuuaucaaacaagaacuagacaaauacaaaaacgccgucaccgaccuccagcuccucaugcaauccaccccagcaacaggcuccggaagcgcaaucugcucaggcgucgccguaugcaaaguacuccaccucgaaggagaagucaacaaaaucaaauccgcccuccuauccacaaacaaagcaguugucucacucuccaacgggguaagcguacugaccuucaaaguccuagaccucaaaaacuacaucgauaaacaacuccuuccaauccucaacaaacaaucaugcucuauccccaacaucgaaaccguaaucgaauuucaacaaaaaaacaaccgccuacuugaaaucacacgcgaauuuagcgucaacgcaggaguaacaacacccguguccacauauaugcucacgaacagcgaacuacuaucccugauuaacgacaugcccaucaccaacgaccaaaaaaaacuaaugagcaacaacguacaaaucguccgccaacaaagcuacucuauaaugugcaucaucaaggaagaaguccuagccuacgucguccaauuaccacucuacggcgucaucgacacacccugcuggaaacuccauacauccccccucugcaccaccaacaccaaagaaggguccaacauaugccucacucgcacagaccgcggcugguacugcgacaacgcuggcagcgucagcuucuucccccaggccgaaaccugcaaaguccaauccaacagagucuucugcgacaccaugaacucgcucacccuccccuccgaggucaaccucugcaacgucgacauauucaaccccaaauacgacugcaaaaucaugaccuccaaaaccgacgucagcucaucagucaucacaucccucggggccaucgucuccugcuacggcaaaaccaagugcaccgccucaaacaaaaaccgcggcauuaucaaaacauucuccaacggcugcgacuacgucuccaacaaaggcgucgacacagucuccgucgguaacacccucuacugcguaaauaaacaagaaggccaaucccucuacgucaaaggcgaacccaucaucaacuucuacgacccucucgucuuccccuccgacgaauuugacgccucaaucagccaaguuaacgaaaaaaucaaccaaucacucgccuucauccgcaaauccgacgaacuccuccacaacguuaacgccggcaaaucuaccacgaacaucaugaucaccaccauaaucaucguaauuaucguaauacuccuaucccucauagcaguaggccuccuacucuacugcaaagcccguuaaggacuagugcaucacauuuaaaagcaucucagccuaccaugagaauaagagaaagaaaaugaagaucaauagcuuauucaucucuuuuucuuuuucguugguguaaagccaacacccugucuaaaaaacauaaauuucuuuaaucauuuugccucuuuucucugugcuucaauuaauaaaaaauggaaagaaccuagaucuaaaaaaaaaaaaaaaaaaaaaaaaaaaaaaaaaaaaaaaaaaaaaaaaaaaaaaaaaaaaaaaaugcaucccccccccccccccccccccccccccccccaaaggcucuuuucagagccaccagaauu

SEQ ID NO: 3104 - RNA, 1762 nt, Artificial Sequence
  mRNA product Design i-3 comprising derived and/or modified sequence from HRSV(A2)__F-del_DSCav1_mut2 (opt1) R6773
gggagaaagcuuaccauggagcugcucauccugaaggccaacgccaucaccaccauccugacggcggugaccuucugcuucgccagcggccagaacaucaccgaggaguucuaccaguccacgugcagcgccgucuccaagggguaccucggcgcccugcggaccggcugguacaccuccgugaucaccaucgagcugagcaacaucaaggagaacaagugcaacgggaccgacgccaaggugaagcucaucaagcaggagcuggacaaguacaagaacgcggucacggaccugcagcuccugaugcaguccaccccggcaaccggcuccggcuccgccaucugcagcggcgucgccgugugcaaggugcugcaccucgagggggaggucaacaagaucaagagcgcccugcuguccaccaacaaggccguggugagccucuccaacggcgucagcgugcugaccuucaaggugcuggaccucaagaacuacaucgacaagcagcugcugcccauccugaacaagcagagcugcuccauccccaacaucgagacggugaucgaguuccagcagaagaacaaccggcuccuggagaucacccgcgaguucagcgugaacgccggggucaccacccccguguccacguacaugcugaccaacagcgagcuccugucccugaucaacgacaugccgaucaccaacgaccagaagaagcucaugagcaacaacgugcagaucguccggcagcaguccuacagcaucaugugcaucaucaaggaggaggugcuggcguacgugguccagcugccccucuacggcgugaucgacacccccugcuggaagcugcacacgagcccccugugcaccaccaacaccaaggagggguccaacaucugccucacgcgcaccgaccggggcugguacugcgacaacgccggcagcgucuccuucuucccgcaggccgagaccugcaaggugcagagcaaccgcguguucugcgacaccaugaacucccugacgcugcccagcgagguaaaccucugcaacgucgacaucuucaaccccaaguacgacugcaagaucaugaccuccaagaccgacgugagcuccagcgugaucaccucccugggggccaucgucagcugcuacggcaagacgaagugcaccgccagcaacaagaaccgggggaucaucaagaccuucuccaacggcugcgacuacgugagcaacaagggcguggacaccguguccgucgggaacacccuguacugcgugaacaagcaggagggccagagccucuacgugaagggggagcccaucaucaacuucuacgacccgcuggucuuccccuccgacgaguucgacgcgagcaucucccaggugaacgagaagaucaaccagagccuggccuucauccgcaaguccgacgagcugcuccacaacgugaacgccggcaagagcacgaccaacaucaugaucaccaccaucaucaucgucaucaucgugauccugcugucccucaucgccguggggcugcugcucuacugcaaggcccggugaggacuaguuauaagacugacuagcccgaugggccucccaacgggcccuccuccccuccuugcaccgagauuaauaaaaaaaaaaaaaaaaaaaaaaaaaaaaaaaaaaaaaaaaaaaaaaaaaaaaaaaaaaaaaaaaugcaucccccccccccccccccccccccccccccccaaaggcucuuuucagagccaccagaauu

SEQ ID NO: 3105 - RNA, 1762 nt, Artificial Sequence
  mRNA product Design i-3 comprising derived and/or modified sequence from HRSV(A2)__F-del_DSCav1_mut2 (opt1)
gggagaaagcuuaccauggagcugcucauccugaaggccaacgccaucaccaccauccugacggcggugaccuucugcuucgccagcggccagaacaucaccgaggaguucuaccaguccacgugcagcgccgucuccaagggguaccucggcgcccugcgcaccgggugguacaccagcgugaucaccaucgagcuguccaacaucaaggagaacaagugcaacggcaccgacgccaaggugaagcucaucaagcaggagcuggacaaguacaagaacgcggucacggaccugcagcuccugaugcagagcacccccgccaccggguccggcagcgccaucugcuccggcguggccgugugcaagguccugcaccucgagggggaggugaacaagaucaagagcgcgcugcuguccaccaacaaggccguggucagccucuccaacggcgugagcgugcugacguucaagguccuggaccucaagaacuacaucgacaagcagcugcugccgauccucaacaagcaguccugcagcauccccaacaucgagaccgugaucgaguuccagcagaagaacaaccggcugcuggagaucacccgcgaguucuccgugaacgccggggucaccacgcccgugagcaccuacaugcucaccaacuccgagcugcugagccucaucaacgacaugcccaucaccaacgaccagaagaagcugaugagcaacaacgugcagaucguccggcagcaguccuacagcaucaugugcaucaucaaggaggaggugcuggccuacgugguccagcucccgcuguacggcgugaucgacacgcccugcuggaagcugcacaccagcccccucugcaccaccaacacgaaggagggguccaacaucugccugacccgcaccgaccggggcugguacugcgacaacgccggcuccgugagcuucuucccccaggcggagaccugcaagguccaguccaaccgcguguucugcgacacgaugaacagccugacccucccguccgaggucaaccugugcaacguggacaucuucaaccccaaguacgacugcaagaucaugaccagcaagaccgacguguccagcuccgucaucacgagccugggggccaucguguccugcuacggcaagaccaagugcaccgccagcaacaagaaccgggggaucaucaagaccuucuccaacggcugcgacuacgugagcaacaagggcgucgacacgguguccguggggaacacccucuacugcgucaacaagcaggagggccagagccuguacgugaagggggagcccaucaucaacuucuacgacccccugguguucccgagcgacgaguucgacgccuccaucagccaggucaacgagaagaucaaccagucccucgccuucauccgcaagagcgacgagcugcugcacaacgugaacgcgggcaaguccaccaccaacaucaugaucaccacgaucaucaucgugaucaucgucauccuccugagccugaucgccguggggcuccugcuguacugcaaggcccggugaggacuaguuauaagacugacuagcccgaugggccucccaacgggcccuccuccccuccuugcaccgagauuaauaaaaaaaaaaaaaaaaaaaaaaaaaaaaaaaaaaaaaaaaaaaaaaaaaaaaaaaaaaaaaaaaugcaucccccccccccccccccccccccccccccccaaaggcucuuuucagagccaccagaauu

SEQ ID NO: 3106 - RNA, 1762 nt, Artificial Sequence
  mRNA product Design i-3 comprising derived and/or modified sequence from HRSV(A2)__F-del_DSCav1_mut2 (opt2)
gggagaaagcuuaccauggagcuccucauccucaaggccaacgccaucaccaccauccucaccgccgucaccuucugcuucgccuccggccagaacaucaccgaggaguucuaccaguccaccugcuccgccgucuccaagggcuaccucggcgcccuccgcaccggcugguacaccuccgucaucaccaucgagcucuccaacaucaaggagaacaagugcaacggcaccgacgccaaggucaagcucaucaagcaggagcucgacaaguacaagaacgccgucaccgaccuccagcuccucaugcaguccacccccgccaccggcuccggcuccgccaucugcuccggcgucgccgucugcaagguccuccaccucgagggcgaggucaacaagaucaaguccgcccuccucuccaccaacaaggccgucgucucccucuccaacggcgucuccguccucaccuucaagguccucgaccucaagaacuacaucgacaagcagcuccuccccauccucaacaagcaguccugcuccauccccaacaucgagaccgucaucgaguuccagcagaagaacaaccgccuccucgagaucacccgcgaguucuccgucaacgccggcgucaccacccccgucuccaccuacaugcucaccaacuccgagcuccucucccucaucaacgacaugcccaucaccaacgaccagaagaagcucauguccaacaacguccagaucguccgccagcaguccuacuccaucaugugcaucaucaaggaggagguccucgccuacgucguccagcucccccucuacggcgucaucgacacccccugcuggaagcuccacaccuccccccucugcaccaccaacaccaaggagggcuccaacaucugccucacccgcaccgaccgcggcugguacugcgacaacgccggcuccgucuccuucuucccccaggccgagaccugcaagguccaguccaaccgcgucuucugcgacaccaugaacucccucacccuccccuccgaggucaaccucugcaacgucgacaucuucaaccccaaguacgacugcaagaucaugaccuccaagaccgacgucuccuccuccgucaucaccucccucggcgccaucgucuccugcuacggcaagaccaagugcaccgccuccaacaagaaccgcggcaucaucaagaccuucuccaacggcugcgacuacgucuccaacaagggcgucgacaccgucuccgucggcaacacccucuacugcgucaacaagcaggagggccagucccucuacgucaagggcgagcccaucaucaacuucuacgacccccucgucuuccccuccgacgaguucgacgccuccaucucccaggucaacgagaagaucaaccagucccucgccuucauccgcaaguccgacgagcuccuccacaacgucaacgccggcaaguccaccaccaacaucaugaucaccaccaucaucaucgucaucaucgucauccuccucucccucaucgccgucggccuccuccucuacugcaaggcccgcugaggacuaguuauaagacugacuagcccgaugggccucccaacgggcccuccuccccuccuugcaccgagauuaauaaaaaaaaaaaaaaaaaaaaaaaaaaaaaaaaaaaaaaaaaaaaaaaaaaaaaaaaaaaaaaaaugcaucccccccccccccccccccccccccccccccaaaggcucuuuucagagccaccagaauu

SEQ ID NO: 3107 - RNA, 1762 nt, Artificial Sequence
  mRNA product Design i-3 comprising derived and/or modified sequence from HRSV(A2)__F-del_DSCav1_mut2 (opt3)
gggagaaagcuuaccauggagcugcucauccuuaaggccaacgcuauuaccacaauacugacugcagugacguucugcuuugccagcggccagaauaucaccgaagaguucuaccaauccacauguucugcggucucaaaaggguauuugggagcuuuaagaacugguugguacaccaguguuauuacaaucgaacugagcaacauuaaggagaauaaaugcaacggcaccgacgccaaggugaaacuaaucaagcaggaacucgauaaguauaaaaaugcaguaacugaccugcagcuucugaugcaguccacacccgccaccgggucuggaucggcuauauguucaggcguggcagucugcaagguguugcaccucgagggugagguuaacaaaaucaagagcgcccugcugaguacgaauaaagcuguggucucccucucuaacggggugagcguauuaacuuuuaagguucuggaucuuaagaauuacauugacaaacaauugcugccuauccuaaacaagcaguccuguucaauuccaaauaucgaaaccgugauagaguuccagcagaaaaacaauaggcuccuggaaauuacacgggaguuuagugucaacgccggagugacuaccccggugagcacauauaugcuuaccaauucugagcuguugucccucaucaacgauaugcccauuacgaacgaccaaaagaaacugaugucaaauaacguccagaucguucgccagcagagcuacaguaucaugugcauuauaaaggaagagguguuagcguauguagugcaacugccucucuacggcgucaucgauacuccauguuggaaacuucauacaucuccccugugcaccacuaauacaaaggaaggcuccaacauuuguuugacccgaacggaccgugggugguacugcgauaaugcaggaagcgugucguucuuuccucaggccgagaccuguaagguucagucuaacagaguguucugcgacacaaugaacucccuaacucugccaucagaagucaaucucugcaauguggauaucuuuaaccccaaauaugacuguaagauaaugaccaguaaaacagauguaagcuccucuguuauuacuagccugggugcuaucgugucaugcuacggcaagaccaaauguacagccaguaauaagaacagggggaucauuaagaccuucuccaauggaugcgacuaugucagcaacaaaggcguggacacugucucuguggguaauacgcuuuacuguguuaacaagcaagaggggcagucacuguaugugaaaggagagccuaucauuaacuuuuacgauccauugguauucccgagugacgaauuugaugcaagcauaucccaggucaaugagaagaucaaccagucucucgcuuucauucggaaaucggacgaacuguuacacaaugugaacgccggcaagagcacaaccaauaucaugaucacuaccauuauaaucguuauuaucgugauucugcuaucccucaucgcggucggccugcuuuuguauugcaaggcccgcugaggacuaguuauaagacugacuagcccgaugggccucccaacgggcccuccuccccuccuugcaccgagauuaauaaaaaaaaaaaaaaaaaaaaaaaaaaaaaaaaaaaaaaaaaaaaaaaaaaaaaaaaaaaaaaaaugcaucccccccccccccccccccccccccccccccaaaggcucuuuucagagccaccagaauu

SEQ ID NO: 3108 - RNA, 1762 nt, Artificial Sequence
  mRNA product Design i-3 comprising derived and/or modified sequence from HRSV(A2)__F-del_DSCav1_mut2 (opt4)
gggagaaagcuuaccauggagcugcugauccugaaggccaacgccaucaccaccauccugaccgccgugaccuucugcuucgccagcggccagaacaucaccgaggaguucuaccagagcaccugcagcgccgugagcaagggcuaccugggcgcccugagaaccggcugguacaccagcgugaucaccaucgagcugagcaacaucaaggagaacaagugcaacggcaccgacgccaaggugaagcugaucaagcaggagcuggacaaguacaagaacgccgugaccgaccugcagcugcugaugcagagcacccccgccaccggcagcggcagcgccaucugcagcggcguggccgugugcaaggugcugcaccuggagggcgaggugaacaagaucaagagcgcccugcugagcaccaacaaggccguggugagccugagcaacggcgugagcgugcugaccuucaaggugcuggaccugaagaacuacaucgacaagcagcugcugcccauccugaacaagcagagcugcagcauccccaacaucgagaccgugaucgaguuccagcagaagaacaacagacugcuggagaucaccagagaguucagcgugaacgccggcgugaccacccccgugagcaccuacaugcugaccaacagcgagcugcugagccugaucaacgacaugcccaucaccaacgaccagaagaagcugaugagcaacaacgugcagaucgugagacagcagagcuacagcaucaugugcaucaucaaggaggaggugcuggccuacguggugcagcugccccuguacggcgugaucgacacccccugcuggaagcugcacaccagcccccugugcaccaccaacaccaaggagggcagcaacaucugccugaccagaaccgacagaggcugguacugcgacaacgccggcagcgugagcuucuucccccaggccgagaccugcaaggugcagagcaacagaguguucugcgacaccaugaacagccugacccugcccagcgaggugaaccugugcaacguggacaucuucaaccccaaguacgacugcaagaucaugaccagcaagaccgacgugagcagcagcgugaucaccagccugggcgccaucgugagcugcuacggcaagaccaagugcaccgccagcaacaagaacagaggcaucaucaagaccuucagcaacggcugcgacuacgugagcaacaagggcguggacaccgugagcgugggcaacacccuguacugcgugaacaagcaggagggccagagccuguacgugaagggcgagcccaucaucaacuucuacgacccccugguguuccccagcgacgaguucgacgccagcaucagccaggugaacgagaagaucaaccagagccuggccuucaucagaaagagcgacgagcugcugcacaacgugaacgccggcaagagcaccaccaacaucaugaucaccaccaucaucaucgugaucaucgugauccugcugagccugaucgccgugggccugcugcuguacugcaaggccagaugaggacuaguuauaagacugacuagcccgaugggccucccaacgggcccuccuccccuccuugcaccgagauuaauaaaaaaaaaaaaaaaaaaaaaaaaaaaaaaaaaaaaaaaaaaaaaaaaaaaaaaaaaaaaaaaaugcaucccccccccccccccccccccccccccccccaaaggcucuuuucagagccaccagaauu

SEQ ID NO: 3109 - RNA, 1762 nt, Artificial Sequence
  mRNA product Design i-3 comprising derived and/or modified sequence from HRSV(A2)__F-del_DSCav1_mut2 (opt5)
gggagaaagcuuaccauggagcugcucauccugaaggccaacgcuauuaccacaauccuuacggccgugaccuucugcuuugcgagcggccagaauauuacagaagaguucuaccaauccaccuguucugcugucagcaaaggguaucugggagcccucagaacaggcugguacaccuccguuaucacaauugaacugucuaacaucaaggagaauaaaugcaacgggaccgacgccaaggugaaacuuaucaagcaggaacuggauaaguauaaaaaugcugugacggaccuccagcugcugaugcagagcacccccgccacaggauccggcucugcuauuuguagcggggucgccgugugcaagguucuccaccuggagggagaggugaacaaaaucaaguccgcgcuucugagcaccaauaaagccgucgugucucucuccaacggcguuagcgugcugacauuuaagguccuugaucugaagaauuacauugacaaacaacuccugccuauccugaacaagcagucuuguuccauuccgaauaucgaaaccgugauugaguuccagcagaaaaacaaucggcuccuggaaaucacgcgcgaguuuagcgugaacgcuggcgucacaacccccguuucuacauauaugcuuaccaauuccgagcugcucagccugaucaacgauaugccuauuaccaacgaccaaaagaaacuuauguccaauaacgugcagaucgugagacagcagucuuacagcauuaugugcaucauuaaggaagagguccuggccuaugugguucaacucccccuguacggggugaucgauacaccuuguuggaaacugcauacgagcccccucugcaccacaaauaccaaggaaggauccaacaucugucugacacggaccgaccgcggcugguacugcgauaaugcugggucugucuccuucuuuccucaggccgagacguguaaggugcagagcaacagaguuuucugcgacacaaugaacucucuuacccugccgagcgaagugaaucucugcaaugucgauauuuuuaaccccaaauaugacuguaagaucaugaccuccaaaacagaugugucuagcuccgucauuaccagccugggagcgaucgugucuugcuacggcaagacaaaauguacggccuccaauaagaaccgggggauuaucaagaccuucagcaauggaugcgacuauguuucuaacaaaggcguggacacagucuccgugggcaauacccuuuacuguguuaacaagcaagaggggcagagccuguaugugaaaggagagccuaucauuaacuuuuacgauccccucgucuucccuuccgacgaauuugaugcuucuaucagccaggugaaugagaagauuaaccagucccuggccuucauccgcaaaucugacgaacugcuccacaaugugaacgcuggcaagagcacaaccaauauuaugaucacgaccauuaucaucguuauuaucgucauucugcuuucccugaucgccguggggcuccugcuguauugcaaggccagaugaggacuaguuauaagacugacuagcccgaugggccucccaacgggcccuccuccccuccuugcaccgagauuaauaaaaaaaaaaaaaaaaaaaaaaaaaaaaaaaaaaaaaaaaaaaaaaaaaaaaaaaaaaaaaaaaugcaucccccccccccccccccccccccccccccccaaaggcucuuuucagagccaccagaauu

SEQ ID NO: 3110 - RNA, 1762 nt, Artificial Sequence
  mRNA product Design i-3 comprising derived and/or modified sequence from HRSV(A2)__F-del_DSCav1_mut2 (opt6)
gggagaaagcuuaccauggaacuccuaauacuuaaagccaaugcaauaaccacaauacuaacagcaguaacauucugcuuugcaucaggacaaaacauaacagaagaauuuuaccaaucaacauguucagcaguaagcaaaggauaccuaggagccuuacgcacagguugguacacuuccguaauaacaauagaacucucaaauauaaaagaaaacaaaugcaacggaaccgaugcaaaaguaaaacuaauaaaacaagaauuagacaaauacaaaaacgcaguaacagaccuacaauuacuuaugcaaucaacacccgcaacaggauccggcucagcaaucuguucaggaguagcaguaugcaaaguucuccaccuagaaggcgaaguaaacaaaauaaaaucagcccuauuaucuaccaauaaagcaguaguaucacuaucaaauggaguaucuguccuaaccuucaaaguacuugaccuaaaaaauuacaucgacaaacaauuacuaccaauacuuaacaaacaaucauguucaauaccaaacauugaaacaguaauagaauuucaacaaaaaaauaacagauuauuagaaauaacccgcgaauuuucaguuaacgcaggaguaacaacaccaguauccacauacauguuaacaaauucagaacucuuaucacuuauaaacgacaugcccauaacaaacgaccaaaaaaaacucaugucuaacaauguucaaauaguucgacaacaaucauacuccauaaugugcauaauaaaagaagaaguucuagcauauguuguacaacucccacucuaugguguuauagacacaccaugcuggaaacuacauacaagccccuuaugcacuacaaacacaaaagaaggcucuaauauaugucuaacccgcacagacagaggcugguauugcgauaacgcagguucaguaucauucuuuccacaagcagaaacuugcaaaguccaauccaauagagucuucugcgacacuaugaacucacucacacucccaucugaagucaauuuauguaacgucgauaucuucaacccaaaauacgacugcaaaauaaugaccucaaaaacagacguaagcucaucagucauaacuucucuaggcgcaaucgucucauguuacggcaaaacaaaauguaccgcaucaaacaaaaaucgagguauaauaaaaaccuuuucuaacggcugcgacuacguaucaaacaaaggaguagauacuguaagugucggaaacacauuauacugcgucaacaaacaagaaggacaaucccuauauguuaaaggcgaaccuaucauuaauuucuacgacccacucgucuuuccauccgacgaauuugacgcaucaauuucccaaguaaaugaaaaaauaaaccaaucccuugcauucauaagaaaaucagaugaacuauuacacaacguaaacgcaggcaaaucaacaacaaauauaaugaucacaacaauaauaaucguaauaauaguaauccuacucucacuaauagcaguaggcuuacuauuauauugcaaagccagauaaggacuaguuauaagacugacuagcccgaugggccucccaacgggcccuccuccccuccuugcaccgagauuaauaaaaaaaaaaaaaaaaaaaaaaaaaaaaaaaaaaaaaaaaaaaaaaaaaaaaaaaaaaaaaaaaugcaucccccccccccccccccccccccccccccccaaaggcucuuuucagagccaccagaauu

SEQ ID NO: 3111 - RNA, 1762 nt, Artificial Sequence
  mRNA product Design i-3 comprising derived and/or modified sequence from HRSV(A2)__F-del_DSCav1_mut2 (opt11)
gggagaaagcuuaccauggaacuucuuauccuaaaagcgaacgccauaaccacaauccuaacagcagucaccuucuguuucgccucaggacaaaacaucaccgaggaauuuuaccaauccacauguagcgcugucucaaaaggcuaccucggcgcccuccgaaccggcugguacacauccguaauaacgaucgaacucuccaacauaaaagaaaauaaaugcaacggcaccgacgccaaagucaaacuuaucaaacaagaacuagacaaauacaaaaacgccgucaccgaccuccagcuccucaugcaauccaccccagcaacaggcuccggaagcgcaaucugcucaggcgucgccguaugcaaaguacuccaccucgaaggagaagucaacaaaaucaaauccgcccuccuauccacaaacaaagcaguugucucacucuccaacgggguaagcguacugaccuucaaaguccuagaccucaaaaacuacaucgauaaacaacuccuuccaauccucaacaaacaaucaugcucuauccccaacaucgaaaccguaaucgaauuucaacaaaaaaacaaccgccuacuugaaaucacacgcgaauuuagcgucaacgcaggaguaacaacacccguguccacauauaugcucacgaacagcgaacuacuaucccugauuaacgacaugcccaucaccaacgaccaaaaaaaacuaaugagcaacaacguacaaaucguccgccaacaaagcuacucuauaaugugcaucaucaaggaagaaguccuagccuacgucguccaauuaccacucuacggcgucaucgacacacccugcuggaaacuccauacauccccccucugcaccaccaacaccaaagaaggguccaacauaugccucacucgcacagaccgcggcugguacugcgacaacgcuggcagcgucagcuucuucccccaggccgaaaccugcaaaguccaauccaacagagucuucugcgacaccaugaacucgcucacccuccccuccgaggucaaccucugcaacgucgacauauucaaccccaaauacgacugcaaaaucaugaccuccaaaaccgacgucagcucaucagucaucacaucccucggggccaucgucuccugcuacggcaaaaccaagugcaccgccucaaacaaaaaccgcggcauuaucaaaacauucuccaacggcugcgacuacgucuccaacaaaggcgucgacacagucuccgucgguaacacccucuacugcguaaauaaacaagaaggccaaucccucuacgucaaaggcgaacccaucaucaacuucuacgacccucucgucuuccccuccgacgaauuugacgccucaaucagccaaguuaacgaaaaaaucaaccaaucacucgccuucauccgcaaauccgacgaacuccuccacaacguuaacgccggcaaaucuaccacgaacaucaugaucaccaccauaaucaucguaauuaucguaauacuccuaucccucauagcaguaggccuccuacucuacugcaaagcccguuaaggacuaguuauaagacugacuagcccgaugggccucccaacgggcccuccuccccuccuugcaccgagauuaauaaaaaaaaaaaaaaaaaaaaaaaaaaaaaaaaaaaaaaaaaaaaaaaaaaaaaaaaaaaaaaaaugcaucccccccccccccccccccccccccccccccaaaggcucuuuucagagccaccagaauu

SEQ ID NO: 3112 - protein, 535 aa, Artificial Sequence
  derived and/or modified protein sequence (artificial) from HRSV(A2)__F_DSCav1_mut3
MELLILKANAITTILTAVTFCFASGQNITEEFYQSTCSAVSKGYLGALRTGWYTSVITIELSNIKEIKCNGTDAKVKLIKQELDKYKNAVTDLQLLMQSTPATGSGSAICSGVAVCKVLHLEGEVNKIKSALLSTNKAVVSLSNGVSVLTFKVLDLKNYIDKQLLPILNKQSCSIPNIETVIEFQQKNNRLLEITREFSVNAGVTTPVSTYMLTNSELLSLINDMPITNDQKKLMSNNVQIVRQQSYSIMCIIKEEVLAYVVQLPLYGVIDTPCWKLHTSPLCTTNTKEGSNICLTRTDRGWYCDNAGSVSFFPQAETCKVQSNRVFCDTMNSLTLPSEVNLCNVDIFNPKYDCKIMTSKTDVSSSVITSLGAIVSCYGKTKCTASNKNRGIIKTFSNGCDYVSNKGVDTVSVGNTLYCVNKQEGQSLYVKGEPIINFYDPLVFPSDEFDASISQVNEKINQSLAFIRKSDELLHNVNAGKSTTNIMITTIIIVIIVILLSLIAVGLLLYCKARSTPVTLSKDQLSGINNIAFSN

SEQ ID NO: 3113 - RNA, 1608 nt, Artificial Sequence
  derived and/or modified CDS sequence (opt1) from HRSV(A2)__F_DSCav1_mut3
auggagcugcucauccugaaggccaacgccaucaccaccauccugacggcggugaccuucugcuucgccagcggccagaacaucaccgaggaguucuaccaguccacgugcagcgccgucuccaagggguaccucggcgcccugcggaccggcugguacaccuccgugaucaccaucgagcugagcaacaucaaggagaucaagugcaacgggaccgacgccaaggugaagcucaucaagcaggagcuggacaaguacaagaacgcggucacggaccugcagcuccugaugcaguccaccccggcaaccggcuccggcuccgccaucugcagcggcgucgccgugugcaaggugcugcaccucgagggggaggucaacaagaucaagagcgcccugcuguccaccaacaaggccguggugagccucuccaacggcgucagcgugcugaccuucaaggugcuggaccucaagaacuacaucgacaagcagcugcugcccauccugaacaagcagagcugcuccauccccaacaucgagacggugaucgaguuccagcagaagaacaaccggcuccuggagaucacccgcgaguucagcgugaacgccggggucaccacccccguguccacguacaugcugaccaacagcgagcuccugucccugaucaacgacaugccgaucaccaacgaccagaagaagcucaugagcaacaacgugcagaucguccggcagcaguccuacagcaucaugugcaucaucaaggaggaggugcuggcguacgugguccagcugccccucuacggcgugaucgacacccccugcuggaagcugcacacgagcccccugugcaccaccaacaccaaggagggguccaacaucugccucacgcgcaccgaccggggcugguacugcgacaacgccggcagcgucuccuucuucccgcaggccgagaccugcaaggugcagagcaaccgcguguucugcgacaccaugaacucccugacgcugcccagcgagguaaaccucugcaacgucgacaucuucaaccccaaguacgacugcaagaucaugaccuccaagaccgacgugagcuccagcgugaucaccucccugggggccaucgucagcugcuacggcaagacgaagugcaccgccagcaacaagaaccgggggaucaucaagaccuucuccaacggcugcgacuacgugagcaacaagggcguggacaccguguccgucgggaacacccuguacugcgugaacaagcaggagggccagagccucuacgugaagggggagcccaucaucaacuucuacgacccgcuggucuuccccuccgacgaguucgacgcgagcaucucccaggugaacgagaagaucaaccagagccuggccuucauccgcaaguccgacgagcugcuccacaacgugaacgccggcaagagcacgaccaacaucaugaucaccaccaucaucaucgucaucaucgugauccugcugucccucaucgccguggggcugcugcucuacugcaaggcccggagcacgcccgucacccuguccaaggaccagcugagcggcaucaacaacaucgcguucuccaacuga

SEQ ID NO: 3114 - RNA, 1608 nt, Artificial Sequence
  derived and/or modified CDS sequence (opt1) from HRSV(A2)__F_DSCav1_mut3
auggagcugcucauccugaaggccaacgccaucaccaccauccugacggcggugaccuucugcuucgccagcggccagaacaucaccgaggaguucuaccaguccacgugcagcgccgucuccaagggguaccucggcgcccugcgcaccgggugguacaccagcgugaucaccaucgagcuguccaacaucaaggagaucaagugcaacggcaccgacgccaaggugaagcucaucaagcaggagcuggacaaguacaagaacgcggucacggaccugcagcuccugaugcagagcacccccgccaccggguccggcagcgccaucugcuccggcguggccgugugcaagguccugcaccucgagggggaggugaacaagaucaagagcgcgcugcuguccaccaacaaggccguggucagccucuccaacggcgugagcgugcugacguucaagguccuggaccucaagaacuacaucgacaagcagcugcugccgauccucaacaagcaguccugcagcauccccaacaucgagaccgugaucgaguuccagcagaagaacaaccggcugcuggagaucacccgcgaguucuccgugaacgccggggucaccacgcccgugagcaccuacaugcucaccaacuccgagcugcugagccucaucaacgacaugcccaucaccaacgaccagaagaagcugaugagcaacaacgugcagaucguccggcagcaguccuacagcaucaugugcaucaucaaggaggaggugcuggccuacgugguccagcucccgcuguacggcgugaucgacacgcccugcuggaagcugcacaccagcccccucugcaccaccaacacgaaggagggguccaacaucugccugacccgcaccgaccggggcugguacugcgacaacgccggcuccgugagcuucuucccccaggcggagaccugcaagguccaguccaaccgcguguucugcgacacgaugaacagccugacccucccguccgaggucaaccugugcaacguggacaucuucaaccccaaguacgacugcaagaucaugaccagcaagaccgacguguccagcuccgucaucacgagccugggggccaucguguccugcuacggcaagaccaagugcaccgccagcaacaagaaccgggggaucaucaagaccuucuccaacggcugcgacuacgugagcaacaagggcgucgacacgguguccguggggaacacccucuacugcgucaacaagcaggagggccagagccuguacgugaagggggagcccaucaucaacuucuacgacccccugguguucccgagcgacgaguucgacgccuccaucagccaggucaacgagaagaucaaccagucccucgccuucauccgcaagagcgacgagcugcugcacaacgugaacgcgggcaaguccaccaccaacaucaugaucaccacgaucaucaucgugaucaucgucauccuccugagccugaucgccguggggcuccugcuguacugcaaggcccgguccacccccgugacccugagcaaggaccagcucuccggcaucaacaacaucgccuucagcaacuga

SEQ ID NO: 3115 - RNA, 1608 nt, Artificial Sequence
  derived and/or modified CDS sequence (opt2) from HRSV(A2)__F_DSCav1_mut3
auggagcuccucauccucaaggccaacgccaucaccaccauccucaccgccgucaccuucugcuucgccuccggccagaacaucaccgaggaguucuaccaguccaccugcuccgccgucuccaagggcuaccucggcgcccuccgcaccggcugguacaccuccgucaucaccaucgagcucuccaacaucaaggagaucaagugcaacggcaccgacgccaaggucaagcucaucaagcaggagcucgacaaguacaagaacgccgucaccgaccuccagcuccucaugcaguccacccccgccaccggcuccggcuccgccaucugcuccggcgucgccgucugcaagguccuccaccucgagggcgaggucaacaagaucaaguccgcccuccucuccaccaacaaggccgucgucucccucuccaacggcgucuccguccucaccuucaagguccucgaccucaagaacuacaucgacaagcagcuccuccccauccucaacaagcaguccugcuccauccccaacaucgagaccgucaucgaguuccagcagaagaacaaccgccuccucgagaucacccgcgaguucuccgucaacgccggcgucaccacccccgucuccaccuacaugcucaccaacuccgagcuccucucccucaucaacgacaugcccaucaccaacgaccagaagaagcucauguccaacaacguccagaucguccgccagcaguccuacuccaucaugugcaucaucaaggaggagguccucgccuacgucguccagcucccccucuacggcgucaucgacacccccugcuggaagcuccacaccuccccccucugcaccaccaacaccaaggagggcuccaacaucugccucacccgcaccgaccgcggcugguacugcgacaacgccggcuccgucuccuucuucccccaggccgagaccugcaagguccaguccaaccgcgucuucugcgacaccaugaacucccucacccuccccuccgaggucaaccucugcaacgucgacaucuucaaccccaaguacgacugcaagaucaugaccuccaagaccgacgucuccuccuccgucaucaccucccucggcgccaucgucuccugcuacggcaagaccaagugcaccgccuccaacaagaaccgcggcaucaucaagaccuucuccaacggcugcgacuacgucuccaacaagggcgucgacaccgucuccgucggcaacacccucuacugcgucaacaagcaggagggccagucccucuacgucaagggcgagcccaucaucaacuucuacgacccccucgucuuccccuccgacgaguucgacgccuccaucucccaggucaacgagaagaucaaccagucccucgccuucauccgcaaguccgacgagcuccuccacaacgucaacgccggcaaguccaccaccaacaucaugaucaccaccaucaucaucgucaucaucgucauccuccucucccucaucgccgucggccuccuccucuacugcaaggcccgcuccacccccgucacccucuccaaggaccagcucuccggcaucaacaacaucgccuucuccaacuga

SEQ ID NO: 3116 - RNA, 1608 nt, Artificial Sequence
  derived and/or modified CDS sequence (opt3) from HRSV(A2)__F_DSCav1_mut3
auggagcugcucauccuuaaggccaacgcuauuaccacaauacugacugcagugacguucugcuuugccagcggccagaauaucaccgaagaguucuaccaauccacauguucugcggucucaaaaggguauuugggagcuuuaagaacugguugguacaccaguguuauuacaaucgaacugagcaacauuaaggagaucaaaugcaauggcaccgacgccaaggugaaacuaauaaagcaggaacucgauaaguauaaaaacgcaguaacugaccugcagcuucugaugcaguccacacccgccaccgggucuggaucggcuaucuguucaggcguggcagucugcaagguguugcaccucgagggugagguuaauaaaauuaagagcgcccugcugaguacgaacaaagcuguggucucccucucuaauggggugagcguauuaacuuuuaagguucuggaucuuaagaacuacaucgacaaacaauugcugccuauucuaaauaagcaguccuguucaaucccaaacauagaaaccgugauugaguuccagcagaaaaauaacaggcuccuggaaaucacacgggaguuuagugucaaugccggagugacuaccccggugagcacauauaugcuuaccaacucugagcuguugucccucauuaaugauaugcccaucacgaacgaccaaaagaaacugaugucaaacaauguccagaucguucgccagcagagcuacaguauuaugugcauaaucaaggaagagguguuagcguauguagugcaacugccucucuacggcgucauugauacuccauguuggaaacuucauacaucuccccugugcaccacuaacacaaaggaaggcuccaauaucuguuugacccgaacggaccgugggugguacugcgauaacgcaggaagcgugucguucuuuccucaggccgagaccuguaagguucagucuaauagaguguucugcgacacaaugaacucccuaacucugccaucagaagucaaucucugcaacguggauauauuuaaucccaaauaugacuguaagauuaugaccaguaaaacagauguaagcuccucuguuaucacuagccugggugcuaucgugucaugcuacggcaagaccaaauguacagccaguaacaagaauagggggauuaucaagaccuucuccaacggaugcgacuaugucagcaauaaaggcguggacacugucucuguggguaacacgcuuuacuguguuaauaagcaagaggggcagucacuguaugugaaaggagagccuauuauaaacuuuuacgauccauugguauucccgagugacgaauuugaugcaagcaucucccaggucaacgagaagauuaaucagucucucgcuuucauccggaaaucggacgaacuguuacacaacgugaaugccggcaagagcacaaccaacaucaugauuacuaccauaaucauuguuaucauugugauccugcuaucccucauagcggucggccugcuuuuguauugcaaggcccgcucaacacccgugacccugaguaaagaucaacucucugggaucaauaacauugcauucagcaauuga

SEQ ID NO: 3117 - RNA, 1608 nt, Artificial Sequence
  derived and/or modified CDS sequence (opt4) from HRSV(A2)__F_DSCav1_mut3
auggagcugcugauccugaaggccaacgccaucaccaccauccugaccgccgugaccuucugcuucgccagcggccagaacaucaccgaggaguucuaccagagcaccugcagcgccgugagcaagggcuaccugggcgcccugagaaccggcugguacaccagcgugaucaccaucgagcugagcaacaucaaggagaucaagugcaacggcaccgacgccaaggugaagcugaucaagcaggagcuggacaaguacaagaacgccgugaccgaccugcagcugcugaugcagagcacccccgccaccggcagcggcagcgccaucugcagcggcguggccgugugcaaggugcugcaccuggagggcgaggugaacaagaucaagagcgcccugcugagcaccaacaaggccguggugagccugagcaacggcgugagcgugcugaccuucaaggugcuggaccugaagaacuacaucgacaagcagcugcugcccauccugaacaagcagagcugcagcauccccaacaucgagaccgugaucgaguuccagcagaagaacaacagacugcuggagaucaccagagaguucagcgugaacgccggcgugaccacccccgugagcaccuacaugcugaccaacagcgagcugcugagccugaucaacgacaugcccaucaccaacgaccagaagaagcugaugagcaacaacgugcagaucgugagacagcagagcuacagcaucaugugcaucaucaaggaggaggugcuggccuacguggugcagcugccccuguacggcgugaucgacacccccugcuggaagcugcacaccagcccccugugcaccaccaacaccaaggagggcagcaacaucugccugaccagaaccgacagaggcugguacugcgacaacgccggcagcgugagcuucuucccccaggccgagaccugcaaggugcagagcaacagaguguucugcgacaccaugaacagccugacccugcccagcgaggugaaccugugcaacguggacaucuucaaccccaaguacgacugcaagaucaugaccagcaagaccgacgugagcagcagcgugaucaccagccugggcgccaucgugagcugcuacggcaagaccaagugcaccgccagcaacaagaacagaggcaucaucaagaccuucagcaacggcugcgacuacgugagcaacaagggcguggacaccgugagcgugggcaacacccuguacugcgugaacaagcaggagggccagagccuguacgugaagggcgagcccaucaucaacuucuacgacccccugguguuccccagcgacgaguucgacgccagcaucagccaggugaacgagaagaucaaccagagccuggccuucaucagaaagagcgacgagcugcugcacaacgugaacgccggcaagagcaccaccaacaucaugaucaccaccaucaucaucgugaucaucgugauccugcugagccugaucgccgugggccugcugcuguacugcaaggccagaagcacccccgugacccugagcaaggaccagcugagcggcaucaacaacaucgccuucagcaacuga

SEQ ID NO: 3118 - RNA, 1608 nt, Artificial Sequence
  derived and/or modified CDS sequence (opt5) from HRSV(A2)__F_DSCav1_mut3
auggagcugcucauccugaaggccaacgcuauuaccacaauccuuacggccgugaccuucugcuuugcgagcggccagaauauuacagaagaguucuaccaauccaccuguucugcugucagcaaaggguaucugggagcccucagaacaggcugguacaccuccguuaucacaauugaacugucuaacaucaaggagaucaaaugcaaugggaccgacgccaaggugaaacuuauuaagcaggaacuggauaaguauaaaaacgcugugacggaccuccagcugcugaugcagagcacccccgccacaggauccggcucugcuaucuguagcggggucgccgugugcaagguucuccaccuggagggagaggugaauaaaauuaaguccgcgcuucugagcaccaacaaagccgucgugucucucuccaauggcguuagcgugcugacauuuaagguccuugaucugaagaacuacaucgacaaacaacuccugccuauucugaauaagcagucuuguuccaucccgaacauugaaaccgugaucgaguuccagcagaaaaauaaccggcuccuggaaaucacgcgcgaguuuagcgugaaugcuggcgucacaacccccguuucuacauauaugcuuaccaacuccgagcugcucagccugauuaaugauaugccuaucaccaacgaccaaaagaaacuuauguccaacaaugugcagauugugagacagcagucuuacagcaucaugugcauuaucaaggaagagguccuggccuaugugguucaacucccccuguacggggugaucgauacaccuuguuggaaacugcauacgagcccccucugcaccacaaacaccaaggaaggauccaauauuugucugacacggaccgaccgcggcugguacugcgauaacgcugggucugucuccuucuuuccucaggccgagacguguaaggugcagagcaauagaguuuucugcgacacaaugaacucucuuacccugccgagcgaagugaaucucugcaacgucgauaucuuuaaucccaaauaugacuguaagauuaugaccuccaaaacagaugugucuagcuccgucaucaccagccugggagcgauugugucuugcuacggcaagacaaaauguacggccuccaacaagaaucgggggaucaucaagaccuucagcaacggaugcgacuauguuucuaauaaaggcguggacacagucuccgugggcaacacccuuuacuguguuaauaagcaagaggggcagagccuguaugugaaaggagagccuauuaucaacuuuuacgauccccucgucuucccuuccgacgaauuugaugcuucuauuagccaggugaacgagaagaucaaucagucccuggccuucauucgcaaaucugacgaacugcuccacaacgugaaugcuggcaagagcacaaccaacaucaugauuacgaccaucaucauuguuaucauugucauccugcuuucccugauugccguggggcuccugcuguauugcaaggccagaagcacacccgugacccuuucuaaagaucaacucuccggaaucaauaacaucgcuuucagcaauuga

SEQ ID NO: 3119 - RNA, 1608 nt, Artificial Sequence
  derived and/or modified CDS sequence (opt6) from HRSV(A2)__F_DSCav1_mut3
auggaauuacucauacuaaaagccaaugccauaaccacuauucuaacagcaguaacauucuguuucgccucaggacaaaacauaacagaagaauuuuaucaauccaccuguuccgcagucucgaaaggcuaccuuggcgcacuaagaaccggaugguauacaucaguaauaaccauugaacuaucaaauaucaaagaaauaaaaugcaacggaacugacgcaaaagucaaacuaauaaaacaagaauuagacaaauacaaaaacgccguuacagacuuacaacuacuaaugcaaucaacuccagcaacaggaucaggaucugcuauaugcucaggugucgccguauguaaaguguuacaccucgaaggcgaaguaaacaaaauaaaaucagcacuacuauccacaaauaaagcaguaguaucacuauccaaugguguaucaguacucacauucaaaguacuagacuuaaaaaauuauauagauaaacaauuacuaccaauauuaaacaaacaaucaugcucaauaccaaacauagaaaccgucauugaauuucaacaaaaaaacaaucgacuucuugaaauaacacgagaauuuucaguaaaugccggaguaacaaccccagucucaacauacauguuaaccaacucugaacuccuaagccuaaucaacgacaugcccauaacuaacgaccaaaaaaaacuaauguccaauaauguccaaauaguaagacaacaauccuacucaauaaugugcauuauaaaagaagaaguccucgccuauguaguacaacuacccuuauacggaguaauugacacaccauguuggaaacuacauacaucaccacuaugcaccacuaacacaaaagaaggcuccaacauaugccuaacccgaacagaucgcggaugguauugcgacaacgcaggaaguguauccuucuuuccacaagcagaaacaugcaaaguacaauccaacagaguauucugugacaccaugaacucucuaacacuaccuuccgaaguaaauuuaugcaacguagacauauuuaaucccaaauacgacuguaaaauaaugaccucaaaaacugaugucucaucaucagucauuacaucacucggagcaauagucaguugcuauggaaaaaccaaaugcacagcuaguaacaaaaacagggguauaauaaaaacauuuucaaacggaugcgauuacguaucaaauaaaggaguagacaccguauccguaggaaauacucucuacugcguaaacaaacaagaaggacaaucccuauacguaaaaggcgaaccaaucauuaacuuuuacgacccacuuguauuuccaucagacgaauuugaugccucaauaucccaagucaaugaaaaaauaaaccaaagucuagcauucauccgaaaaucagaugaacuuuuacacaacguaaacgccggaaaaucaacaacaaacaucaugaucacaacaaucaucauaguaauaauaguuauacuacuuuccuuaauagcagucggccuacuacucuacugcaaagcacgauccacaccaguaaccuuaucuaaagaccaacucucaggcauaaacaacauagcauucucaaacuaa

SEQ ID NO: 3120 - RNA, 1608 nt, Artificial Sequence
  derived and/or modified CDS sequence (opt11) from HRSV(A2)__F_DSCav1_mut3
auggaacuccucauccuuaaagcaaacgccaucacaaccauccucacagcagucacuuucugcuucgcauccggacaaaacaucacagaagaguucuaucaauccacgugcuccgcaguuuccaaaggauaccuuggagccuuacgaaccggcugguacaccuccgucaucaccauagaacucagcaacaucaaagaaaucaaaugcaacggaaccgacgcaaaagucaaacucaucaaacaagaacuagacaaauacaaaaacgcagucaccgaccuccaacuacucaugcaaucaacccccgcaaccggcuccggcuccgccaucugcuccggaguagccguaugcaaaguccuccaccucgaaggcgaaguuaacaagaucaaguccgcacuccuaucaaccaacaaagcagucgucucccuauccaacggcgucuccguauuaacauucaaaguccucgaccucaaaaacuacauagacaaacagcuacuccccauccuaaacaaacaauccugcuccauccccaacaucgaaacugucaucgaguuccaacagaaaaacaaccgccuccuagaaaucacccgagaguucuccguaaacgccggcgucacuacccccgucucuaccuauaugcuaaccaacucugaacuccuaucccuaaucaacgauaugcccauaacuaacgaccaaaagaaacuuauguccaacaacguacaaauaguccggcaacaaucauacucuaucaugugcaucaucaaagaagaaguacuugccuacguuguccaacucccacuauacggcgucauagacacuccaugcuggaaacuucacaccucaccccucugcaccacuaacacuaaagaaggcucuaacaucugccuuacccgcaccgaccgcggaugguacugcgacaacgcaggcucaguuagcuucuucccacaagccgaaaccugcaaaguccagucaaaccgugucuucugcgauaccaugaacucgcucacccucccuuccgaagucaaccucugcaacgucgacaucuucaaccccaaauacgacugcaaaaucaugaccucaaaaaccgacguaucuucuuccgucaucaccucccucggcgccaucguauccugcuacggcaaaaccaaaugcacugcaucaaacaaaaaccgaggcaucaucaaaaccuucucgaacggaugcgacuacguauccaacaagggcgucgacacagucuccguugguaacacccucuacugcgucaacaaacaagaaggccaaucccuauacguaaaaggcgaacccaucaucaacuucuacgacccccucgucuuccccagugacgaauuugacgccuccaucucccaagucaacgaaaagaucaaccaaucccuugccuucauacgcaaauccgacgaacuccuacacaacguuaacgccggaaaaucaacaaccaacaucaugaucacaaccaucauaaucgucauaaucgucauacuccucucccucauagccgucggccugcuauuguacuguaaagcccgcuccacaccagucacacuuucaaaagaccaacucuccgggaucaacaacaucgccuucuccaacuaa

SEQ ID NO: 3121 - RNA, 1884 nt, Artificial Sequence
  mRNA product Design a-1 comprising derived and/or modified sequence from HRSV(A2)__F_DSCav1_mut3 (opt1)
gggagagucccgcagucggcguccagcggcucugcuuguucgugugugugucguugcaggccuuauucaagcuuaccauggagcugcucauccugaaggccaacgccaucaccaccauccugacggcggugaccuucugcuucgccagcggccagaacaucaccgaggaguucuaccaguccacgugcagcgccgucuccaagggguaccucggcgcccugcggaccggcugguacaccuccgugaucaccaucgagcugagcaacaucaaggagaucaagugcaacgggaccgacgccaaggugaagcucaucaagcaggagcuggacaaguacaagaacgcggucacggaccugcagcuccugaugcaguccaccccggcaaccggcuccggcuccgccaucugcagcggcgucgccgugugcaaggugcugcaccucgagggggaggucaacaagaucaagagcgcccugcuguccaccaacaaggccguggugagccucuccaacggcgucagcgugcugaccuucaaggugcuggaccucaagaacuacaucgacaagcagcugcugcccauccugaacaagcagagcugcuccauccccaacaucgagacggugaucgaguuccagcagaagaacaaccggcuccuggagaucacccgcgaguucagcgugaacgccggggucaccacccccguguccacguacaugcugaccaacagcgagcuccugucccugaucaacgacaugccgaucaccaacgaccagaagaagcucaugagcaacaacgugcagaucguccggcagcaguccuacagcaucaugugcaucaucaaggaggaggugcuggcguacgugguccagcugccccucuacggcgugaucgacacccccugcuggaagcugcacacgagcccccugugcaccaccaacaccaaggagggguccaacaucugccucacgcgcaccgaccggggcugguacugcgacaacgccggcagcgucuccuucuucccgcaggccgagaccugcaaggugcagagcaaccgcguguucugcgacaccaugaacucccugacgcugcccagcgagguaaaccucugcaacgucgacaucuucaaccccaaguacgacugcaagaucaugaccuccaagaccgacgugagcuccagcgugaucaccucccugggggccaucgucagcugcuacggcaagacgaagugcaccgccagcaacaagaaccgggggaucaucaagaccuucuccaacggcugcgacuacgugagcaacaagggcguggacaccguguccgucgggaacacccuguacugcgugaacaagcaggagggccagagccucuacgugaagggggagcccaucaucaacuucuacgacccgcuggucuuccccuccgacgaguucgacgcgagcaucucccaggugaacgagaagaucaaccagagccuggccuucauccgcaaguccgacgagcugcuccacaacgugaacgccggcaagagcacgaccaacaucaugaucaccaccaucaucaucgucaucaucgugauccugcugucccucaucgccguggggcugcugcucuacugcaaggcccggagcacgcccgucacccuguccaaggaccagcugagcggcaucaacaacaucgcguucuccaacugaggacuagucccuguucccagagcccacuuuuuuuucuuuuuuugaaauaaaauagccugucuuucagaucuaaaaaaaaaaaaaaaaaaaaaaaaaaaaaaaaaaaaaaaaaaaaaaaaaaaaaaaaaaaaaaaaugcaucccccccccccccccccccccccccccccccaaaggcucuuuucagagccaccagaauu

SEQ ID NO: 3122 - RNA, 1884 nt, Artificial Sequence
  mRNA product Design a-1 comprising derived and/or modified sequence from HRSV(A2)__F_DSCav1_mut3 (opt1)
gggagagucccgcagucggcguccagcggcucugcuuguucgugugugugucguugcaggccuuauucaagcuuaccauggagcugcucauccugaaggccaacgccaucaccaccauccugacggcggugaccuucugcuucgccagcggccagaacaucaccgaggaguucuaccaguccacgugcagcgccgucuccaagggguaccucggcgcccugcgcaccgggugguacaccagcgugaucaccaucgagcuguccaacaucaaggagaucaagugcaacggcaccgacgccaaggugaagcucaucaagcaggagcuggacaaguacaagaacgcggucacggaccugcagcuccugaugcagagcacccccgccaccggguccggcagcgccaucugcuccggcguggccgugugcaagguccugcaccucgagggggaggugaacaagaucaagagcgcgcugcuguccaccaacaaggccguggucagccucuccaacggcgugagcgugcugacguucaagguccuggaccucaagaacuacaucgacaagcagcugcugccgauccucaacaagcaguccugcagcauccccaacaucgagaccgugaucgaguuccagcagaagaacaaccggcugcuggagaucacccgcgaguucuccgugaacgccggggucaccacgcccgugagcaccuacaugcucaccaacuccgagcugcugagccucaucaacgacaugcccaucaccaacgaccagaagaagcugaugagcaacaacgugcagaucguccggcagcaguccuacagcaucaugugcaucaucaaggaggaggugcuggccuacgugguccagcucccgcuguacggcgugaucgacacgcccugcuggaagcugcacaccagcccccucugcaccaccaacacgaaggagggguccaacaucugccugacccgcaccgaccggggcugguacugcgacaacgccggcuccgugagcuucuucccccaggcggagaccugcaagguccaguccaaccgcguguucugcgacacgaugaacagccugacccucccguccgaggucaaccugugcaacguggacaucuucaaccccaaguacgacugcaagaucaugaccagcaagaccgacguguccagcuccgucaucacgagccugggggccaucguguccugcuacggcaagaccaagugcaccgccagcaacaagaaccgggggaucaucaagaccuucuccaacggcugcgacuacgugagcaacaagggcgucgacacgguguccguggggaacacccucuacugcgucaacaagcaggagggccagagccuguacgugaagggggagcccaucaucaacuucuacgacccccugguguucccgagcgacgaguucgacgccuccaucagccaggucaacgagaagaucaaccagucccucgccuucauccgcaagagcgacgagcugcugcacaacgugaacgcgggcaaguccaccaccaacaucaugaucaccacgaucaucaucgugaucaucgucauccuccugagccugaucgccguggggcuccugcuguacugcaaggcccgguccacccccgugacccugagcaaggaccagcucuccggcaucaacaacaucgccuucagcaacugaggacuagucccuguucccagagcccacuuuuuuuucuuuuuuugaaauaaaauagccugucuuucagaucuaaaaaaaaaaaaaaaaaaaaaaaaaaaaaaaaaaaaaaaaaaaaaaaaaaaaaaaaaaaaaaaaugcaucccccccccccccccccccccccccccccccaaaggcucuuuucagagccaccagaauu

SEQ ID NO: 3123 - RNA, 1884 nt, Artificial Sequence
  mRNA product Design a-1 comprising derived and/or modified sequence from HRSV(A2)__F_DSCav1_mut3 (opt2)
gggagagucccgcagucggcguccagcggcucugcuuguucgugugugugucguugcaggccuuauucaagcuuaccauggagcuccucauccucaaggccaacgccaucaccaccauccucaccgccgucaccuucugcuucgccuccggccagaacaucaccgaggaguucuaccaguccaccugcuccgccgucuccaagggcuaccucggcgcccuccgcaccggcugguacaccuccgucaucaccaucgagcucuccaacaucaaggagaucaagugcaacggcaccgacgccaaggucaagcucaucaagcaggagcucgacaaguacaagaacgccgucaccgaccuccagcuccucaugcaguccacccccgccaccggcuccggcuccgccaucugcuccggcgucgccgucugcaagguccuccaccucgagggcgaggucaacaagaucaaguccgcccuccucuccaccaacaaggccgucgucucccucuccaacggcgucuccguccucaccuucaagguccucgaccucaagaacuacaucgacaagcagcuccuccccauccucaacaagcaguccugcuccauccccaacaucgagaccgucaucgaguuccagcagaagaacaaccgccuccucgagaucacccgcgaguucuccgucaacgccggcgucaccacccccgucuccaccuacaugcucaccaacuccgagcuccucucccucaucaacgacaugcccaucaccaacgaccagaagaagcucauguccaacaacguccagaucguccgccagcaguccuacuccaucaugugcaucaucaaggaggagguccucgccuacgucguccagcucccccucuacggcgucaucgacacccccugcuggaagcuccacaccuccccccucugcaccaccaacaccaaggagggcuccaacaucugccucacccgcaccgaccgcggcugguacugcgacaacgccggcuccgucuccuucuucccccaggccgagaccugcaagguccaguccaaccgcgucuucugcgacaccaugaacucccucacccuccccuccgaggucaaccucugcaacgucgacaucuucaaccccaaguacgacugcaagaucaugaccuccaagaccgacgucuccuccuccgucaucaccucccucggcgccaucgucuccugcuacggcaagaccaagugcaccgccuccaacaagaaccgcggcaucaucaagaccuucuccaacggcugcgacuacgucuccaacaagggcgucgacaccgucuccgucggcaacacccucuacugcgucaacaagcaggagggccagucccucuacgucaagggcgagcccaucaucaacuucuacgacccccucgucuuccccuccgacgaguucgacgccuccaucucccaggucaacgagaagaucaaccagucccucgccuucauccgcaaguccgacgagcuccuccacaacgucaacgccggcaaguccaccaccaacaucaugaucaccaccaucaucaucgucaucaucgucauccuccucucccucaucgccgucggccuccuccucuacugcaaggcccgcuccacccccgucacccucuccaaggaccagcucuccggcaucaacaacaucgccuucuccaacugaggacuagucccuguucccagagcccacuuuuuuuucuuuuuuugaaauaaaauagccugucuuucagaucuaaaaaaaaaaaaaaaaaaaaaaaaaaaaaaaaaaaaaaaaaaaaaaaaaaaaaaaaaaaaaaaaugcaucccccccccccccccccccccccccccccccaaaggcucuuuucagagccaccagaauu

SEQ ID NO: 3124 - RNA, 1884 nt, Artificial Sequence
  mRNA product Design a-1 comprising derived and/or modified sequence from HRSV(A2)__F_DSCav1_mut3 (opt3)
gggagagucccgcagucggcguccagcggcucugcuuguucgugugugugucguugcaggccuuauucaagcuuaccauggagcugcucauccuuaaggccaacgcuauuaccacaauacugacugcagugacguucugcuuugccagcggccagaauaucaccgaagaguucuaccaauccacauguucugcggucucaaaaggguauuugggagcuuuaagaacugguugguacaccaguguuauuacaaucgaacugagcaacauuaaggagaucaaaugcaauggcaccgacgccaaggugaaacuaauaaagcaggaacucgauaaguauaaaaacgcaguaacugaccugcagcuucugaugcaguccacacccgccaccgggucuggaucggcuaucuguucaggcguggcagucugcaagguguugcaccucgagggugagguuaauaaaauuaagagcgcccugcugaguacgaacaaagcuguggucucccucucuaauggggugagcguauuaacuuuuaagguucuggaucuuaagaacuacaucgacaaacaauugcugccuauucuaaauaagcaguccuguucaaucccaaacauagaaaccgugauugaguuccagcagaaaaauaacaggcuccuggaaaucacacgggaguuuagugucaaugccggagugacuaccccggugagcacauauaugcuuaccaacucugagcuguugucccucauuaaugauaugcccaucacgaacgaccaaaagaaacugaugucaaacaauguccagaucguucgccagcagagcuacaguauuaugugcauaaucaaggaagagguguuagcguauguagugcaacugccucucuacggcgucauugauacuccauguuggaaacuucauacaucuccccugugcaccacuaacacaaaggaaggcuccaauaucuguuugacccgaacggaccgugggugguacugcgauaacgcaggaagcgugucguucuuuccucaggccgagaccuguaagguucagucuaauagaguguucugcgacacaaugaacucccuaacucugccaucagaagucaaucucugcaacguggauauauuuaaucccaaauaugacuguaagauuaugaccaguaaaacagauguaagcuccucuguuaucacuagccugggugcuaucgugucaugcuacggcaagaccaaauguacagccaguaacaagaauagggggauuaucaagaccuucuccaacggaugcgacuaugucagcaauaaaggcguggacacugucucuguggguaacacgcuuuacuguguuaauaagcaagaggggcagucacuguaugugaaaggagagccuauuauaaacuuuuacgauccauugguauucccgagugacgaauuugaugcaagcaucucccaggucaacgagaagauuaaucagucucucgcuuucauccggaaaucggacgaacuguuacacaacgugaaugccggcaagagcacaaccaacaucaugauuacuaccauaaucauuguuaucauugugauccugcuaucccucauagcggucggccugcuuuuguauugcaaggcccgcucaacacccgugacccugaguaaagaucaacucucugggaucaauaacauugcauucagcaauugaggacuagucccuguucccagagcccacuuuuuuuucuuuuuuugaaauaaaauagccugucuuucagaucuaaaaaaaaaaaaaaaaaaaaaaaaaaaaaaaaaaaaaaaaaaaaaaaaaaaaaaaaaaaaaaaaugcaucccccccccccccccccccccccccccccccaaaggcucuuuucagagccaccagaauu

SEQ ID NO: 3125 - RNA, 1884 nt, Artificial Sequence
  mRNA product Design a-1 comprising derived and/or modified sequence from HRSV(A2)__F_DSCav1_mut3 (opt4)
gggagagucccgcagucggcguccagcggcucugcuuguucgugugugugucguugcaggccuuauucaagcuuaccauggagcugcugauccugaaggccaacgccaucaccaccauccugaccgccgugaccuucugcuucgccagcggccagaacaucaccgaggaguucuaccagagcaccugcagcgccgugagcaagggcuaccugggcgcccugagaaccggcugguacaccagcgugaucaccaucgagcugagcaacaucaaggagaucaagugcaacggcaccgacgccaaggugaagcugaucaagcaggagcuggacaaguacaagaacgccgugaccgaccugcagcugcugaugcagagcacccccgccaccggcagcggcagcgccaucugcagcggcguggccgugugcaaggugcugcaccuggagggcgaggugaacaagaucaagagcgcccugcugagcaccaacaaggccguggugagccugagcaacggcgugagcgugcugaccuucaaggugcuggaccugaagaacuacaucgacaagcagcugcugcccauccugaacaagcagagcugcagcauccccaacaucgagaccgugaucgaguuccagcagaagaacaacagacugcuggagaucaccagagaguucagcgugaacgccggcgugaccacccccgugagcaccuacaugcugaccaacagcgagcugcugagccugaucaacgacaugcccaucaccaacgaccagaagaagcugaugagcaacaacgugcagaucgugagacagcagagcuacagcaucaugugcaucaucaaggaggaggugcuggccuacguggugcagcugccccuguacggcgugaucgacacccccugcuggaagcugcacaccagcccccugugcaccaccaacaccaaggagggcagcaacaucugccugaccagaaccgacagaggcugguacugcgacaacgccggcagcgugagcuucuucccccaggccgagaccugcaaggugcagagcaacagaguguucugcgacaccaugaacagccugacccugcccagcgaggugaaccugugcaacguggacaucuucaaccccaaguacgacugcaagaucaugaccagcaagaccgacgugagcagcagcgugaucaccagccugggcgccaucgugagcugcuacggcaagaccaagugcaccgccagcaacaagaacagaggcaucaucaagaccuucagcaacggcugcgacuacgugagcaacaagggcguggacaccgugagcgugggcaacacccuguacugcgugaacaagcaggagggccagagccuguacgugaagggcgagcccaucaucaacuucuacgacccccugguguuccccagcgacgaguucgacgccagcaucagccaggugaacgagaagaucaaccagagccuggccuucaucagaaagagcgacgagcugcugcacaacgugaacgccggcaagagcaccaccaacaucaugaucaccaccaucaucaucgugaucaucgugauccugcugagccugaucgccgugggccugcugcuguacugcaaggccagaagcacccccgugacccugagcaaggaccagcugagcggcaucaacaacaucgccuucagcaacugaggacuagucccuguucccagagcccacuuuuuuuucuuuuuuugaaauaaaauagccugucuuucagaucuaaaaaaaaaaaaaaaaaaaaaaaaaaaaaaaaaaaaaaaaaaaaaaaaaaaaaaaaaaaaaaaaugcaucccccccccccccccccccccccccccccccaaaggcucuuuucagagccaccagaauu

SEQ ID NO: 3126 - RNA, 1884 nt, Artificial Sequence
  mRNA product Design a-1 comprising derived and/or modified sequence from HRSV(A2)__F_DSCav1_mut3 (opt5)
gggagagucccgcagucggcguccagcggcucugcuuguucgugugugugucguugcaggccuuauucaagcuuaccauggagcugcucauccugaaggccaacgcuauuaccacaauccuuacggccgugaccuucugcuuugcgagcggccagaauauuacagaagaguucuaccaauccaccuguucugcugucagcaaaggguaucugggagcccucagaacaggcugguacaccuccguuaucacaauugaacugucuaacaucaaggagaucaaaugcaaugggaccgacgccaaggugaaacuuauuaagcaggaacuggauaaguauaaaaacgcugugacggaccuccagcugcugaugcagagcacccccgccacaggauccggcucugcuaucuguagcggggucgccgugugcaagguucuccaccuggagggagaggugaauaaaauuaaguccgcgcuucugagcaccaacaaagccgucgugucucucuccaauggcguuagcgugcugacauuuaagguccuugaucugaagaacuacaucgacaaacaacuccugccuauucugaauaagcagucuuguuccaucccgaacauugaaaccgugaucgaguuccagcagaaaaauaaccggcuccuggaaaucacgcgcgaguuuagcgugaaugcuggcgucacaacccccguuucuacauauaugcuuaccaacuccgagcugcucagccugauuaaugauaugccuaucaccaacgaccaaaagaaacuuauguccaacaaugugcagauugugagacagcagucuuacagcaucaugugcauuaucaaggaagagguccuggccuaugugguucaacucccccuguacggggugaucgauacaccuuguuggaaacugcauacgagcccccucugcaccacaaacaccaaggaaggauccaauauuugucugacacggaccgaccgcggcugguacugcgauaacgcugggucugucuccuucuuuccucaggccgagacguguaaggugcagagcaauagaguuuucugcgacacaaugaacucucuuacccugccgagcgaagugaaucucugcaacgucgauaucuuuaaucccaaauaugacuguaagauuaugaccuccaaaacagaugugucuagcuccgucaucaccagccugggagcgauugugucuugcuacggcaagacaaaauguacggccuccaacaagaaucgggggaucaucaagaccuucagcaacggaugcgacuauguuucuaauaaaggcguggacacagucuccgugggcaacacccuuuacuguguuaauaagcaagaggggcagagccuguaugugaaaggagagccuauuaucaacuuuuacgauccccucgucuucccuuccgacgaauuugaugcuucuauuagccaggugaacgagaagaucaaucagucccuggccuucauucgcaaaucugacgaacugcuccacaacgugaaugcuggcaagagcacaaccaacaucaugauuacgaccaucaucauuguuaucauugucauccugcuuucccugauugccguggggcuccugcuguauugcaaggccagaagcacacccgugacccuuucuaaagaucaacucuccggaaucaauaacaucgcuuucagcaauugaggacuagucccuguucccagagcccacuuuuuuuucuuuuuuugaaauaaaauagccugucuuucagaucuaaaaaaaaaaaaaaaaaaaaaaaaaaaaaaaaaaaaaaaaaaaaaaaaaaaaaaaaaaaaaaaaugcaucccccccccccccccccccccccccccccccaaaggcucuuuucagagccaccagaauu

SEQ ID NO: 3127 - RNA, 1884 nt, Artificial Sequence
  mRNA product Design a-1 comprising derived and/or modified sequence from HRSV(A2)__F_DSCav1_mut3 (opt6)
gggagagucccgcagucggcguccagcggcucugcuuguucgugugugugucguugcaggccuuauucaagcuuaccauggaauuacucauacuaaaagccaaugccauaaccacuauucuaacagcaguaacauucuguuucgccucaggacaaaacauaacagaagaauuuuaucaauccaccuguuccgcagucucgaaaggcuaccuuggcgcacuaagaaccggaugguauacaucaguaauaaccauugaacuaucaaauaucaaagaaauaaaaugcaacggaacugacgcaaaagucaaacuaauaaaacaagaauuagacaaauacaaaaacgccguuacagacuuacaacuacuaaugcaaucaacuccagcaacaggaucaggaucugcuauaugcucaggugucgccguauguaaaguguuacaccucgaaggcgaaguaaacaaaauaaaaucagcacuacuauccacaaauaaagcaguaguaucacuauccaaugguguaucaguacucacauucaaaguacuagacuuaaaaaauuauauagauaaacaauuacuaccaauauuaaacaaacaaucaugcucaauaccaaacauagaaaccgucauugaauuucaacaaaaaaacaaucgacuucuugaaauaacacgagaauuuucaguaaaugccggaguaacaaccccagucucaacauacauguuaaccaacucugaacuccuaagccuaaucaacgacaugcccauaacuaacgaccaaaaaaaacuaauguccaauaauguccaaauaguaagacaacaauccuacucaauaaugugcauuauaaaagaagaaguccucgccuauguaguacaacuacccuuauacggaguaauugacacaccauguuggaaacuacauacaucaccacuaugcaccacuaacacaaaagaaggcuccaacauaugccuaacccgaacagaucgcggaugguauugcgacaacgcaggaaguguauccuucuuuccacaagcagaaacaugcaaaguacaauccaacagaguauucugugacaccaugaacucucuaacacuaccuuccgaaguaaauuuaugcaacguagacauauuuaaucccaaauacgacuguaaaauaaugaccucaaaaacugaugucucaucaucagucauuacaucacucggagcaauagucaguugcuauggaaaaaccaaaugcacagcuaguaacaaaaacagggguauaauaaaaacauuuucaaacggaugcgauuacguaucaaauaaaggaguagacaccguauccguaggaaauacucucuacugcguaaacaaacaagaaggacaaucccuauacguaaaaggcgaaccaaucauuaacuuuuacgacccacuuguauuuccaucagacgaauuugaugccucaauaucccaagucaaugaaaaaauaaaccaaagucuagcauucauccgaaaaucagaugaacuuuuacacaacguaaacgccggaaaaucaacaacaaacaucaugaucacaacaaucaucauaguaauaauaguuauacuacuuuccuuaauagcagucggccuacuacucuacugcaaagcacgauccacaccaguaaccuuaucuaaagaccaacucucaggcauaaacaacauagcauucucaaacuaaggacuagucccuguucccagagcccacuuuuuuuucuuuuuuugaaauaaaauagccugucuuucagaucuaaaaaaaaaaaaaaaaaaaaaaaaaaaaaaaaaaaaaaaaaaaaaaaaaaaaaaaaaaaaaaaaugcaucccccccccccccccccccccccccccccccaaaggcucuuuucagagccaccagaauu

SEQ ID NO: 3128 - RNA, 1884 nt, Artificial Sequence
  mRNA product Design a-1 comprising derived and/or modified sequence from HRSV(A2)__F_DSCav1_mut3 (opt11)
gggagagucccgcagucggcguccagcggcucugcuuguucgugugugugucguugcaggccuuauucaagcuuaccauggaacuccucauccuuaaagcaaacgccaucacaaccauccucacagcagucacuuucugcuucgcauccggacaaaacaucacagaagaguucuaucaauccacgugcuccgcaguuuccaaaggauaccuuggagccuuacgaaccggcugguacaccuccgucaucaccauagaacucagcaacaucaaagaaaucaaaugcaacggaaccgacgcaaaagucaaacucaucaaacaagaacuagacaaauacaaaaacgcagucaccgaccuccaacuacucaugcaaucaacccccgcaaccggcuccggcuccgccaucugcuccggaguagccguaugcaaaguccuccaccucgaaggcgaaguuaacaagaucaaguccgcacuccuaucaaccaacaaagcagucgucucccuauccaacggcgucuccguauuaacauucaaaguccucgaccucaaaaacuacauagacaaacagcuacuccccauccuaaacaaacaauccugcuccauccccaacaucgaaacugucaucgaguuccaacagaaaaacaaccgccuccuagaaaucacccgagaguucuccguaaacgccggcgucacuacccccgucucuaccuauaugcuaaccaacucugaacuccuaucccuaaucaacgauaugcccauaacuaacgaccaaaagaaacuuauguccaacaacguacaaauaguccggcaacaaucauacucuaucaugugcaucaucaaagaagaaguacuugccuacguuguccaacucccacuauacggcgucauagacacuccaugcuggaaacuucacaccucaccccucugcaccacuaacacuaaagaaggcucuaacaucugccuuacccgcaccgaccgcggaugguacugcgacaacgcaggcucaguuagcuucuucccacaagccgaaaccugcaaaguccagucaaaccgugucuucugcgauaccaugaacucgcucacccucccuuccgaagucaaccucugcaacgucgacaucuucaaccccaaauacgacugcaaaaucaugaccucaaaaaccgacguaucuucuuccgucaucaccucccucggcgccaucguauccugcuacggcaaaaccaaaugcacugcaucaaacaaaaaccgaggcaucaucaaaaccuucucgaacggaugcgacuacguauccaacaagggcgucgacacagucuccguugguaacacccucuacugcgucaacaaacaagaaggccaaucccuauacguaaaaggcgaacccaucaucaacuucuacgacccccucgucuuccccagugacgaauuugacgccuccaucucccaagucaacgaaaagaucaaccaaucccuugccuucauacgcaaauccgacgaacuccuacacaacguuaacgccggaaaaucaacaaccaacaucaugaucacaaccaucauaaucgucauaaucgucauacuccucucccucauagccgucggccugcuauuguacuguaaagcccgcuccacaccagucacacuuucaaaagaccaacucuccgggaucaacaacaucgccuucuccaacuaaggacuagucccuguucccagagcccacuuuuuuuucuuuuuuugaaauaaaauagccugucuuucagaucuaaaaaaaaaaaaaaaaaaaaaaaaaaaaaaaaaaaaaaaaaaaaaaaaaaaaaaaaaaaaaaaaugcaucccccccccccccccccccccccccccccccaaaggcucuuuucagagccaccagaauu

SEQ ID NO: 3129 - RNA, 1903 nt, Artificial Sequence
  mRNA product Design a-2 comprising derived and/or modified sequence from HRSV(A2)__F_DSCav1_mut3 (opt1)
gggagaguccgcucagccagguugcagaagcggcuuagcguguguccuaaucuucucucugcguguagguaggccugugccgcaaacaagcuuaccauggagcugcucauccugaaggccaacgccaucaccaccauccugacggcggugaccuucugcuucgccagcggccagaacaucaccgaggaguucuaccaguccacgugcagcgccgucuccaagggguaccucggcgcccugcggaccggcugguacaccuccgugaucaccaucgagcugagcaacaucaaggagaucaagugcaacgggaccgacgccaaggugaagcucaucaagcaggagcuggacaaguacaagaacgcggucacggaccugcagcuccugaugcaguccaccccggcaaccggcuccggcuccgccaucugcagcggcgucgccgugugcaaggugcugcaccucgagggggaggucaacaagaucaagagcgcccugcuguccaccaacaaggccguggugagccucuccaacggcgucagcgugcugaccuucaaggugcuggaccucaagaacuacaucgacaagcagcugcugcccauccugaacaagcagagcugcuccauccccaacaucgagacggugaucgaguuccagcagaagaacaaccggcuccuggagaucacccgcgaguucagcgugaacgccggggucaccacccccguguccacguacaugcugaccaacagcgagcuccugucccugaucaacgacaugccgaucaccaacgaccagaagaagcucaugagcaacaacgugcagaucguccggcagcaguccuacagcaucaugugcaucaucaaggaggaggugcuggcguacgugguccagcugccccucuacggcgugaucgacacccccugcuggaagcugcacacgagcccccugugcaccaccaacaccaaggagggguccaacaucugccucacgcgcaccgaccggggcugguacugcgacaacgccggcagcgucuccuucuucccgcaggccgagaccugcaaggugcagagcaaccgcguguucugcgacaccaugaacucccugacgcugcccagcgagguaaaccucugcaacgucgacaucuucaaccccaaguacgacugcaagaucaugaccuccaagaccgacgugagcuccagcgugaucaccucccugggggccaucgucagcugcuacggcaagacgaagugcaccgccagcaacaagaaccgggggaucaucaagaccuucuccaacggcugcgacuacgugagcaacaagggcguggacaccguguccgucgggaacacccuguacugcgugaacaagcaggagggccagagccucuacgugaagggggagcccaucaucaacuucuacgacccgcuggucuuccccuccgacgaguucgacgcgagcaucucccaggugaacgagaagaucaaccagagccuggccuucauccgcaaguccgacgagcugcuccacaacgugaacgccggcaagagcacgaccaacaucaugaucaccaccaucaucaucgucaucaucgugauccugcugucccucaucgccguggggcugcugcucuacugcaaggcccggagcacgcccgucacccuguccaaggaccagcugagcggcaucaacaacaucgcguucuccaacugaggacuagucccuguucccagagcccacuuuuuuuucuuuuuuugaaauaaaauagccugucuuucagaucuaaaaaaaaaaaaaaaaaaaaaaaaaaaaaaaaaaaaaaaaaaaaaaaaaaaaaaaaaaaaaaaaugcaucccccccccccccccccccccccccccccccaaaggcucuuuucagagccaccagaauu

SEQ ID NO: 3130 - RNA, 1903 nt, Artificial Sequence
  mRNA product Design a-2 comprising derived and/or modified sequence from HRSV(A2)__F_DSCav1_mut3 (opt1)
gggagaguccgcucagccagguugcagaagcggcuuagcguguguccuaaucuucucucugcguguagguaggccugugccgcaaacaagcuuaccauggagcugcucauccugaaggccaacgccaucaccaccauccugacggcggugaccuucugcuucgccagcggccagaacaucaccgaggaguucuaccaguccacgugcagcgccgucuccaagggguaccucggcgcccugcgcaccgggugguacaccagcgugaucaccaucgagcuguccaacaucaaggagaucaagugcaacggcaccgacgccaaggugaagcucaucaagcaggagcuggacaaguacaagaacgcggucacggaccugcagcuccugaugcagagcacccccgccaccggguccggcagcgccaucugcuccggcguggccgugugcaagguccugcaccucgagggggaggugaacaagaucaagagcgcgcugcuguccaccaacaaggccguggucagccucuccaacggcgugagcgugcugacguucaagguccuggaccucaagaacuacaucgacaagcagcugcugccgauccucaacaagcaguccugcagcauccccaacaucgagaccgugaucgaguuccagcagaagaacaaccggcugcuggagaucacccgcgaguucuccgugaacgccggggucaccacgcccgugagcaccuacaugcucaccaacuccgagcugcugagccucaucaacgacaugcccaucaccaacgaccagaagaagcugaugagcaacaacgugcagaucguccggcagcaguccuacagcaucaugugcaucaucaaggaggaggugcuggccuacgugguccagcucccgcuguacggcgugaucgacacgcccugcuggaagcugcacaccagcccccucugcaccaccaacacgaaggagggguccaacaucugccugacccgcaccgaccggggcugguacugcgacaacgccggcuccgugagcuucuucccccaggcggagaccugcaagguccaguccaaccgcguguucugcgacacgaugaacagccugacccucccguccgaggucaaccugugcaacguggacaucuucaaccccaaguacgacugcaagaucaugaccagcaagaccgacguguccagcuccgucaucacgagccugggggccaucguguccugcuacggcaagaccaagugcaccgccagcaacaagaaccgggggaucaucaagaccuucuccaacggcugcgacuacgugagcaacaagggcgucgacacgguguccguggggaacacccucuacugcgucaacaagcaggagggccagagccuguacgugaagggggagcccaucaucaacuucuacgacccccugguguucccgagcgacgaguucgacgccuccaucagccaggucaacgagaagaucaaccagucccucgccuucauccgcaagagcgacgagcugcugcacaacgugaacgcgggcaaguccaccaccaacaucaugaucaccacgaucaucaucgugaucaucgucauccuccugagccugaucgccguggggcuccugcuguacugcaaggcccgguccacccccgugacccugagcaaggaccagcucuccggcaucaacaacaucgccuucagcaacugaggacuagucccuguucccagagcccacuuuuuuuucuuuuuuugaaauaaaauagccugucuuucagaucuaaaaaaaaaaaaaaaaaaaaaaaaaaaaaaaaaaaaaaaaaaaaaaaaaaaaaaaaaaaaaaaaugcaucccccccccccccccccccccccccccccccaaaggcucuuuucagagccaccagaauu

SEQ ID NO: 3131 - RNA, 1903 nt, Artificial Sequence
  mRNA product Design a-2 comprising derived and/or modified sequence from HRSV(A2)__F_DSCav1_mut3 (opt2)
gggagaguccgcucagccagguugcagaagcggcuuagcguguguccuaaucuucucucugcguguagguaggccugugccgcaaacaagcuuaccauggagcuccucauccucaaggccaacgccaucaccaccauccucaccgccgucaccuucugcuucgccuccggccagaacaucaccgaggaguucuaccaguccaccugcuccgccgucuccaagggcuaccucggcgcccuccgcaccggcugguacaccuccgucaucaccaucgagcucuccaacaucaaggagaucaagugcaacggcaccgacgccaaggucaagcucaucaagcaggagcucgacaaguacaagaacgccgucaccgaccuccagcuccucaugcaguccacccccgccaccggcuccggcuccgccaucugcuccggcgucgccgucugcaagguccuccaccucgagggcgaggucaacaagaucaaguccgcccuccucuccaccaacaaggccgucgucucccucuccaacggcgucuccguccucaccuucaagguccucgaccucaagaacuacaucgacaagcagcuccuccccauccucaacaagcaguccugcuccauccccaacaucgagaccgucaucgaguuccagcagaagaacaaccgccuccucgagaucacccgcgaguucuccgucaacgccggcgucaccacccccgucuccaccuacaugcucaccaacuccgagcuccucucccucaucaacgacaugcccaucaccaacgaccagaagaagcucauguccaacaacguccagaucguccgccagcaguccuacuccaucaugugcaucaucaaggaggagguccucgccuacgucguccagcucccccucuacggcgucaucgacacccccugcuggaagcuccacaccuccccccucugcaccaccaacaccaaggagggcuccaacaucugccucacccgcaccgaccgcggcugguacugcgacaacgccggcuccgucuccuucuucccccaggccgagaccugcaagguccaguccaaccgcgucuucugcgacaccaugaacucccucacccuccccuccgaggucaaccucugcaacgucgacaucuucaaccccaaguacgacugcaagaucaugaccuccaagaccgacgucuccuccuccgucaucaccucccucggcgccaucgucuccugcuacggcaagaccaagugcaccgccuccaacaagaaccgcggcaucaucaagaccuucuccaacggcugcgacuacgucuccaacaagggcgucgacaccgucuccgucggcaacacccucuacugcgucaacaagcaggagggccagucccucuacgucaagggcgagcccaucaucaacuucuacgacccccucgucuuccccuccgacgaguucgacgccuccaucucccaggucaacgagaagaucaaccagucccucgccuucauccgcaaguccgacgagcuccuccacaacgucaacgccggcaaguccaccaccaacaucaugaucaccaccaucaucaucgucaucaucgucauccuccucucccucaucgccgucggccuccuccucuacugcaaggcccgcuccacccccgucacccucuccaaggaccagcucuccggcaucaacaacaucgccuucuccaacugaggacuagucccuguucccagagcccacuuuuuuuucuuuuuuugaaauaaaauagccugucuuucagaucuaaaaaaaaaaaaaaaaaaaaaaaaaaaaaaaaaaaaaaaaaaaaaaaaaaaaaaaaaaaaaaaaugcaucccccccccccccccccccccccccccccccaaaggcucuuuucagagccaccagaauu

SEQ ID NO: 3132 - RNA, 1903 nt, Artificial Sequence
  mRNA product Design a-2 comprising derived and/or modified sequence from HRSV(A2)__F_DSCav1_mut3 (opt3)
gggagaguccgcucagccagguugcagaagcggcuuagcguguguccuaaucuucucucugcguguagguaggccugugccgcaaacaagcuuaccauggagcugcucauccuuaaggccaacgcuauuaccacaauacugacugcagugacguucugcuuugccagcggccagaauaucaccgaagaguucuaccaauccacauguucugcggucucaaaaggguauuugggagcuuuaagaacugguugguacaccaguguuauuacaaucgaacugagcaacauuaaggagaucaaaugcaauggcaccgacgccaaggugaaacuaauaaagcaggaacucgauaaguauaaaaacgcaguaacugaccugcagcuucugaugcaguccacacccgccaccgggucuggaucggcuaucuguucaggcguggcagucugcaagguguugcaccucgagggugagguuaauaaaauuaagagcgcccugcugaguacgaacaaagcuguggucucccucucuaauggggugagcguauuaacuuuuaagguucuggaucuuaagaacuacaucgacaaacaauugcugccuauucuaaauaagcaguccuguucaaucccaaacauagaaaccgugauugaguuccagcagaaaaauaacaggcuccuggaaaucacacgggaguuuagugucaaugccggagugacuaccccggugagcacauauaugcuuaccaacucugagcuguugucccucauuaaugauaugcccaucacgaacgaccaaaagaaacugaugucaaacaauguccagaucguucgccagcagagcuacaguauuaugugcauaaucaaggaagagguguuagcguauguagugcaacugccucucuacggcgucauugauacuccauguuggaaacuucauacaucuccccugugcaccacuaacacaaaggaaggcuccaauaucuguuugacccgaacggaccgugggugguacugcgauaacgcaggaagcgugucguucuuuccucaggccgagaccuguaagguucagucuaauagaguguucugcgacacaaugaacucccuaacucugccaucagaagucaaucucugcaacguggauauauuuaaucccaaauaugacuguaagauuaugaccaguaaaacagauguaagcuccucuguuaucacuagccugggugcuaucgugucaugcuacggcaagaccaaauguacagccaguaacaagaauagggggauuaucaagaccuucuccaacggaugcgacuaugucagcaauaaaggcguggacacugucucuguggguaacacgcuuuacuguguuaauaagcaagaggggcagucacuguaugugaaaggagagccuauuauaaacuuuuacgauccauugguauucccgagugacgaauuugaugcaagcaucucccaggucaacgagaagauuaaucagucucucgcuuucauccggaaaucggacgaacuguuacacaacgugaaugccggcaagagcacaaccaacaucaugauuacuaccauaaucauuguuaucauugugauccugcuaucccucauagcggucggccugcuuuuguauugcaaggcccgcucaacacccgugacccugaguaaagaucaacucucugggaucaauaacauugcauucagcaauugaggacuagucccuguucccagagcccacuuuuuuuucuuuuuuugaaauaaaauagccugucuuucagaucuaaaaaaaaaaaaaaaaaaaaaaaaaaaaaaaaaaaaaaaaaaaaaaaaaaaaaaaaaaaaaaaaugcaucccccccccccccccccccccccccccccccaaaggcucuuuucagagccaccagaauu

SEQ ID NO: 3133 - RNA, 1903 nt, Artificial Sequence
  mRNA product Design a-2 comprising derived and/or modified sequence from HRSV(A2)__F_DSCav1_mut3 (opt4)
gggagaguccgcucagccagguugcagaagcggcuuagcguguguccuaaucuucucucugcguguagguaggccugugccgcaaacaagcuuaccauggagcugcugauccugaaggccaacgccaucaccaccauccugaccgccgugaccuucugcuucgccagcggccagaacaucaccgaggaguucuaccagagcaccugcagcgccgugagcaagggcuaccugggcgcccugagaaccggcugguacaccagcgugaucaccaucgagcugagcaacaucaaggagaucaagugcaacggcaccgacgccaaggugaagcugaucaagcaggagcuggacaaguacaagaacgccgugaccgaccugcagcugcugaugcagagcacccccgccaccggcagcggcagcgccaucugcagcggcguggccgugugcaaggugcugcaccuggagggcgaggugaacaagaucaagagcgcccugcugagcaccaacaaggccguggugagccugagcaacggcgugagcgugcugaccuucaaggugcuggaccugaagaacuacaucgacaagcagcugcugcccauccugaacaagcagagcugcagcauccccaacaucgagaccgugaucgaguuccagcagaagaacaacagacugcuggagaucaccagagaguucagcgugaacgccggcgugaccacccccgugagcaccuacaugcugaccaacagcgagcugcugagccugaucaacgacaugcccaucaccaacgaccagaagaagcugaugagcaacaacgugcagaucgugagacagcagagcuacagcaucaugugcaucaucaaggaggaggugcuggccuacguggugcagcugccccuguacggcgugaucgacacccccugcuggaagcugcacaccagcccccugugcaccaccaacaccaaggagggcagcaacaucugccugaccagaaccgacagaggcugguacugcgacaacgccggcagcgugagcuucuucccccaggccgagaccugcaaggugcagagcaacagaguguucugcgacaccaugaacagccugacccugcccagcgaggugaaccugugcaacguggacaucuucaaccccaaguacgacugcaagaucaugaccagcaagaccgacgugagcagcagcgugaucaccagccugggcgccaucgugagcugcuacggcaagaccaagugcaccgccagcaacaagaacagaggcaucaucaagaccuucagcaacggcugcgacuacgugagcaacaagggcguggacaccgugagcgugggcaacacccuguacugcgugaacaagcaggagggccagagccuguacgugaagggcgagcccaucaucaacuucuacgacccccugguguuccccagcgacgaguucgacgccagcaucagccaggugaacgagaagaucaaccagagccuggccuucaucagaaagagcgacgagcugcugcacaacgugaacgccggcaagagcaccaccaacaucaugaucaccaccaucaucaucgugaucaucgugauccugcugagccugaucgccgugggccugcugcuguacugcaaggccagaagcacccccgugacccugagcaaggaccagcugagcggcaucaacaacaucgccuucagcaacugaggacuagucccuguucccagagcccacuuuuuuuucuuuuuuugaaauaaaauagccugucuuucagaucuaaaaaaaaaaaaaaaaaaaaaaaaaaaaaaaaaaaaaaaaaaaaaaaaaaaaaaaaaaaaaaaaugcaucccccccccccccccccccccccccccccccaaaggcucuuuucagagccaccagaauu

SEQ ID NO: 3134 - RNA, 1903 nt, Artificial Sequence
  mRNA product Design a-2 comprising derived and/or modified sequence from HRSV(A2)__F_DSCav1_mut3 (opt5)
gggagaguccgcucagccagguugcagaagcggcuuagcguguguccuaaucuucucucugcguguagguaggccugugccgcaaacaagcuuaccauggagcugcucauccugaaggccaacgcuauuaccacaauccuuacggccgugaccuucugcuuugcgagcggccagaauauuacagaagaguucuaccaauccaccuguucugcugucagcaaaggguaucugggagcccucagaacaggcugguacaccuccguuaucacaauugaacugucuaacaucaaggagaucaaaugcaaugggaccgacgccaaggugaaacuuauuaagcaggaacuggauaaguauaaaaacgcugugacggaccuccagcugcugaugcagagcacccccgccacaggauccggcucugcuaucuguagcggggucgccgugugcaagguucuccaccuggagggagaggugaauaaaauuaaguccgcgcuucugagcaccaacaaagccgucgugucucucuccaauggcguuagcgugcugacauuuaagguccuugaucugaagaacuacaucgacaaacaacuccugccuauucugaauaagcagucuuguuccaucccgaacauugaaaccgugaucgaguuccagcagaaaaauaaccggcuccuggaaaucacgcgcgaguuuagcgugaaugcuggcgucacaacccccguuucuacauauaugcuuaccaacuccgagcugcucagccugauuaaugauaugccuaucaccaacgaccaaaagaaacuuauguccaacaaugugcagauugugagacagcagucuuacagcaucaugugcauuaucaaggaagagguccuggccuaugugguucaacucccccuguacggggugaucgauacaccuuguuggaaacugcauacgagcccccucugcaccacaaacaccaaggaaggauccaauauuugucugacacggaccgaccgcggcugguacugcgauaacgcugggucugucuccuucuuuccucaggccgagacguguaaggugcagagcaauagaguuuucugcgacacaaugaacucucuuacccugccgagcgaagugaaucucugcaacgucgauaucuuuaaucccaaauaugacuguaagauuaugaccuccaaaacagaugugucuagcuccgucaucaccagccugggagcgauugugucuugcuacggcaagacaaaauguacggccuccaacaagaaucgggggaucaucaagaccuucagcaacggaugcgacuauguuucuaauaaaggcguggacacagucuccgugggcaacacccuuuacuguguuaauaagcaagaggggcagagccuguaugugaaaggagagccuauuaucaacuuuuacgauccccucgucuucccuuccgacgaauuugaugcuucuauuagccaggugaacgagaagaucaaucagucccuggccuucauucgcaaaucugacgaacugcuccacaacgugaaugcuggcaagagcacaaccaacaucaugauuacgaccaucaucauuguuaucauugucauccugcuuucccugauugccguggggcuccugcuguauugcaaggccagaagcacacccgugacccuuucuaaagaucaacucuccggaaucaauaacaucgcuuucagcaauugaggacuagucccuguucccagagcccacuuuuuuuucuuuuuuugaaauaaaauagccugucuuucagaucuaaaaaaaaaaaaaaaaaaaaaaaaaaaaaaaaaaaaaaaaaaaaaaaaaaaaaaaaaaaaaaaaugcaucccccccccccccccccccccccccccccccaaaggcucuuuucagagccaccagaauu

SEQ ID NO: 3135 - RNA, 1903 nt, Artificial Sequence
  mRNA product Design a-2 comprising derived and/or modified sequence from HRSV(A2)__F_DSCav1_mut3 (opt6)
gggagaguccgcucagccagguugcagaagcggcuuagcguguguccuaaucuucucucugcguguagguaggccugugccgcaaacaagcuuaccauggaauuacucauacuaaaagccaaugccauaaccacuauucuaacagcaguaacauucuguuucgccucaggacaaaacauaacagaagaauuuuaucaauccaccuguuccgcagucucgaaaggcuaccuuggcgcacuaagaaccggaugguauacaucaguaauaaccauugaacuaucaaauaucaaagaaauaaaaugcaacggaacugacgcaaaagucaaacuaauaaaacaagaauuagacaaauacaaaaacgccguuacagacuuacaacuacuaaugcaaucaacuccagcaacaggaucaggaucugcuauaugcucaggugucgccguauguaaaguguuacaccucgaaggcgaaguaaacaaaauaaaaucagcacuacuauccacaaauaaagcaguaguaucacuauccaaugguguaucaguacucacauucaaaguacuagacuuaaaaaauuauauagauaaacaauuacuaccaauauuaaacaaacaaucaugcucaauaccaaacauagaaaccgucauugaauuucaacaaaaaaacaaucgacuucuugaaauaacacgagaauuuucaguaaaugccggaguaacaaccccagucucaacauacauguuaaccaacucugaacuccuaagccuaaucaacgacaugcccauaacuaacgaccaaaaaaaacuaauguccaauaauguccaaauaguaagacaacaauccuacucaauaaugugcauuauaaaagaagaaguccucgccuauguaguacaacuacccuuauacggaguaauugacacaccauguuggaaacuacauacaucaccacuaugcaccacuaacacaaaagaaggcuccaacauaugccuaacccgaacagaucgcggaugguauugcgacaacgcaggaaguguauccuucuuuccacaagcagaaacaugcaaaguacaauccaacagaguauucugugacaccaugaacucucuaacacuaccuuccgaaguaaauuuaugcaacguagacauauuuaaucccaaauacgacuguaaaauaaugaccucaaaaacugaugucucaucaucagucauuacaucacucggagcaauagucaguugcuauggaaaaaccaaaugcacagcuaguaacaaaaacagggguauaauaaaaacauuuucaaacggaugcgauuacguaucaaauaaaggaguagacaccguauccguaggaaauacucucuacugcguaaacaaacaagaaggacaaucccuauacguaaaaggcgaaccaaucauuaacuuuuacgacccacuuguauuuccaucagacgaauuugaugccucaauaucccaagucaaugaaaaaauaaaccaaagucuagcauucauccgaaaaucagaugaacuuuuacacaacguaaacgccggaaaaucaacaacaaacaucaugaucacaacaaucaucauaguaauaauaguuauacuacuuuccuuaauagcagucggccuacuacucuacugcaaagcacgauccacaccaguaaccuuaucuaaagaccaacucucaggcauaaacaacauagcauucucaaacuaaggacuagucccuguucccagagcccacuuuuuuuucuuuuuuugaaauaaaauagccugucuuucagaucuaaaaaaaaaaaaaaaaaaaaaaaaaaaaaaaaaaaaaaaaaaaaaaaaaaaaaaaaaaaaaaaaugcaucccccccccccccccccccccccccccccccaaaggcucuuuucagagccaccagaauu

SEQ ID NO: 3136 - RNA, 1903 nt, Artificial Sequence
  mRNA product Design a-2 comprising derived and/or modified sequence from HRSV(A2)__F_DSCav1_mut3 (opt11)
gggagaguccgcucagccagguugcagaagcggcuuagcguguguccuaaucuucucucugcguguagguaggccugugccgcaaacaagcuuaccauggaacuccucauccuuaaagcaaacgccaucacaaccauccucacagcagucacuuucugcuucgcauccggacaaaacaucacagaagaguucuaucaauccacgugcuccgcaguuuccaaaggauaccuuggagccuuacgaaccggcugguacaccuccgucaucaccauagaacucagcaacaucaaagaaaucaaaugcaacggaaccgacgcaaaagucaaacucaucaaacaagaacuagacaaauacaaaaacgcagucaccgaccuccaacuacucaugcaaucaacccccgcaaccggcuccggcuccgccaucugcuccggaguagccguaugcaaaguccuccaccucgaaggcgaaguuaacaagaucaaguccgcacuccuaucaaccaacaaagcagucgucucccuauccaacggcgucuccguauuaacauucaaaguccucgaccucaaaaacuacauagacaaacagcuacuccccauccuaaacaaacaauccugcuccauccccaacaucgaaacugucaucgaguuccaacagaaaaacaaccgccuccuagaaaucacccgagaguucuccguaaacgccggcgucacuacccccgucucuaccuauaugcuaaccaacucugaacuccuaucccuaaucaacgauaugcccauaacuaacgaccaaaagaaacuuauguccaacaacguacaaauaguccggcaacaaucauacucuaucaugugcaucaucaaagaagaaguacuugccuacguuguccaacucccacuauacggcgucauagacacuccaugcuggaaacuucacaccucaccccucugcaccacuaacacuaaagaaggcucuaacaucugccuuacccgcaccgaccgcggaugguacugcgacaacgcaggcucaguuagcuucuucccacaagccgaaaccugcaaaguccagucaaaccgugucuucugcgauaccaugaacucgcucacccucccuuccgaagucaaccucugcaacgucgacaucuucaaccccaaauacgacugcaaaaucaugaccucaaaaaccgacguaucuucuuccgucaucaccucccucggcgccaucguauccugcuacggcaaaaccaaaugcacugcaucaaacaaaaaccgaggcaucaucaaaaccuucucgaacggaugcgacuacguauccaacaagggcgucgacacagucuccguugguaacacccucuacugcgucaacaaacaagaaggccaaucccuauacguaaaaggcgaacccaucaucaacuucuacgacccccucgucuuccccagugacgaauuugacgccuccaucucccaagucaacgaaaagaucaaccaaucccuugccuucauacgcaaauccgacgaacuccuacacaacguuaacgccggaaaaucaacaaccaacaucaugaucacaaccaucauaaucgucauaaucgucauacuccucucccucauagccgucggccugcuauuguacuguaaagcccgcuccacaccagucacacuuucaaaagaccaacucuccgggaucaacaacaucgccuucuccaacuaaggacuagucccuguucccagagcccacuuuuuuuucuuuuuuugaaauaaaauagccugucuuucagaucuaaaaaaaaaaaaaaaaaaaaaaaaaaaaaaaaaaaaaaaaaaaaaaaaaaaaaaaaaaaaaaaaugcaucccccccccccccccccccccccccccccccaaaggcucuuuucagagccaccagaauu

SEQ ID NO: 3137 - RNA, 1981 nt, Artificial Sequence
  mRNA product Design a-3 comprising derived and/or modified sequence from HRSV(A2)__F_DSCav1_mut3 (opt1)
gggagagggcgcuuggcuugcaaggacccugagcugcggcauugaagcacacccaacccaacucgacugaagucagccucacugaaccggaucugagaaucuucucucucugggcuugccagggcucuccgaaccuagcuagcauccucuucaauuccaacuagaaagcuuaccauggagcugcucauccugaaggccaacgccaucaccaccauccugacggcggugaccuucugcuucgccagcggccagaacaucaccgaggaguucuaccaguccacgugcagcgccgucuccaagggguaccucggcgcccugcggaccggcugguacaccuccgugaucaccaucgagcugagcaacaucaaggagaucaagugcaacgggaccgacgccaaggugaagcucaucaagcaggagcuggacaaguacaagaacgcggucacggaccugcagcuccugaugcaguccaccccggcaaccggcuccggcuccgccaucugcagcggcgucgccgugugcaaggugcugcaccucgagggggaggucaacaagaucaagagcgcccugcuguccaccaacaaggccguggugagccucuccaacggcgucagcgugcugaccuucaaggugcuggaccucaagaacuacaucgacaagcagcugcugcccauccugaacaagcagagcugcuccauccccaacaucgagacggugaucgaguuccagcagaagaacaaccggcuccuggagaucacccgcgaguucagcgugaacgccggggucaccacccccguguccacguacaugcugaccaacagcgagcuccugucccugaucaacgacaugccgaucaccaacgaccagaagaagcucaugagcaacaacgugcagaucguccggcagcaguccuacagcaucaugugcaucaucaaggaggaggugcuggcguacgugguccagcugccccucuacggcgugaucgacacccccugcuggaagcugcacacgagcccccugugcaccaccaacaccaaggagggguccaacaucugccucacgcgcaccgaccggggcugguacugcgacaacgccggcagcgucuccuucuucccgcaggccgagaccugcaaggugcagagcaaccgcguguucugcgacaccaugaacucccugacgcugcccagcgagguaaaccucugcaacgucgacaucuucaaccccaaguacgacugcaagaucaugaccuccaagaccgacgugagcuccagcgugaucaccucccugggggccaucgucagcugcuacggcaagacgaagugcaccgccagcaacaagaaccgggggaucaucaagaccuucuccaacggcugcgacuacgugagcaacaagggcguggacaccguguccgucgggaacacccuguacugcgugaacaagcaggagggccagagccucuacgugaagggggagcccaucaucaacuucuacgacccgcuggucuuccccuccgacgaguucgacgcgagcaucucccaggugaacgagaagaucaaccagagccuggccuucauccgcaaguccgacgagcugcuccacaacgugaacgccggcaagagcacgaccaacaucaugaucaccaccaucaucaucgucaucaucgugauccugcugucccucaucgccguggggcugcugcucuacugcaaggcccggagcacgcccgucacccuguccaaggaccagcugagcggcaucaacaacaucgcguucuccaacugaggacuagucccuguucccagagcccacuuuuuuuucuuuuuuugaaauaaaauagccugucuuucagaucuaaaaaaaaaaaaaaaaaaaaaaaaaaaaaaaaaaaaaaaaaaaaaaaaaaaaaaaaaaaaaaaaugcaucccccccccccccccccccccccccccccccaaaggcucuuuucagagccaccagaauu

SEQ ID NO: 3138 - RNA, 1981 nt, Artificial Sequence
  mRNA product Design a-3 comprising derived and/or modified sequence from HRSV(A2)__F_DSCav1_mut3 (opt1)
gggagagggcgcuuggcuugcaaggacccugagcugcggcauugaagcacacccaacccaacucgacugaagucagccucacugaaccggaucugagaaucuucucucucugggcuugccagggcucuccgaaccuagcuagcauccucuucaauuccaacuagaaagcuuaccauggagcugcucauccugaaggccaacgccaucaccaccauccugacggcggugaccuucugcuucgccagcggccagaacaucaccgaggaguucuaccaguccacgugcagcgccgucuccaagggguaccucggcgcccugcgcaccgggugguacaccagcgugaucaccaucgagcuguccaacaucaaggagaucaagugcaacggcaccgacgccaaggugaagcucaucaagcaggagcuggacaaguacaagaacgcggucacggaccugcagcuccugaugcagagcacccccgccaccggguccggcagcgccaucugcuccggcguggccgugugcaagguccugcaccucgagggggaggugaacaagaucaagagcgcgcugcuguccaccaacaaggccguggucagccucuccaacggcgugagcgugcugacguucaagguccuggaccucaagaacuacaucgacaagcagcugcugccgauccucaacaagcaguccugcagcauccccaacaucgagaccgugaucgaguuccagcagaagaacaaccggcugcuggagaucacccgcgaguucuccgugaacgccggggucaccacgcccgugagcaccuacaugcucaccaacuccgagcugcugagccucaucaacgacaugcccaucaccaacgaccagaagaagcugaugagcaacaacgugcagaucguccggcagcaguccuacagcaucaugugcaucaucaaggaggaggugcuggccuacgugguccagcucccgcuguacggcgugaucgacacgcccugcuggaagcugcacaccagcccccucugcaccaccaacacgaaggagggguccaacaucugccugacccgcaccgaccggggcugguacugcgacaacgccggcuccgugagcuucuucccccaggcggagaccugcaagguccaguccaaccgcguguucugcgacacgaugaacagccugacccucccguccgaggucaaccugugcaacguggacaucuucaaccccaaguacgacugcaagaucaugaccagcaagaccgacguguccagcuccgucaucacgagccugggggccaucguguccugcuacggcaagaccaagugcaccgccagcaacaagaaccgggggaucaucaagaccuucuccaacggcugcgacuacgugagcaacaagggcgucgacacgguguccguggggaacacccucuacugcgucaacaagcaggagggccagagccuguacgugaagggggagcccaucaucaacuucuacgacccccugguguucccgagcgacgaguucgacgccuccaucagccaggucaacgagaagaucaaccagucccucgccuucauccgcaagagcgacgagcugcugcacaacgugaacgcgggcaaguccaccaccaacaucaugaucaccacgaucaucaucgugaucaucgucauccuccugagccugaucgccguggggcuccugcuguacugcaaggcccgguccacccccgugacccugagcaaggaccagcucuccggcaucaacaacaucgccuucagcaacugaggacuagucccuguucccagagcccacuuuuuuuucuuuuuuugaaauaaaauagccugucuuucagaucuaaaaaaaaaaaaaaaaaaaaaaaaaaaaaaaaaaaaaaaaaaaaaaaaaaaaaaaaaaaaaaaaugcaucccccccccccccccccccccccccccccccaaaggcucuuuucagagccaccagaauu

SEQ ID NO: 3139 - RNA, 1981 nt, Artificial Sequence
  mRNA product Design a-3 comprising derived and/or modified sequence from HRSV(A2)__F_DSCav1_mut3 (opt2)
gggagagggcgcuuggcuugcaaggacccugagcugcggcauugaagcacacccaacccaacucgacugaagucagccucacugaaccggaucugagaaucuucucucucugggcuugccagggcucuccgaaccuagcuagcauccucuucaauuccaacuagaaagcuuaccauggagcuccucauccucaaggccaacgccaucaccaccauccucaccgccgucaccuucugcuucgccuccggccagaacaucaccgaggaguucuaccaguccaccugcuccgccgucuccaagggcuaccucggcgcccuccgcaccggcugguacaccuccgucaucaccaucgagcucuccaacaucaaggagaucaagugcaacggcaccgacgccaaggucaagcucaucaagcaggagcucgacaaguacaagaacgccgucaccgaccuccagcuccucaugcaguccacccccgccaccggcuccggcuccgccaucugcuccggcgucgccgucugcaagguccuccaccucgagggcgaggucaacaagaucaaguccgcccuccucuccaccaacaaggccgucgucucccucuccaacggcgucuccguccucaccuucaagguccucgaccucaagaacuacaucgacaagcagcuccuccccauccucaacaagcaguccugcuccauccccaacaucgagaccgucaucgaguuccagcagaagaacaaccgccuccucgagaucacccgcgaguucuccgucaacgccggcgucaccacccccgucuccaccuacaugcucaccaacuccgagcuccucucccucaucaacgacaugcccaucaccaacgaccagaagaagcucauguccaacaacguccagaucguccgccagcaguccuacuccaucaugugcaucaucaaggaggagguccucgccuacgucguccagcucccccucuacggcgucaucgacacccccugcuggaagcuccacaccuccccccucugcaccaccaacaccaaggagggcuccaacaucugccucacccgcaccgaccgcggcugguacugcgacaacgccggcuccgucuccuucuucccccaggccgagaccugcaagguccaguccaaccgcgucuucugcgacaccaugaacucccucacccuccccuccgaggucaaccucugcaacgucgacaucuucaaccccaaguacgacugcaagaucaugaccuccaagaccgacgucuccuccuccgucaucaccucccucggcgccaucgucuccugcuacggcaagaccaagugcaccgccuccaacaagaaccgcggcaucaucaagaccuucuccaacggcugcgacuacgucuccaacaagggcgucgacaccgucuccgucggcaacacccucuacugcgucaacaagcaggagggccagucccucuacgucaagggcgagcccaucaucaacuucuacgacccccucgucuuccccuccgacgaguucgacgccuccaucucccaggucaacgagaagaucaaccagucccucgccuucauccgcaaguccgacgagcuccuccacaacgucaacgccggcaaguccaccaccaacaucaugaucaccaccaucaucaucgucaucaucgucauccuccucucccucaucgccgucggccuccuccucuacugcaaggcccgcuccacccccgucacccucuccaaggaccagcucuccggcaucaacaacaucgccuucuccaacugaggacuagucccuguucccagagcccacuuuuuuuucuuuuuuugaaauaaaauagccugucuuucagaucuaaaaaaaaaaaaaaaaaaaaaaaaaaaaaaaaaaaaaaaaaaaaaaaaaaaaaaaaaaaaaaaaugcaucccccccccccccccccccccccccccccccaaaggcucuuuucagagccaccagaauu

SEQ ID NO: 3140 - RNA, 1981 nt, Artificial Sequence
  mRNA product Design a-3 comprising derived and/or modified sequence from HRSV(A2)__F_DSCav1_mut3 (opt3)
gggagagggcgcuuggcuugcaaggacccugagcugcggcauugaagcacacccaacccaacucgacugaagucagccucacugaaccggaucugagaaucuucucucucugggcuugccagggcucuccgaaccuagcuagcauccucuucaauuccaacuagaaagcuuaccauggagcugcucauccuuaaggccaacgcuauuaccacaauacugacugcagugacguucugcuuugccagcggccagaauaucaccgaagaguucuaccaauccacauguucugcggucucaaaaggguauuugggagcuuuaagaacugguugguacaccaguguuauuacaaucgaacugagcaacauuaaggagaucaaaugcaauggcaccgacgccaaggugaaacuaauaaagcaggaacucgauaaguauaaaaacgcaguaacugaccugcagcuucugaugcaguccacacccgccaccgggucuggaucggcuaucuguucaggcguggcagucugcaagguguugcaccucgagggugagguuaauaaaauuaagagcgcccugcugaguacgaacaaagcuguggucucccucucuaauggggugagcguauuaacuuuuaagguucuggaucuuaagaacuacaucgacaaacaauugcugccuauucuaaauaagcaguccuguucaaucccaaacauagaaaccgugauugaguuccagcagaaaaauaacaggcuccuggaaaucacacgggaguuuagugucaaugccggagugacuaccccggugagcacauauaugcuuaccaacucugagcuguugucccucauuaaugauaugcccaucacgaacgaccaaaagaaacugaugucaaacaauguccagaucguucgccagcagagcuacaguauuaugugcauaaucaaggaagagguguuagcguauguagugcaacugccucucuacggcgucauugauacuccauguuggaaacuucauacaucuccccugugcaccacuaacacaaaggaaggcuccaauaucuguuugacccgaacggaccgugggugguacugcgauaacgcaggaagcgugucguucuuuccucaggccgagaccuguaagguucagucuaauagaguguucugcgacacaaugaacucccuaacucugccaucagaagucaaucucugcaacguggauauauuuaaucccaaauaugacuguaagauuaugaccaguaaaacagauguaagcuccucuguuaucacuagccugggugcuaucgugucaugcuacggcaagaccaaauguacagccaguaacaagaauagggggauuaucaagaccuucuccaacggaugcgacuaugucagcaauaaaggcguggacacugucucuguggguaacacgcuuuacuguguuaauaagcaagaggggcagucacuguaugugaaaggagagccuauuauaaacuuuuacgauccauugguauucccgagugacgaauuugaugcaagcaucucccaggucaacgagaagauuaaucagucucucgcuuucauccggaaaucggacgaacuguuacacaacgugaaugccggcaagagcacaaccaacaucaugauuacuaccauaaucauuguuaucauugugauccugcuaucccucauagcggucggccugcuuuuguauugcaaggcccgcucaacacccgugacccugaguaaagaucaacucucugggaucaauaacauugcauucagcaauugaggacuagucccuguucccagagcccacuuuuuuuucuuuuuuugaaauaaaauagccugucuuucagaucuaaaaaaaaaaaaaaaaaaaaaaaaaaaaaaaaaaaaaaaaaaaaaaaaaaaaaaaaaaaaaaaaugcaucccccccccccccccccccccccccccccccaaaggcucuuuucagagccaccagaauu

SEQ ID NO: 3141 - RNA, 1981 nt, Artificial Sequence
  mRNA product Design a-3 comprising derived and/or modified sequence from HRSV(A2)__F_DSCav1_mut3 (opt4)
gggagagggcgcuuggcuugcaaggacccugagcugcggcauugaagcacacccaacccaacucgacugaagucagccucacugaaccggaucugagaaucuucucucucugggcuugccagggcucuccgaaccuagcuagcauccucuucaauuccaacuagaaagcuuaccauggagcugcugauccugaaggccaacgccaucaccaccauccugaccgccgugaccuucugcuucgccagcggccagaacaucaccgaggaguucuaccagagcaccugcagcgccgugagcaagggcuaccugggcgcccugagaaccggcugguacaccagcgugaucaccaucgagcugagcaacaucaaggagaucaagugcaacggcaccgacgccaaggugaagcugaucaagcaggagcuggacaaguacaagaacgccgugaccgaccugcagcugcugaugcagagcacccccgccaccggcagcggcagcgccaucugcagcggcguggccgugugcaaggugcugcaccuggagggcgaggugaacaagaucaagagcgcccugcugagcaccaacaaggccguggugagccugagcaacggcgugagcgugcugaccuucaaggugcuggaccugaagaacuacaucgacaagcagcugcugcccauccugaacaagcagagcugcagcauccccaacaucgagaccgugaucgaguuccagcagaagaacaacagacugcuggagaucaccagagaguucagcgugaacgccggcgugaccacccccgugagcaccuacaugcugaccaacagcgagcugcugagccugaucaacgacaugcccaucaccaacgaccagaagaagcugaugagcaacaacgugcagaucgugagacagcagagcuacagcaucaugugcaucaucaaggaggaggugcuggccuacguggugcagcugccccuguacggcgugaucgacacccccugcuggaagcugcacaccagcccccugugcaccaccaacaccaaggagggcagcaacaucugccugaccagaaccgacagaggcugguacugcgacaacgccggcagcgugagcuucuucccccaggccgagaccugcaaggugcagagcaacagaguguucugcgacaccaugaacagccugacccugcccagcgaggugaaccugugcaacguggacaucuucaaccccaaguacgacugcaagaucaugaccagcaagaccgacgugagcagcagcgugaucaccagccugggcgccaucgugagcugcuacggcaagaccaagugcaccgccagcaacaagaacagaggcaucaucaagaccuucagcaacggcugcgacuacgugagcaacaagggcguggacaccgugagcgugggcaacacccuguacugcgugaacaagcaggagggccagagccuguacgugaagggcgagcccaucaucaacuucuacgacccccugguguuccccagcgacgaguucgacgccagcaucagccaggugaacgagaagaucaaccagagccuggccuucaucagaaagagcgacgagcugcugcacaacgugaacgccggcaagagcaccaccaacaucaugaucaccaccaucaucaucgugaucaucgugauccugcugagccugaucgccgugggccugcugcuguacugcaaggccagaagcacccccgugacccugagcaaggaccagcugagcggcaucaacaacaucgccuucagcaacugaggacuagucccuguucccagagcccacuuuuuuuucuuuuuuugaaauaaaauagccugucuuucagaucuaaaaaaaaaaaaaaaaaaaaaaaaaaaaaaaaaaaaaaaaaaaaaaaaaaaaaaaaaaaaaaaaugcaucccccccccccccccccccccccccccccccaaaggcucuuuucagagccaccagaauu

SEQ ID NO: 3142 - RNA, 1981 nt, Artificial Sequence
  mRNA product Design a-3 comprising derived and/or modified sequence from HRSV(A2)__F_DSCav1_mut3 (opt5)
gggagagggcgcuuggcuugcaaggacccugagcugcggcauugaagcacacccaacccaacucgacugaagucagccucacugaaccggaucugagaaucuucucucucugggcuugccagggcucuccgaaccuagcuagcauccucuucaauuccaacuagaaagcuuaccauggagcugcucauccugaaggccaacgcuauuaccacaauccuuacggccgugaccuucugcuuugcgagcggccagaauauuacagaagaguucuaccaauccaccuguucugcugucagcaaaggguaucugggagcccucagaacaggcugguacaccuccguuaucacaauugaacugucuaacaucaaggagaucaaaugcaaugggaccgacgccaaggugaaacuuauuaagcaggaacuggauaaguauaaaaacgcugugacggaccuccagcugcugaugcagagcacccccgccacaggauccggcucugcuaucuguagcggggucgccgugugcaagguucuccaccuggagggagaggugaauaaaauuaaguccgcgcuucugagcaccaacaaagccgucgugucucucuccaauggcguuagcgugcugacauuuaagguccuugaucugaagaacuacaucgacaaacaacuccugccuauucugaauaagcagucuuguuccaucccgaacauugaaaccgugaucgaguuccagcagaaaaauaaccggcuccuggaaaucacgcgcgaguuuagcgugaaugcuggcgucacaacccccguuucuacauauaugcuuaccaacuccgagcugcucagccugauuaaugauaugccuaucaccaacgaccaaaagaaacuuauguccaacaaugugcagauugugagacagcagucuuacagcaucaugugcauuaucaaggaagagguccuggccuaugugguucaacucccccuguacggggugaucgauacaccuuguuggaaacugcauacgagcccccucugcaccacaaacaccaaggaaggauccaauauuugucugacacggaccgaccgcggcugguacugcgauaacgcugggucugucuccuucuuuccucaggccgagacguguaaggugcagagcaauagaguuuucugcgacacaaugaacucucuuacccugccgagcgaagugaaucucugcaacgucgauaucuuuaaucccaaauaugacuguaagauuaugaccuccaaaacagaugugucuagcuccgucaucaccagccugggagcgauugugucuugcuacggcaagacaaaauguacggccuccaacaagaaucgggggaucaucaagaccuucagcaacggaugcgacuauguuucuaauaaaggcguggacacagucuccgugggcaacacccuuuacuguguuaauaagcaagaggggcagagccuguaugugaaaggagagccuauuaucaacuuuuacgauccccucgucuucccuuccgacgaauuugaugcuucuauuagccaggugaacgagaagaucaaucagucccuggccuucauucgcaaaucugacgaacugcuccacaacgugaaugcuggcaagagcacaaccaacaucaugauuacgaccaucaucauuguuaucauugucauccugcuuucccugauugccguggggcuccugcuguauugcaaggccagaagcacacccgugacccuuucuaaagaucaacucuccggaaucaauaacaucgcuuucagcaauugaggacuagucccuguucccagagcccacuuuuuuuucuuuuuuugaaauaaaauagccugucuuucagaucuaaaaaaaaaaaaaaaaaaaaaaaaaaaaaaaaaaaaaaaaaaaaaaaaaaaaaaaaaaaaaaaaugcaucccccccccccccccccccccccccccccccaaaggcucuuuucagagccaccagaauu

SEQ ID NO: 3143 - RNA, 1981 nt, Artificial Sequence
  mRNA product Design a-3 comprising derived and/or modified sequence from HRSV(A2)__F_DSCav1_mut3 (opt6)
gggagagggcgcuuggcuugcaaggacccugagcugcggcauugaagcacacccaacccaacucgacugaagucagccucacugaaccggaucugagaaucuucucucucugggcuugccagggcucuccgaaccuagcuagcauccucuucaauuccaacuagaaagcuuaccauggaauuacucauacuaaaagccaaugccauaaccacuauucuaacagcaguaacauucuguuucgccucaggacaaaacauaacagaagaauuuuaucaauccaccuguuccgcagucucgaaaggcuaccuuggcgcacuaagaaccggaugguauacaucaguaauaaccauugaacuaucaaauaucaaagaaauaaaaugcaacggaacugacgcaaaagucaaacuaauaaaacaagaauuagacaaauacaaaaacgccguuacagacuuacaacuacuaaugcaaucaacuccagcaacaggaucaggaucugcuauaugcucaggugucgccguauguaaaguguuacaccucgaaggcgaaguaaacaaaauaaaaucagcacuacuauccacaaauaaagcaguaguaucacuauccaaugguguaucaguacucacauucaaaguacuagacuuaaaaaauuauauagauaaacaauuacuaccaauauuaaacaaacaaucaugcucaauaccaaacauagaaaccgucauugaauuucaacaaaaaaacaaucgacuucuugaaauaacacgagaauuuucaguaaaugccggaguaacaaccccagucucaacauacauguuaaccaacucugaacuccuaagccuaaucaacgacaugcccauaacuaacgaccaaaaaaaacuaauguccaauaauguccaaauaguaagacaacaauccuacucaauaaugugcauuauaaaagaagaaguccucgccuauguaguacaacuacccuuauacggaguaauugacacaccauguuggaaacuacauacaucaccacuaugcaccacuaacacaaaagaaggcuccaacauaugccuaacccgaacagaucgcggaugguauugcgacaacgcaggaaguguauccuucuuuccacaagcagaaacaugcaaaguacaauccaacagaguauucugugacaccaugaacucucuaacacuaccuuccgaaguaaauuuaugcaacguagacauauuuaaucccaaauacgacuguaaaauaaugaccucaaaaacugaugucucaucaucagucauuacaucacucggagcaauagucaguugcuauggaaaaaccaaaugcacagcuaguaacaaaaacagggguauaauaaaaacauuuucaaacggaugcgauuacguaucaaauaaaggaguagacaccguauccguaggaaauacucucuacugcguaaacaaacaagaaggacaaucccuauacguaaaaggcgaaccaaucauuaacuuuuacgacccacuuguauuuccaucagacgaauuugaugccucaauaucccaagucaaugaaaaaauaaaccaaagucuagcauucauccgaaaaucagaugaacuuuuacacaacguaaacgccggaaaaucaacaacaaacaucaugaucacaacaaucaucauaguaauaauaguuauacuacuuuccuuaauagcagucggccuacuacucuacugcaaagcacgauccacaccaguaaccuuaucuaaagaccaacucucaggcauaaacaacauagcauucucaaacuaaggacuagucccuguucccagagcccacuuuuuuuucuuuuuuugaaauaaaauagccugucuuucagaucuaaaaaaaaaaaaaaaaaaaaaaaaaaaaaaaaaaaaaaaaaaaaaaaaaaaaaaaaaaaaaaaaugcaucccccccccccccccccccccccccccccccaaaggcucuuuucagagccaccagaauu

SEQ ID NO: 3144 - RNA, 1981 nt, Artificial Sequence
  mRNA product Design a-3 comprising derived and/or modified sequence from HRSV(A2)__F_DSCav1_mut3 (opt11)
gggagagggcgcuuggcuugcaaggacccugagcugcggcauugaagcacacccaacccaacucgacugaagucagccucacugaaccggaucugagaaucuucucucucugggcuugccagggcucuccgaaccuagcuagcauccucuucaauuccaacuagaaagcuuaccauggaacuccucauccuuaaagcaaacgccaucacaaccauccucacagcagucacuuucugcuucgcauccggacaaaacaucacagaagaguucuaucaauccacgugcuccgcaguuuccaaaggauaccuuggagccuuacgaaccggcugguacaccuccgucaucaccauagaacucagcaacaucaaagaaaucaaaugcaacggaaccgacgcaaaagucaaacucaucaaacaagaacuagacaaauacaaaaacgcagucaccgaccuccaacuacucaugcaaucaacccccgcaaccggcuccggcuccgccaucugcuccggaguagccguaugcaaaguccuccaccucgaaggcgaaguuaacaagaucaaguccgcacuccuaucaaccaacaaagcagucgucucccuauccaacggcgucuccguauuaacauucaaaguccucgaccucaaaaacuacauagacaaacagcuacuccccauccuaaacaaacaauccugcuccauccccaacaucgaaacugucaucgaguuccaacagaaaaacaaccgccuccuagaaaucacccgagaguucuccguaaacgccggcgucacuacccccgucucuaccuauaugcuaaccaacucugaacuccuaucccuaaucaacgauaugcccauaacuaacgaccaaaagaaacuuauguccaacaacguacaaauaguccggcaacaaucauacucuaucaugugcaucaucaaagaagaaguacuugccuacguuguccaacucccacuauacggcgucauagacacuccaugcuggaaacuucacaccucaccccucugcaccacuaacacuaaagaaggcucuaacaucugccuuacccgcaccgaccgcggaugguacugcgacaacgcaggcucaguuagcuucuucccacaagccgaaaccugcaaaguccagucaaaccgugucuucugcgauaccaugaacucgcucacccucccuuccgaagucaaccucugcaacgucgacaucuucaaccccaaauacgacugcaaaaucaugaccucaaaaaccgacguaucuucuuccgucaucaccucccucggcgccaucguauccugcuacggcaaaaccaaaugcacugcaucaaacaaaaaccgaggcaucaucaaaaccuucucgaacggaugcgacuacguauccaacaagggcgucgacacagucuccguugguaacacccucuacugcgucaacaaacaagaaggccaaucccuauacguaaaaggcgaacccaucaucaacuucuacgacccccucgucuuccccagugacgaauuugacgccuccaucucccaagucaacgaaaagaucaaccaaucccuugccuucauacgcaaauccgacgaacuccuacacaacguuaacgccggaaaaucaacaaccaacaucaugaucacaaccaucauaaucgucauaaucgucauacuccucucccucauagccgucggccugcuauuguacuguaaagcccgcuccacaccagucacacuuucaaaagaccaacucuccgggaucaacaacaucgccuucuccaacuaaggacuagucccuguucccagagcccacuuuuuuuucuuuuuuugaaauaaaauagccugucuuucagaucuaaaaaaaaaaaaaaaaaaaaaaaaaaaaaaaaaaaaaaaaaaaaaaaaaaaaaaaaaaaaaaaaugcaucccccccccccccccccccccccccccccccaaaggcucuuuucagagccaccagaauu

SEQ ID NO: 3145 - RNA, 1930 nt, Artificial Sequence
  mRNA product Design a-4 comprising derived and/or modified sequence from HRSV(A2)__F_DSCav1_mut3 (opt1)
gggagacuccugucgggcggaaguaggaggaguagaguuuaaaaacaguacucuuuuuccgguucgggacguaguugaagcaacgacaagccggauaaccgcucuugagacaggaagcuuaccauggagcugcucauccugaaggccaacgccaucaccaccauccugacggcggugaccuucugcuucgccagcggccagaacaucaccgaggaguucuaccaguccacgugcagcgccgucuccaagggguaccucggcgcccugcggaccggcugguacaccuccgugaucaccaucgagcugagcaacaucaaggagaucaagugcaacgggaccgacgccaaggugaagcucaucaagcaggagcuggacaaguacaagaacgcggucacggaccugcagcuccugaugcaguccaccccggcaaccggcuccggcuccgccaucugcagcggcgucgccgugugcaaggugcugcaccucgagggggaggucaacaagaucaagagcgcccugcuguccaccaacaaggccguggugagccucuccaacggcgucagcgugcugaccuucaaggugcuggaccucaagaacuacaucgacaagcagcugcugcccauccugaacaagcagagcugcuccauccccaacaucgagacggugaucgaguuccagcagaagaacaaccggcuccuggagaucacccgcgaguucagcgugaacgccggggucaccacccccguguccacguacaugcugaccaacagcgagcuccugucccugaucaacgacaugccgaucaccaacgaccagaagaagcucaugagcaacaacgugcagaucguccggcagcaguccuacagcaucaugugcaucaucaaggaggaggugcuggcguacgugguccagcugccccucuacggcgugaucgacacccccugcuggaagcugcacacgagcccccugugcaccaccaacaccaaggagggguccaacaucugccucacgcgcaccgaccggggcugguacugcgacaacgccggcagcgucuccuucuucccgcaggccgagaccugcaaggugcagagcaaccgcguguucugcgacaccaugaacucccugacgcugcccagcgagguaaaccucugcaacgucgacaucuucaaccccaaguacgacugcaagaucaugaccuccaagaccgacgugagcuccagcgugaucaccucccugggggccaucgucagcugcuacggcaagacgaagugcaccgccagcaacaagaaccgggggaucaucaagaccuucuccaacggcugcgacuacgugagcaacaagggcguggacaccguguccgucgggaacacccuguacugcgugaacaagcaggagggccagagccucuacgugaagggggagcccaucaucaacuucuacgacccgcuggucuuccccuccgacgaguucgacgcgagcaucucccaggugaacgagaagaucaaccagagccuggccuucauccgcaaguccgacgagcugcuccacaacgugaacgccggcaagagcacgaccaacaucaugaucaccaccaucaucaucgucaucaucgugauccugcugucccucaucgccguggggcugcugcucuacugcaaggcccggagcacgcccgucacccuguccaaggaccagcugagcggcaucaacaacaucgcguucuccaacugaggacuagucccuguucccagagcccacuuuuuuuucuuuuuuugaaauaaaauagccugucuuucagaucuaaaaaaaaaaaaaaaaaaaaaaaaaaaaaaaaaaaaaaaaaaaaaaaaaaaaaaaaaaaaaaaaugcaucccccccccccccccccccccccccccccccaaaggcucuuuucagagccaccagaauu

SEQ ID NO: 3146 - RNA, 1930 nt, Artificial Sequence
  mRNA product Design a-4 comprising derived and/or modified sequence from HRSV(A2)__F_DSCav1_mut3 (opt1)
gggagacuccugucgggcggaaguaggaggaguagaguuuaaaaacaguacucuuuuuccgguucgggacguaguugaagcaacgacaagccggauaaccgcucuugagacaggaagcuuaccauggagcugcucauccugaaggccaacgccaucaccaccauccugacggcggugaccuucugcuucgccagcggccagaacaucaccgaggaguucuaccaguccacgugcagcgccgucuccaagggguaccucggcgcccugcgcaccgggugguacaccagcgugaucaccaucgagcuguccaacaucaaggagaucaagugcaacggcaccgacgccaaggugaagcucaucaagcaggagcuggacaaguacaagaacgcggucacggaccugcagcuccugaugcagagcacccccgccaccggguccggcagcgccaucugcuccggcguggccgugugcaagguccugcaccucgagggggaggugaacaagaucaagagcgcgcugcuguccaccaacaaggccguggucagccucuccaacggcgugagcgugcugacguucaagguccuggaccucaagaacuacaucgacaagcagcugcugccgauccucaacaagcaguccugcagcauccccaacaucgagaccgugaucgaguuccagcagaagaacaaccggcugcuggagaucacccgcgaguucuccgugaacgccggggucaccacgcccgugagcaccuacaugcucaccaacuccgagcugcugagccucaucaacgacaugcccaucaccaacgaccagaagaagcugaugagcaacaacgugcagaucguccggcagcaguccuacagcaucaugugcaucaucaaggaggaggugcuggccuacgugguccagcucccgcuguacggcgugaucgacacgcccugcuggaagcugcacaccagcccccucugcaccaccaacacgaaggagggguccaacaucugccugacccgcaccgaccggggcugguacugcgacaacgccggcuccgugagcuucuucccccaggcggagaccugcaagguccaguccaaccgcguguucugcgacacgaugaacagccugacccucccguccgaggucaaccugugcaacguggacaucuucaaccccaaguacgacugcaagaucaugaccagcaagaccgacguguccagcuccgucaucacgagccugggggccaucguguccugcuacggcaagaccaagugcaccgccagcaacaagaaccgggggaucaucaagaccuucuccaacggcugcgacuacgugagcaacaagggcgucgacacgguguccguggggaacacccucuacugcgucaacaagcaggagggccagagccuguacgugaagggggagcccaucaucaacuucuacgacccccugguguucccgagcgacgaguucgacgccuccaucagccaggucaacgagaagaucaaccagucccucgccuucauccgcaagagcgacgagcugcugcacaacgugaacgcgggcaaguccaccaccaacaucaugaucaccacgaucaucaucgugaucaucgucauccuccugagccugaucgccguggggcuccugcuguacugcaaggcccgguccacccccgugacccugagcaaggaccagcucuccggcaucaacaacaucgccuucagcaacugaggacuagucccuguucccagagcccacuuuuuuuucuuuuuuugaaauaaaauagccugucuuucagaucuaaaaaaaaaaaaaaaaaaaaaaaaaaaaaaaaaaaaaaaaaaaaaaaaaaaaaaaaaaaaaaaaugcaucccccccccccccccccccccccccccccccaaaggcucuuuucagagccaccagaauu

SEQ ID NO: 3147 - RNA, 1930 nt, Artificial Sequence
  mRNA product Design a-4 comprising derived and/or modified sequence from HRSV(A2)__F_DSCav1_mut3 (opt2)
gggagacuccugucgggcggaaguaggaggaguagaguuuaaaaacaguacucuuuuuccgguucgggacguaguugaagcaacgacaagccggauaaccgcucuugagacaggaagcuuaccauggagcuccucauccucaaggccaacgccaucaccaccauccucaccgccgucaccuucugcuucgccuccggccagaacaucaccgaggaguucuaccaguccaccugcuccgccgucuccaagggcuaccucggcgcccuccgcaccggcugguacaccuccgucaucaccaucgagcucuccaacaucaaggagaucaagugcaacggcaccgacgccaaggucaagcucaucaagcaggagcucgacaaguacaagaacgccgucaccgaccuccagcuccucaugcaguccacccccgccaccggcuccggcuccgccaucugcuccggcgucgccgucugcaagguccuccaccucgagggcgaggucaacaagaucaaguccgcccuccucuccaccaacaaggccgucgucucccucuccaacggcgucuccguccucaccuucaagguccucgaccucaagaacuacaucgacaagcagcuccuccccauccucaacaagcaguccugcuccauccccaacaucgagaccgucaucgaguuccagcagaagaacaaccgccuccucgagaucacccgcgaguucuccgucaacgccggcgucaccacccccgucuccaccuacaugcucaccaacuccgagcuccucucccucaucaacgacaugcccaucaccaacgaccagaagaagcucauguccaacaacguccagaucguccgccagcaguccuacuccaucaugugcaucaucaaggaggagguccucgccuacgucguccagcucccccucuacggcgucaucgacacccccugcuggaagcuccacaccuccccccucugcaccaccaacaccaaggagggcuccaacaucugccucacccgcaccgaccgcggcugguacugcgacaacgccggcuccgucuccuucuucccccaggccgagaccugcaagguccaguccaaccgcgucuucugcgacaccaugaacucccucacccuccccuccgaggucaaccucugcaacgucgacaucuucaaccccaaguacgacugcaagaucaugaccuccaagaccgacgucuccuccuccgucaucaccucccucggcgccaucgucuccugcuacggcaagaccaagugcaccgccuccaacaagaaccgcggcaucaucaagaccuucuccaacggcugcgacuacgucuccaacaagggcgucgacaccgucuccgucggcaacacccucuacugcgucaacaagcaggagggccagucccucuacgucaagggcgagcccaucaucaacuucuacgacccccucgucuuccccuccgacgaguucgacgccuccaucucccaggucaacgagaagaucaaccagucccucgccuucauccgcaaguccgacgagcuccuccacaacgucaacgccggcaaguccaccaccaacaucaugaucaccaccaucaucaucgucaucaucgucauccuccucucccucaucgccgucggccuccuccucuacugcaaggcccgcuccacccccgucacccucuccaaggaccagcucuccggcaucaacaacaucgccuucuccaacugaggacuagucccuguucccagagcccacuuuuuuuucuuuuuuugaaauaaaauagccugucuuucagaucuaaaaaaaaaaaaaaaaaaaaaaaaaaaaaaaaaaaaaaaaaaaaaaaaaaaaaaaaaaaaaaaaugcaucccccccccccccccccccccccccccccccaaaggcucuuuucagagccaccagaauu

SEQ ID NO: 3148 - RNA, 1930 nt, Artificial Sequence
  mRNA product Design a-4 comprising derived and/or modified sequence from HRSV(A2)__F_DSCav1_mut3 (opt3)
gggagacuccugucgggcggaaguaggaggaguagaguuuaaaaacaguacucuuuuuccgguucgggacguaguugaagcaacgacaagccggauaaccgcucuugagacaggaagcuuaccauggagcugcucauccuuaaggccaacgcuauuaccacaauacugacugcagugacguucugcuuugccagcggccagaauaucaccgaagaguucuaccaauccacauguucugcggucucaaaaggguauuugggagcuuuaagaacugguugguacaccaguguuauuacaaucgaacugagcaacauuaaggagaucaaaugcaauggcaccgacgccaaggugaaacuaauaaagcaggaacucgauaaguauaaaaacgcaguaacugaccugcagcuucugaugcaguccacacccgccaccgggucuggaucggcuaucuguucaggcguggcagucugcaagguguugcaccucgagggugagguuaauaaaauuaagagcgcccugcugaguacgaacaaagcuguggucucccucucuaauggggugagcguauuaacuuuuaagguucuggaucuuaagaacuacaucgacaaacaauugcugccuauucuaaauaagcaguccuguucaaucccaaacauagaaaccgugauugaguuccagcagaaaaauaacaggcuccuggaaaucacacgggaguuuagugucaaugccggagugacuaccccggugagcacauauaugcuuaccaacucugagcuguugucccucauuaaugauaugcccaucacgaacgaccaaaagaaacugaugucaaacaauguccagaucguucgccagcagagcuacaguauuaugugcauaaucaaggaagagguguuagcguauguagugcaacugccucucuacggcgucauugauacuccauguuggaaacuucauacaucuccccugugcaccacuaacacaaaggaaggcuccaauaucuguuugacccgaacggaccgugggugguacugcgauaacgcaggaagcgugucguucuuuccucaggccgagaccuguaagguucagucuaauagaguguucugcgacacaaugaacucccuaacucugccaucagaagucaaucucugcaacguggauauauuuaaucccaaauaugacuguaagauuaugaccaguaaaacagauguaagcuccucuguuaucacuagccugggugcuaucgugucaugcuacggcaagaccaaauguacagccaguaacaagaauagggggauuaucaagaccuucuccaacggaugcgacuaugucagcaauaaaggcguggacacugucucuguggguaacacgcuuuacuguguuaauaagcaagaggggcagucacuguaugugaaaggagagccuauuauaaacuuuuacgauccauugguauucccgagugacgaauuugaugcaagcaucucccaggucaacgagaagauuaaucagucucucgcuuucauccggaaaucggacgaacuguuacacaacgugaaugccggcaagagcacaaccaacaucaugauuacuaccauaaucauuguuaucauugugauccugcuaucccucauagcggucggccugcuuuuguauugcaaggcccgcucaacacccgugacccugaguaaagaucaacucucugggaucaauaacauugcauucagcaauugaggacuagucccuguucccagagcccacuuuuuuuucuuuuuuugaaauaaaauagccugucuuucagaucuaaaaaaaaaaaaaaaaaaaaaaaaaaaaaaaaaaaaaaaaaaaaaaaaaaaaaaaaaaaaaaaaugcaucccccccccccccccccccccccccccccccaaaggcucuuuucagagccaccagaauu

SEQ ID NO: 3149 - RNA, 1930 nt, Artificial Sequence
  mRNA product Design a-4 comprising derived and/or modified sequence from HRSV(A2)__F_DSCav1_mut3 (opt4)
gggagacuccugucgggcggaaguaggaggaguagaguuuaaaaacaguacucuuuuuccgguucgggacguaguugaagcaacgacaagccggauaaccgcucuugagacaggaagcuuaccauggagcugcugauccugaaggccaacgccaucaccaccauccugaccgccgugaccuucugcuucgccagcggccagaacaucaccgaggaguucuaccagagcaccugcagcgccgugagcaagggcuaccugggcgcccugagaaccggcugguacaccagcgugaucaccaucgagcugagcaacaucaaggagaucaagugcaacggcaccgacgccaaggugaagcugaucaagcaggagcuggacaaguacaagaacgccgugaccgaccugcagcugcugaugcagagcacccccgccaccggcagcggcagcgccaucugcagcggcguggccgugugcaaggugcugcaccuggagggcgaggugaacaagaucaagagcgcccugcugagcaccaacaaggccguggugagccugagcaacggcgugagcgugcugaccuucaaggugcuggaccugaagaacuacaucgacaagcagcugcugcccauccugaacaagcagagcugcagcauccccaacaucgagaccgugaucgaguuccagcagaagaacaacagacugcuggagaucaccagagaguucagcgugaacgccggcgugaccacccccgugagcaccuacaugcugaccaacagcgagcugcugagccugaucaacgacaugcccaucaccaacgaccagaagaagcugaugagcaacaacgugcagaucgugagacagcagagcuacagcaucaugugcaucaucaaggaggaggugcuggccuacguggugcagcugccccuguacggcgugaucgacacccccugcuggaagcugcacaccagcccccugugcaccaccaacaccaaggagggcagcaacaucugccugaccagaaccgacagaggcugguacugcgacaacgccggcagcgugagcuucuucccccaggccgagaccugcaaggugcagagcaacagaguguucugcgacaccaugaacagccugacccugcccagcgaggugaaccugugcaacguggacaucuucaaccccaaguacgacugcaagaucaugaccagcaagaccgacgugagcagcagcgugaucaccagccugggcgccaucgugagcugcuacggcaagaccaagugcaccgccagcaacaagaacagaggcaucaucaagaccuucagcaacggcugcgacuacgugagcaacaagggcguggacaccgugagcgugggcaacacccuguacugcgugaacaagcaggagggccagagccuguacgugaagggcgagcccaucaucaacuucuacgacccccugguguuccccagcgacgaguucgacgccagcaucagccaggugaacgagaagaucaaccagagccuggccuucaucagaaagagcgacgagcugcugcacaacgugaacgccggcaagagcaccaccaacaucaugaucaccaccaucaucaucgugaucaucgugauccugcugagccugaucgccgugggccugcugcuguacugcaaggccagaagcacccccgugacccugagcaaggaccagcugagcggcaucaacaacaucgccuucagcaacugaggacuagucccuguucccagagcccacuuuuuuuucuuuuuuugaaauaaaauagccugucuuucagaucuaaaaaaaaaaaaaaaaaaaaaaaaaaaaaaaaaaaaaaaaaaaaaaaaaaaaaaaaaaaaaaaaugcaucccccccccccccccccccccccccccccccaaaggcucuuuucagagccaccagaauu

SEQ ID NO: 3150 - RNA, 1930 nt, Artificial Sequence
  mRNA product Design a-4 comprising derived and/or modified sequence from HRSV(A2)__F_DSCav1_mut3 (opt5)
gggagacuccugucgggcggaaguaggaggaguagaguuuaaaaacaguacucuuuuuccgguucgggacguaguugaagcaacgacaagccggauaaccgcucuugagacaggaagcuuaccauggagcugcucauccugaaggccaacgcuauuaccacaauccuuacggccgugaccuucugcuuugcgagcggccagaauauuacagaagaguucuaccaauccaccuguucugcugucagcaaaggguaucugggagcccucagaacaggcugguacaccuccguuaucacaauugaacugucuaacaucaaggagaucaaaugcaaugggaccgacgccaaggugaaacuuauuaagcaggaacuggauaaguauaaaaacgcugugacggaccuccagcugcugaugcagagcacccccgccacaggauccggcucugcuaucuguagcggggucgccgugugcaagguucuccaccuggagggagaggugaauaaaauuaaguccgcgcuucugagcaccaacaaagccgucgugucucucuccaauggcguuagcgugcugacauuuaagguccuugaucugaagaacuacaucgacaaacaacuccugccuauucugaauaagcagucuuguuccaucccgaacauugaaaccgugaucgaguuccagcagaaaaauaaccggcuccuggaaaucacgcgcgaguuuagcgugaaugcuggcgucacaacccccguuucuacauauaugcuuaccaacuccgagcugcucagccugauuaaugauaugccuaucaccaacgaccaaaagaaacuuauguccaacaaugugcagauugugagacagcagucuuacagcaucaugugcauuaucaaggaagagguccuggccuaugugguucaacucccccuguacggggugaucgauacaccuuguuggaaacugcauacgagcccccucugcaccacaaacaccaaggaaggauccaauauuugucugacacggaccgaccgcggcugguacugcgauaacgcugggucugucuccuucuuuccucaggccgagacguguaaggugcagagcaauagaguuuucugcgacacaaugaacucucuuacccugccgagcgaagugaaucucugcaacgucgauaucuuuaaucccaaauaugacuguaagauuaugaccuccaaaacagaugugucuagcuccgucaucaccagccugggagcgauugugucuugcuacggcaagacaaaauguacggccuccaacaagaaucgggggaucaucaagaccuucagcaacggaugcgacuauguuucuaauaaaggcguggacacagucuccgugggcaacacccuuuacuguguuaauaagcaagaggggcagagccuguaugugaaaggagagccuauuaucaacuuuuacgauccccucgucuucccuuccgacgaauuugaugcuucuauuagccaggugaacgagaagaucaaucagucccuggccuucauucgcaaaucugacgaacugcuccacaacgugaaugcuggcaagagcacaaccaacaucaugauuacgaccaucaucauuguuaucauugucauccugcuuucccugauugccguggggcuccugcuguauugcaaggccagaagcacacccgugacccuuucuaaagaucaacucuccggaaucaauaacaucgcuuucagcaauugaggacuagucccuguucccagagcccacuuuuuuuucuuuuuuugaaauaaaauagccugucuuucagaucuaaaaaaaaaaaaaaaaaaaaaaaaaaaaaaaaaaaaaaaaaaaaaaaaaaaaaaaaaaaaaaaaugcaucccccccccccccccccccccccccccccccaaaggcucuuuucagagccaccagaauu

SEQ ID NO: 3151 - RNA, 1930 nt, Artificial Sequence
  mRNA product Design a-4 comprising derived and/or modified sequence from HRSV(A2)__F_DSCav1_mut3 (opt6)
gggagacuccugucgggcggaaguaggaggaguagaguuuaaaaacaguacucuuuuuccgguucgggacguaguugaagcaacgacaagccggauaaccgcucuugagacaggaagcuuaccauggaauuacucauacuaaaagccaaugccauaaccacuauucuaacagcaguaacauucuguuucgccucaggacaaaacauaacagaagaauuuuaucaauccaccuguuccgcagucucgaaaggcuaccuuggcgcacuaagaaccggaugguauacaucaguaauaaccauugaacuaucaaauaucaaagaaauaaaaugcaacggaacugacgcaaaagucaaacuaauaaaacaagaauuagacaaauacaaaaacgccguuacagacuuacaacuacuaaugcaaucaacuccagcaacaggaucaggaucugcuauaugcucaggugucgccguauguaaaguguuacaccucgaaggcgaaguaaacaaaauaaaaucagcacuacuauccacaaauaaagcaguaguaucacuauccaaugguguaucaguacucacauucaaaguacuagacuuaaaaaauuauauagauaaacaauuacuaccaauauuaaacaaacaaucaugcucaauaccaaacauagaaaccgucauugaauuucaacaaaaaaacaaucgacuucuugaaauaacacgagaauuuucaguaaaugccggaguaacaaccccagucucaacauacauguuaaccaacucugaacuccuaagccuaaucaacgacaugcccauaacuaacgaccaaaaaaaacuaauguccaauaauguccaaauaguaagacaacaauccuacucaauaaugugcauuauaaaagaagaaguccucgccuauguaguacaacuacccuuauacggaguaauugacacaccauguuggaaacuacauacaucaccacuaugcaccacuaacacaaaagaaggcuccaacauaugccuaacccgaacagaucgcggaugguauugcgacaacgcaggaaguguauccuucuuuccacaagcagaaacaugcaaaguacaauccaacagaguauucugugacaccaugaacucucuaacacuaccuuccgaaguaaauuuaugcaacguagacauauuuaaucccaaauacgacuguaaaauaaugaccucaaaaacugaugucucaucaucagucauuacaucacucggagcaauagucaguugcuauggaaaaaccaaaugcacagcuaguaacaaaaacagggguauaauaaaaacauuuucaaacggaugcgauuacguaucaaauaaaggaguagacaccguauccguaggaaauacucucuacugcguaaacaaacaagaaggacaaucccuauacguaaaaggcgaaccaaucauuaacuuuuacgacccacuuguauuuccaucagacgaauuugaugccucaauaucccaagucaaugaaaaaauaaaccaaagucuagcauucauccgaaaaucagaugaacuuuuacacaacguaaacgccggaaaaucaacaacaaacaucaugaucacaacaaucaucauaguaauaauaguuauacuacuuuccuuaauagcagucggccuacuacucuacugcaaagcacgauccacaccaguaaccuuaucuaaagaccaacucucaggcauaaacaacauagcauucucaaacuaaggacuagucccuguucccagagcccacuuuuuuuucuuuuuuugaaauaaaauagccugucuuucagaucuaaaaaaaaaaaaaaaaaaaaaaaaaaaaaaaaaaaaaaaaaaaaaaaaaaaaaaaaaaaaaaaaugcaucccccccccccccccccccccccccccccccaaaggcucuuuucagagccaccagaauu

SEQ ID NO: 3152 - RNA, 1930 nt, Artificial Sequence
  mRNA product Design a-4 comprising derived and/or modified sequence from HRSV(A2)__F_DSCav1_mut3 (opt11)
gggagacuccugucgggcggaaguaggaggaguagaguuuaaaaacaguacucuuuuuccgguucgggacguaguugaagcaacgacaagccggauaaccgcucuugagacaggaagcuuaccauggaacuccucauccuuaaagcaaacgccaucacaaccauccucacagcagucacuuucugcuucgcauccggacaaaacaucacagaagaguucuaucaauccacgugcuccgcaguuuccaaaggauaccuuggagccuuacgaaccggcugguacaccuccgucaucaccauagaacucagcaacaucaaagaaaucaaaugcaacggaaccgacgcaaaagucaaacucaucaaacaagaacuagacaaauacaaaaacgcagucaccgaccuccaacuacucaugcaaucaacccccgcaaccggcuccggcuccgccaucugcuccggaguagccguaugcaaaguccuccaccucgaaggcgaaguuaacaagaucaaguccgcacuccuaucaaccaacaaagcagucgucucccuauccaacggcgucuccguauuaacauucaaaguccucgaccucaaaaacuacauagacaaacagcuacuccccauccuaaacaaacaauccugcuccauccccaacaucgaaacugucaucgaguuccaacagaaaaacaaccgccuccuagaaaucacccgagaguucuccguaaacgccggcgucacuacccccgucucuaccuauaugcuaaccaacucugaacuccuaucccuaaucaacgauaugcccauaacuaacgaccaaaagaaacuuauguccaacaacguacaaauaguccggcaacaaucauacucuaucaugugcaucaucaaagaagaaguacuugccuacguuguccaacucccacuauacggcgucauagacacuccaugcuggaaacuucacaccucaccccucugcaccacuaacacuaaagaaggcucuaacaucugccuuacccgcaccgaccgcggaugguacugcgacaacgcaggcucaguuagcuucuucccacaagccgaaaccugcaaaguccagucaaaccgugucuucugcgauaccaugaacucgcucacccucccuuccgaagucaaccucugcaacgucgacaucuucaaccccaaauacgacugcaaaaucaugaccucaaaaaccgacguaucuucuuccgucaucaccucccucggcgccaucguauccugcuacggcaaaaccaaaugcacugcaucaaacaaaaaccgaggcaucaucaaaaccuucucgaacggaugcgacuacguauccaacaagggcgucgacacagucuccguugguaacacccucuacugcgucaacaaacaagaaggccaaucccuauacguaaaaggcgaacccaucaucaacuucuacgacccccucgucuuccccagugacgaauuugacgccuccaucucccaagucaacgaaaagaucaaccaaucccuugccuucauacgcaaauccgacgaacuccuacacaacguuaacgccggaaaaucaacaaccaacaucaugaucacaaccaucauaaucgucauaaucgucauacuccucucccucauagccgucggccugcuauuguacuguaaagcccgcuccacaccagucacacuuucaaaagaccaacucuccgggaucaacaacaucgccuucuccaacuaaggacuagucccuguucccagagcccacuuuuuuuucuuuuuuugaaauaaaauagccugucuuucagaucuaaaaaaaaaaaaaaaaaaaaaaaaaaaaaaaaaaaaaaaaaaaaaaaaaaaaaaaaaaaaaaaaugcaucccccccccccccccccccccccccccccccaaaggcucuuuucagagccaccagaauu

SEQ ID NO: 3153 - RNA, 1876 nt, Artificial Sequence
  mRNA product Design a-5 comprising derived and/or modified sequence from HRSV(A2)__F_DSCav1_mut3 (opt1)
gggagacuuucccauucuguagcagaauuugguguugccuguggucuuggucccgcggagaagcuuaccauggagcugcucauccugaaggccaacgccaucaccaccauccugacggcggugaccuucugcuucgccagcggccagaacaucaccgaggaguucuaccaguccacgugcagcgccgucuccaagggguaccucggcgcccugcggaccggcugguacaccuccgugaucaccaucgagcugagcaacaucaaggagaucaagugcaacgggaccgacgccaaggugaagcucaucaagcaggagcuggacaaguacaagaacgcggucacggaccugcagcuccugaugcaguccaccccggcaaccggcuccggcuccgccaucugcagcggcgucgccgugugcaaggugcugcaccucgagggggaggucaacaagaucaagagcgcccugcuguccaccaacaaggccguggugagccucuccaacggcgucagcgugcugaccuucaaggugcuggaccucaagaacuacaucgacaagcagcugcugcccauccugaacaagcagagcugcuccauccccaacaucgagacggugaucgaguuccagcagaagaacaaccggcuccuggagaucacccgcgaguucagcgugaacgccggggucaccacccccguguccacguacaugcugaccaacagcgagcuccugucccugaucaacgacaugccgaucaccaacgaccagaagaagcucaugagcaacaacgugcagaucguccggcagcaguccuacagcaucaugugcaucaucaaggaggaggugcuggcguacgugguccagcugccccucuacggcgugaucgacacccccugcuggaagcugcacacgagcccccugugcaccaccaacaccaaggagggguccaacaucugccucacgcgcaccgaccggggcugguacugcgacaacgccggcagcgucuccuucuucccgcaggccgagaccugcaaggugcagagcaaccgcguguucugcgacaccaugaacucccugacgcugcccagcgagguaaaccucugcaacgucgacaucuucaaccccaaguacgacugcaagaucaugaccuccaagaccgacgugagcuccagcgugaucaccucccugggggccaucgucagcugcuacggcaagacgaagugcaccgccagcaacaagaaccgggggaucaucaagaccuucuccaacggcugcgacuacgugagcaacaagggcguggacaccguguccgucgggaacacccuguacugcgugaacaagcaggagggccagagccucuacgugaagggggagcccaucaucaacuucuacgacccgcuggucuuccccuccgacgaguucgacgcgagcaucucccaggugaacgagaagaucaaccagagccuggccuucauccgcaaguccgacgagcugcuccacaacgugaacgccggcaagagcacgaccaacaucaugaucaccaccaucaucaucgucaucaucgugauccugcugucccucaucgccguggggcugcugcucuacugcaaggcccggagcacgcccgucacccuguccaaggaccagcugagcggcaucaacaacaucgcguucuccaacugaggacuagucccuguucccagagcccacuuuuuuuucuuuuuuugaaauaaaauagccugucuuucagaucuaaaaaaaaaaaaaaaaaaaaaaaaaaaaaaaaaaaaaaaaaaaaaaaaaaaaaaaaaaaaaaaaugcaucccccccccccccccccccccccccccccccaaaggcucuuuucagagccaccagaauu

SEQ ID NO: 3154 - RNA, 1876 nt, Artificial Sequence
  mRNA product Design a-5 comprising derived and/or modified sequence from HRSV(A2)__F_DSCav1_mut3 (opt1)
gggagacuuucccauucuguagcagaauuugguguugccuguggucuuggucccgcggagaagcuuaccauggagcugcucauccugaaggccaacgccaucaccaccauccugacggcggugaccuucugcuucgccagcggccagaacaucaccgaggaguucuaccaguccacgugcagcgccgucuccaagggguaccucggcgcccugcgcaccgggugguacaccagcgugaucaccaucgagcuguccaacaucaaggagaucaagugcaacggcaccgacgccaaggugaagcucaucaagcaggagcuggacaaguacaagaacgcggucacggaccugcagcuccugaugcagagcacccccgccaccggguccggcagcgccaucugcuccggcguggccgugugcaagguccugcaccucgagggggaggugaacaagaucaagagcgcgcugcuguccaccaacaaggccguggucagccucuccaacggcgugagcgugcugacguucaagguccuggaccucaagaacuacaucgacaagcagcugcugccgauccucaacaagcaguccugcagcauccccaacaucgagaccgugaucgaguuccagcagaagaacaaccggcugcuggagaucacccgcgaguucuccgugaacgccggggucaccacgcccgugagcaccuacaugcucaccaacuccgagcugcugagccucaucaacgacaugcccaucaccaacgaccagaagaagcugaugagcaacaacgugcagaucguccggcagcaguccuacagcaucaugugcaucaucaaggaggaggugcuggccuacgugguccagcucccgcuguacggcgugaucgacacgcccugcuggaagcugcacaccagcccccucugcaccaccaacacgaaggagggguccaacaucugccugacccgcaccgaccggggcugguacugcgacaacgccggcuccgugagcuucuucccccaggcggagaccugcaagguccaguccaaccgcguguucugcgacacgaugaacagccugacccucccguccgaggucaaccugugcaacguggacaucuucaaccccaaguacgacugcaagaucaugaccagcaagaccgacguguccagcuccgucaucacgagccugggggccaucguguccugcuacggcaagaccaagugcaccgccagcaacaagaaccgggggaucaucaagaccuucuccaacggcugcgacuacgugagcaacaagggcgucgacacgguguccguggggaacacccucuacugcgucaacaagcaggagggccagagccuguacgugaagggggagcccaucaucaacuucuacgacccccugguguucccgagcgacgaguucgacgccuccaucagccaggucaacgagaagaucaaccagucccucgccuucauccgcaagagcgacgagcugcugcacaacgugaacgcgggcaaguccaccaccaacaucaugaucaccacgaucaucaucgugaucaucgucauccuccugagccugaucgccguggggcuccugcuguacugcaaggcccgguccacccccgugacccugagcaaggaccagcucuccggcaucaacaacaucgccuucagcaacugaggacuagucccuguucccagagcccacuuuuuuuucuuuuuuugaaauaaaauagccugucuuucagaucuaaaaaaaaaaaaaaaaaaaaaaaaaaaaaaaaaaaaaaaaaaaaaaaaaaaaaaaaaaaaaaaaugcaucccccccccccccccccccccccccccccccaaaggcucuuuucagagccaccagaauu

SEQ ID NO: 3155 - RNA, 1876 nt, Artificial Sequence
  mRNA product Design a-5 comprising derived and/or modified sequence from HRSV(A2)__F_DSCav1_mut3 (opt2)
gggagacuuucccauucuguagcagaauuugguguugccuguggucuuggucccgcggagaagcuuaccauggagcuccucauccucaaggccaacgccaucaccaccauccucaccgccgucaccuucugcuucgccuccggccagaacaucaccgaggaguucuaccaguccaccugcuccgccgucuccaagggcuaccucggcgcccuccgcaccggcugguacaccuccgucaucaccaucgagcucuccaacaucaaggagaucaagugcaacggcaccgacgccaaggucaagcucaucaagcaggagcucgacaaguacaagaacgccgucaccgaccuccagcuccucaugcaguccacccccgccaccggcuccggcuccgccaucugcuccggcgucgccgucugcaagguccuccaccucgagggcgaggucaacaagaucaaguccgcccuccucuccaccaacaaggccgucgucucccucuccaacggcgucuccguccucaccuucaagguccucgaccucaagaacuacaucgacaagcagcuccuccccauccucaacaagcaguccugcuccauccccaacaucgagaccgucaucgaguuccagcagaagaacaaccgccuccucgagaucacccgcgaguucuccgucaacgccggcgucaccacccccgucuccaccuacaugcucaccaacuccgagcuccucucccucaucaacgacaugcccaucaccaacgaccagaagaagcucauguccaacaacguccagaucguccgccagcaguccuacuccaucaugugcaucaucaaggaggagguccucgccuacgucguccagcucccccucuacggcgucaucgacacccccugcuggaagcuccacaccuccccccucugcaccaccaacaccaaggagggcuccaacaucugccucacccgcaccgaccgcggcugguacugcgacaacgccggcuccgucuccuucuucccccaggccgagaccugcaagguccaguccaaccgcgucuucugcgacaccaugaacucccucacccuccccuccgaggucaaccucugcaacgucgacaucuucaaccccaaguacgacugcaagaucaugaccuccaagaccgacgucuccuccuccgucaucaccucccucggcgccaucgucuccugcuacggcaagaccaagugcaccgccuccaacaagaaccgcggcaucaucaagaccuucuccaacggcugcgacuacgucuccaacaagggcgucgacaccgucuccgucggcaacacccucuacugcgucaacaagcaggagggccagucccucuacgucaagggcgagcccaucaucaacuucuacgacccccucgucuuccccuccgacgaguucgacgccuccaucucccaggucaacgagaagaucaaccagucccucgccuucauccgcaaguccgacgagcuccuccacaacgucaacgccggcaaguccaccaccaacaucaugaucaccaccaucaucaucgucaucaucgucauccuccucucccucaucgccgucggccuccuccucuacugcaaggcccgcuccacccccgucacccucuccaaggaccagcucuccggcaucaacaacaucgccuucuccaacugaggacuagucccuguucccagagcccacuuuuuuuucuuuuuuugaaauaaaauagccugucuuucagaucuaaaaaaaaaaaaaaaaaaaaaaaaaaaaaaaaaaaaaaaaaaaaaaaaaaaaaaaaaaaaaaaaugcaucccccccccccccccccccccccccccccccaaaggcucuuuucagagccaccagaauu

SEQ ID NO: 3156 - RNA, 1876 nt, Artificial Sequence
  mRNA product Design a-5 comprising derived and/or modified sequence from HRSV(A2)__F_DSCav1_mut3 (opt3)
gggagacuuucccauucuguagcagaauuugguguugccuguggucuuggucccgcggagaagcuuaccauggagcugcucauccuuaaggccaacgcuauuaccacaauacugacugcagugacguucugcuuugccagcggccagaauaucaccgaagaguucuaccaauccacauguucugcggucucaaaaggguauuugggagcuuuaagaacugguugguacaccaguguuauuacaaucgaacugagcaacauuaaggagaucaaaugcaauggcaccgacgccaaggugaaacuaauaaagcaggaacucgauaaguauaaaaacgcaguaacugaccugcagcuucugaugcaguccacacccgccaccgggucuggaucggcuaucuguucaggcguggcagucugcaagguguugcaccucgagggugagguuaauaaaauuaagagcgcccugcugaguacgaacaaagcuguggucucccucucuaauggggugagcguauuaacuuuuaagguucuggaucuuaagaacuacaucgacaaacaauugcugccuauucuaaauaagcaguccuguucaaucccaaacauagaaaccgugauugaguuccagcagaaaaauaacaggcuccuggaaaucacacgggaguuuagugucaaugccggagugacuaccccggugagcacauauaugcuuaccaacucugagcuguugucccucauuaaugauaugcccaucacgaacgaccaaaagaaacugaugucaaacaauguccagaucguucgccagcagagcuacaguauuaugugcauaaucaaggaagagguguuagcguauguagugcaacugccucucuacggcgucauugauacuccauguuggaaacuucauacaucuccccugugcaccacuaacacaaaggaaggcuccaauaucuguuugacccgaacggaccgugggugguacugcgauaacgcaggaagcgugucguucuuuccucaggccgagaccuguaagguucagucuaauagaguguucugcgacacaaugaacucccuaacucugccaucagaagucaaucucugcaacguggauauauuuaaucccaaauaugacuguaagauuaugaccaguaaaacagauguaagcuccucuguuaucacuagccugggugcuaucgugucaugcuacggcaagaccaaauguacagccaguaacaagaauagggggauuaucaagaccuucuccaacggaugcgacuaugucagcaauaaaggcguggacacugucucuguggguaacacgcuuuacuguguuaauaagcaagaggggcagucacuguaugugaaaggagagccuauuauaaacuuuuacgauccauugguauucccgagugacgaauuugaugcaagcaucucccaggucaacgagaagauuaaucagucucucgcuuucauccggaaaucggacgaacuguuacacaacgugaaugccggcaagagcacaaccaacaucaugauuacuaccauaaucauuguuaucauugugauccugcuaucccucauagcggucggccugcuuuuguauugcaaggcccgcucaacacccgugacccugaguaaagaucaacucucugggaucaauaacauugcauucagcaauugaggacuagucccuguucccagagcccacuuuuuuuucuuuuuuugaaauaaaauagccugucuuucagaucuaaaaaaaaaaaaaaaaaaaaaaaaaaaaaaaaaaaaaaaaaaaaaaaaaaaaaaaaaaaaaaaaugcaucccccccccccccccccccccccccccccccaaaggcucuuuucagagccaccagaauu

SEQ ID NO: 3157 - RNA, 1876 nt, Artificial Sequence
  mRNA product Design a-5 comprising derived and/or modified sequence from HRSV(A2)__F_DSCav1_mut3 (opt4)
gggagacuuucccauucuguagcagaauuugguguugccuguggucuuggucccgcggagaagcuuaccauggagcugcugauccugaaggccaacgccaucaccaccauccugaccgccgugaccuucugcuucgccagcggccagaacaucaccgaggaguucuaccagagcaccugcagcgccgugagcaagggcuaccugggcgcccugagaaccggcugguacaccagcgugaucaccaucgagcugagcaacaucaaggagaucaagugcaacggcaccgacgccaaggugaagcugaucaagcaggagcuggacaaguacaagaacgccgugaccgaccugcagcugcugaugcagagcacccccgccaccggcagcggcagcgccaucugcagcggcguggccgugugcaaggugcugcaccuggagggcgaggugaacaagaucaagagcgcccugcugagcaccaacaaggccguggugagccugagcaacggcgugagcgugcugaccuucaaggugcuggaccugaagaacuacaucgacaagcagcugcugcccauccugaacaagcagagcugcagcauccccaacaucgagaccgugaucgaguuccagcagaagaacaacagacugcuggagaucaccagagaguucagcgugaacgccggcgugaccacccccgugagcaccuacaugcugaccaacagcgagcugcugagccugaucaacgacaugcccaucaccaacgaccagaagaagcugaugagcaacaacgugcagaucgugagacagcagagcuacagcaucaugugcaucaucaaggaggaggugcuggccuacguggugcagcugccccuguacggcgugaucgacacccccugcuggaagcugcacaccagcccccugugcaccaccaacaccaaggagggcagcaacaucugccugaccagaaccgacagaggcugguacugcgacaacgccggcagcgugagcuucuucccccaggccgagaccugcaaggugcagagcaacagaguguucugcgacaccaugaacagccugacccugcccagcgaggugaaccugugcaacguggacaucuucaaccccaaguacgacugcaagaucaugaccagcaagaccgacgugagcagcagcgugaucaccagccugggcgccaucgugagcugcuacggcaagaccaagugcaccgccagcaacaagaacagaggcaucaucaagaccuucagcaacggcugcgacuacgugagcaacaagggcguggacaccgugagcgugggcaacacccuguacugcgugaacaagcaggagggccagagccuguacgugaagggcgagcccaucaucaacuucuacgacccccugguguuccccagcgacgaguucgacgccagcaucagccaggugaacgagaagaucaaccagagccuggccuucaucagaaagagcgacgagcugcugcacaacgugaacgccggcaagagcaccaccaacaucaugaucaccaccaucaucaucgugaucaucgugauccugcugagccugaucgccgugggccugcugcuguacugcaaggccagaagcacccccgugacccugagcaaggaccagcugagcggcaucaacaacaucgccuucagcaacugaggacuagucccuguucccagagcccacuuuuuuuucuuuuuuugaaauaaaauagccugucuuucagaucuaaaaaaaaaaaaaaaaaaaaaaaaaaaaaaaaaaaaaaaaaaaaaaaaaaaaaaaaaaaaaaaaugcaucccccccccccccccccccccccccccccccaaaggcucuuuucagagccaccagaauu

SEQ ID NO: 3158 - RNA, 1876 nt, Artificial Sequence
  mRNA product Design a-5 comprising derived and/or modified sequence from HRSV(A2)__F_DSCav1_mut3 (opt5)
gggagacuuucccauucuguagcagaauuugguguugccuguggucuuggucccgcggagaagcuuaccauggagcugcucauccugaaggccaacgcuauuaccacaauccuuacggccgugaccuucugcuuugcgagcggccagaauauuacagaagaguucuaccaauccaccuguucugcugucagcaaaggguaucugggagcccucagaacaggcugguacaccuccguuaucacaauugaacugucuaacaucaaggagaucaaaugcaaugggaccgacgccaaggugaaacuuauuaagcaggaacuggauaaguauaaaaacgcugugacggaccuccagcugcugaugcagagcacccccgccacaggauccggcucugcuaucuguagcggggucgccgugugcaagguucuccaccuggagggagaggugaauaaaauuaaguccgcgcuucugagcaccaacaaagccgucgugucucucuccaauggcguuagcgugcugacauuuaagguccuugaucugaagaacuacaucgacaaacaacuccugccuauucugaauaagcagucuuguuccaucccgaacauugaaaccgugaucgaguuccagcagaaaaauaaccggcuccuggaaaucacgcgcgaguuuagcgugaaugcuggcgucacaacccccguuucuacauauaugcuuaccaacuccgagcugcucagccugauuaaugauaugccuaucaccaacgaccaaaagaaacuuauguccaacaaugugcagauugugagacagcagucuuacagcaucaugugcauuaucaaggaagagguccuggccuaugugguucaacucccccuguacggggugaucgauacaccuuguuggaaacugcauacgagcccccucugcaccacaaacaccaaggaaggauccaauauuugucugacacggaccgaccgcggcugguacugcgauaacgcugggucugucuccuucuuuccucaggccgagacguguaaggugcagagcaauagaguuuucugcgacacaaugaacucucuuacccugccgagcgaagugaaucucugcaacgucgauaucuuuaaucccaaauaugacuguaagauuaugaccuccaaaacagaugugucuagcuccgucaucaccagccugggagcgauugugucuugcuacggcaagacaaaauguacggccuccaacaagaaucgggggaucaucaagaccuucagcaacggaugcgacuauguuucuaauaaaggcguggacacagucuccgugggcaacacccuuuacuguguuaauaagcaagaggggcagagccuguaugugaaaggagagccuauuaucaacuuuuacgauccccucgucuucccuuccgacgaauuugaugcuucuauuagccaggugaacgagaagaucaaucagucccuggccuucauucgcaaaucugacgaacugcuccacaacgugaaugcuggcaagagcacaaccaacaucaugauuacgaccaucaucauuguuaucauugucauccugcuuucccugauugccguggggcuccugcuguauugcaaggccagaagcacacccgugacccuuucuaaagaucaacucuccggaaucaauaacaucgcuuucagcaauugaggacuagucccuguucccagagcccacuuuuuuuucuuuuuuugaaauaaaauagccugucuuucagaucuaaaaaaaaaaaaaaaaaaaaaaaaaaaaaaaaaaaaaaaaaaaaaaaaaaaaaaaaaaaaaaaaugcaucccccccccccccccccccccccccccccccaaaggcucuuuucagagccaccagaauu

SEQ ID NO: 3159 - RNA, 1876 nt, Artificial Sequence
  mRNA product Design a-5 comprising derived and/or modified sequence from HRSV(A2)__F_DSCav1_mut3 (opt6)
gggagacuuucccauucuguagcagaauuugguguugccuguggucuuggucccgcggagaagcuuaccauggaauuacucauacuaaaagccaaugccauaaccacuauucuaacagcaguaacauucuguuucgccucaggacaaaacauaacagaagaauuuuaucaauccaccuguuccgcagucucgaaaggcuaccuuggcgcacuaagaaccggaugguauacaucaguaauaaccauugaacuaucaaauaucaaagaaauaaaaugcaacggaacugacgcaaaagucaaacuaauaaaacaagaauuagacaaauacaaaaacgccguuacagacuuacaacuacuaaugcaaucaacuccagcaacaggaucaggaucugcuauaugcucaggugucgccguauguaaaguguuacaccucgaaggcgaaguaaacaaaauaaaaucagcacuacuauccacaaauaaagcaguaguaucacuauccaaugguguaucaguacucacauucaaaguacuagacuuaaaaaauuauauagauaaacaauuacuaccaauauuaaacaaacaaucaugcucaauaccaaacauagaaaccgucauugaauuucaacaaaaaaacaaucgacuucuugaaauaacacgagaauuuucaguaaaugccggaguaacaaccccagucucaacauacauguuaaccaacucugaacuccuaagccuaaucaacgacaugcccauaacuaacgaccaaaaaaaacuaauguccaauaauguccaaauaguaagacaacaauccuacucaauaaugugcauuauaaaagaagaaguccucgccuauguaguacaacuacccuuauacggaguaauugacacaccauguuggaaacuacauacaucaccacuaugcaccacuaacacaaaagaaggcuccaacauaugccuaacccgaacagaucgcggaugguauugcgacaacgcaggaaguguauccuucuuuccacaagcagaaacaugcaaaguacaauccaacagaguauucugugacaccaugaacucucuaacacuaccuuccgaaguaaauuuaugcaacguagacauauuuaaucccaaauacgacuguaaaauaaugaccucaaaaacugaugucucaucaucagucauuacaucacucggagcaauagucaguugcuauggaaaaaccaaaugcacagcuaguaacaaaaacagggguauaauaaaaacauuuucaaacggaugcgauuacguaucaaauaaaggaguagacaccguauccguaggaaauacucucuacugcguaaacaaacaagaaggacaaucccuauacguaaaaggcgaaccaaucauuaacuuuuacgacccacuuguauuuccaucagacgaauuugaugccucaauaucccaagucaaugaaaaaauaaaccaaagucuagcauucauccgaaaaucagaugaacuuuuacacaacguaaacgccggaaaaucaacaacaaacaucaugaucacaacaaucaucauaguaauaauaguuauacuacuuuccuuaauagcagucggccuacuacucuacugcaaagcacgauccacaccaguaaccuuaucuaaagaccaacucucaggcauaaacaacauagcauucucaaacuaaggacuagucccuguucccagagcccacuuuuuuuucuuuuuuugaaauaaaauagccugucuuucagaucuaaaaaaaaaaaaaaaaaaaaaaaaaaaaaaaaaaaaaaaaaaaaaaaaaaaaaaaaaaaaaaaaugcaucccccccccccccccccccccccccccccccaaaggcucuuuucagagccaccagaauu

SEQ ID NO: 3160 - RNA, 1876 nt, Artificial Sequence
  mRNA product Design a-5 comprising derived and/or modified sequence from HRSV(A2)__F_DSCav1_mut3 (opt11)
gggagacuuucccauucuguagcagaauuugguguugccuguggucuuggucccgcggagaagcuuaccauggaacuccucauccuuaaagcaaacgccaucacaaccauccucacagcagucacuuucugcuucgcauccggacaaaacaucacagaagaguucuaucaauccacgugcuccgcaguuuccaaaggauaccuuggagccuuacgaaccggcugguacaccuccgucaucaccauagaacucagcaacaucaaagaaaucaaaugcaacggaaccgacgcaaaagucaaacucaucaaacaagaacuagacaaauacaaaaacgcagucaccgaccuccaacuacucaugcaaucaacccccgcaaccggcuccggcuccgccaucugcuccggaguagccguaugcaaaguccuccaccucgaaggcgaaguuaacaagaucaaguccgcacuccuaucaaccaacaaagcagucgucucccuauccaacggcgucuccguauuaacauucaaaguccucgaccucaaaaacuacauagacaaacagcuacuccccauccuaaacaaacaauccugcuccauccccaacaucgaaacugucaucgaguuccaacagaaaaacaaccgccuccuagaaaucacccgagaguucuccguaaacgccggcgucacuacccccgucucuaccuauaugcuaaccaacucugaacuccuaucccuaaucaacgauaugcccauaacuaacgaccaaaagaaacuuauguccaacaacguacaaauaguccggcaacaaucauacucuaucaugugcaucaucaaagaagaaguacuugccuacguuguccaacucccacuauacggcgucauagacacuccaugcuggaaacuucacaccucaccccucugcaccacuaacacuaaagaaggcucuaacaucugccuuacccgcaccgaccgcggaugguacugcgacaacgcaggcucaguuagcuucuucccacaagccgaaaccugcaaaguccagucaaaccgugucuucugcgauaccaugaacucgcucacccucccuuccgaagucaaccucugcaacgucgacaucuucaaccccaaauacgacugcaaaaucaugaccucaaaaaccgacguaucuucuuccgucaucaccucccucggcgccaucguauccugcuacggcaaaaccaaaugcacugcaucaaacaaaaaccgaggcaucaucaaaaccuucucgaacggaugcgacuacguauccaacaagggcgucgacacagucuccguugguaacacccucuacugcgucaacaaacaagaaggccaaucccuauacguaaaaggcgaacccaucaucaacuucuacgacccccucgucuuccccagugacgaauuugacgccuccaucucccaagucaacgaaaagaucaaccaaucccuugccuucauacgcaaauccgacgaacuccuacacaacguuaacgccggaaaaucaacaaccaacaucaugaucacaaccaucauaaucgucauaaucgucauacuccucucccucauagccgucggccugcuauuguacuguaaagcccgcuccacaccagucacacuuucaaaagaccaacucuccgggaucaacaacaucgccuucuccaacuaaggacuagucccuguucccagagcccacuuuuuuuucuuuuuuugaaauaaaauagccugucuuucagaucuaaaaaaaaaaaaaaaaaaaaaaaaaaaaaaaaaaaaaaaaaaaaaaaaaaaaaaaaaaaaaaaaugcaucccccccccccccccccccccccccccccccaaaggcucuuuucagagccaccagaauu

SEQ ID NO: 3161 - RNA, 2057 nt, Artificial Sequence
  mRNA product Design b-1 comprising derived and/or modified sequence from HRSV(A2)__F_DSCav1_mut3 (opt1)
gggagacggagacggccugcaggaccugcucucucagcccucagccgaggccuacgccgagccgagugcgcagccgacgaccgggaggagccgcagccuucaacucugagguacugugauccgcgcugcccgccgggccgccccaguccgcugcugcggcaccuccuucccucgcgcccucuucgcucgccagcgccuucccugugagccugcgucaccgcggccgccaagcuuaccauggagcugcucauccugaaggccaacgccaucaccaccauccugacggcggugaccuucugcuucgccagcggccagaacaucaccgaggaguucuaccaguccacgugcagcgccgucuccaagggguaccucggcgcccugcggaccggcugguacaccuccgugaucaccaucgagcugagcaacaucaaggagaucaagugcaacgggaccgacgccaaggugaagcucaucaagcaggagcuggacaaguacaagaacgcggucacggaccugcagcuccugaugcaguccaccccggcaaccggcuccggcuccgccaucugcagcggcgucgccgugugcaaggugcugcaccucgagggggaggucaacaagaucaagagcgcccugcuguccaccaacaaggccguggugagccucuccaacggcgucagcgugcugaccuucaaggugcuggaccucaagaacuacaucgacaagcagcugcugcccauccugaacaagcagagcugcuccauccccaacaucgagacggugaucgaguuccagcagaagaacaaccggcuccuggagaucacccgcgaguucagcgugaacgccggggucaccacccccguguccacguacaugcugaccaacagcgagcuccugucccugaucaacgacaugccgaucaccaacgaccagaagaagcucaugagcaacaacgugcagaucguccggcagcaguccuacagcaucaugugcaucaucaaggaggaggugcuggcguacgugguccagcugccccucuacggcgugaucgacacccccugcuggaagcugcacacgagcccccugugcaccaccaacaccaaggagggguccaacaucugccucacgcgcaccgaccggggcugguacugcgacaacgccggcagcgucuccuucuucccgcaggccgagaccugcaaggugcagagcaaccgcguguucugcgacaccaugaacucccugacgcugcccagcgagguaaaccucugcaacgucgacaucuucaaccccaaguacgacugcaagaucaugaccuccaagaccgacgugagcuccagcgugaucaccucccugggggccaucgucagcugcuacggcaagacgaagugcaccgccagcaacaagaaccgggggaucaucaagaccuucuccaacggcugcgacuacgugagcaacaagggcguggacaccguguccgucgggaacacccuguacugcgugaacaagcaggagggccagagccucuacgugaagggggagcccaucaucaacuucuacgacccgcuggucuuccccuccgacgaguucgacgcgagcaucucccaggugaacgagaagaucaaccagagccuggccuucauccgcaaguccgacgagcugcuccacaacgugaacgccggcaagagcacgaccaacaucaugaucaccaccaucaucaucgucaucaucgugauccugcugucccucaucgccguggggcugcugcucuacugcaaggcccggagcacgcccgucacccuguccaaggaccagcugagcggcaucaacaacaucgcguucuccaacugaggacuaguguccaccugucccuccugggcugcuggauugucucguuuuccugccaaauaaacaggaucagcgcuuuacagaucuaaaaaaaaaaaaaaaaaaaaaaaaaaaaaaaaaaaaaaaaaaaaaaaaaaaaaaaaaaaaaaaaugcaucccccccccccccccccccccccccccccccaaaggcucuuuucagagccaccagaauu

SEQ ID NO: 3162 - RNA, 2057 nt, Artificial Sequence
  mRNA product Design b-1 comprising derived and/or modified sequence from HRSV(A2)__F_DSCav1_mut3 (opt1)
gggagacggagacggccugcaggaccugcucucucagcccucagccgaggccuacgccgagccgagugcgcagccgacgaccgggaggagccgcagccuucaacucugagguacugugauccgcgcugcccgccgggccgccccaguccgcugcugcggcaccuccuucccucgcgcccucuucgcucgccagcgccuucccugugagccugcgucaccgcggccgccaagcuuaccauggagcugcucauccugaaggccaacgccaucaccaccauccugacggcggugaccuucugcuucgccagcggccagaacaucaccgaggaguucuaccaguccacgugcagcgccgucuccaagggguaccucggcgcccugcgcaccgggugguacaccagcgugaucaccaucgagcuguccaacaucaaggagaucaagugcaacggcaccgacgccaaggugaagcucaucaagcaggagcuggacaaguacaagaacgcggucacggaccugcagcuccugaugcagagcacccccgccaccggguccggcagcgccaucugcuccggcguggccgugugcaagguccugcaccucgagggggaggugaacaagaucaagagcgcgcugcuguccaccaacaaggccguggucagccucuccaacggcgugagcgugcugacguucaagguccuggaccucaagaacuacaucgacaagcagcugcugccgauccucaacaagcaguccugcagcauccccaacaucgagaccgugaucgaguuccagcagaagaacaaccggcugcuggagaucacccgcgaguucuccgugaacgccggggucaccacgcccgugagcaccuacaugcucaccaacuccgagcugcugagccucaucaacgacaugcccaucaccaacgaccagaagaagcugaugagcaacaacgugcagaucguccggcagcaguccuacagcaucaugugcaucaucaaggaggaggugcuggccuacgugguccagcucccgcuguacggcgugaucgacacgcccugcuggaagcugcacaccagcccccucugcaccaccaacacgaaggagggguccaacaucugccugacccgcaccgaccggggcugguacugcgacaacgccggcuccgugagcuucuucccccaggcggagaccugcaagguccaguccaaccgcguguucugcgacacgaugaacagccugacccucccguccgaggucaaccugugcaacguggacaucuucaaccccaaguacgacugcaagaucaugaccagcaagaccgacguguccagcuccgucaucacgagccugggggccaucguguccugcuacggcaagaccaagugcaccgccagcaacaagaaccgggggaucaucaagaccuucuccaacggcugcgacuacgugagcaacaagggcgucgacacgguguccguggggaacacccucuacugcgucaacaagcaggagggccagagccuguacgugaagggggagcccaucaucaacuucuacgacccccugguguucccgagcgacgaguucgacgccuccaucagccaggucaacgagaagaucaaccagucccucgccuucauccgcaagagcgacgagcugcugcacaacgugaacgcgggcaaguccaccaccaacaucaugaucaccacgaucaucaucgugaucaucgucauccuccugagccugaucgccguggggcuccugcuguacugcaaggcccgguccacccccgugacccugagcaaggaccagcucuccggcaucaacaacaucgccuucagcaacugaggacuaguguccaccugucccuccugggcugcuggauugucucguuuuccugccaaauaaacaggaucagcgcuuuacagaucuaaaaaaaaaaaaaaaaaaaaaaaaaaaaaaaaaaaaaaaaaaaaaaaaaaaaaaaaaaaaaaaaugcaucccccccccccccccccccccccccccccccaaaggcucuuuucagagccaccagaauu

SEQ ID NO: 3163 - RNA, 2057 nt, Artificial Sequence
  mRNA product Design b-1 comprising derived and/or modified sequence from HRSV(A2)__F_DSCav1_mut3 (opt2)
gggagacggagacggccugcaggaccugcucucucagcccucagccgaggccuacgccgagccgagugcgcagccgacgaccgggaggagccgcagccuucaacucugagguacugugauccgcgcugcccgccgggccgccccaguccgcugcugcggcaccuccuucccucgcgcccucuucgcucgccagcgccuucccugugagccugcgucaccgcggccgccaagcuuaccauggagcuccucauccucaaggccaacgccaucaccaccauccucaccgccgucaccuucugcuucgccuccggccagaacaucaccgaggaguucuaccaguccaccugcuccgccgucuccaagggcuaccucggcgcccuccgcaccggcugguacaccuccgucaucaccaucgagcucuccaacaucaaggagaucaagugcaacggcaccgacgccaaggucaagcucaucaagcaggagcucgacaaguacaagaacgccgucaccgaccuccagcuccucaugcaguccacccccgccaccggcuccggcuccgccaucugcuccggcgucgccgucugcaagguccuccaccucgagggcgaggucaacaagaucaaguccgcccuccucuccaccaacaaggccgucgucucccucuccaacggcgucuccguccucaccuucaagguccucgaccucaagaacuacaucgacaagcagcuccuccccauccucaacaagcaguccugcuccauccccaacaucgagaccgucaucgaguuccagcagaagaacaaccgccuccucgagaucacccgcgaguucuccgucaacgccggcgucaccacccccgucuccaccuacaugcucaccaacuccgagcuccucucccucaucaacgacaugcccaucaccaacgaccagaagaagcucauguccaacaacguccagaucguccgccagcaguccuacuccaucaugugcaucaucaaggaggagguccucgccuacgucguccagcucccccucuacggcgucaucgacacccccugcuggaagcuccacaccuccccccucugcaccaccaacaccaaggagggcuccaacaucugccucacccgcaccgaccgcggcugguacugcgacaacgccggcuccgucuccuucuucccccaggccgagaccugcaagguccaguccaaccgcgucuucugcgacaccaugaacucccucacccuccccuccgaggucaaccucugcaacgucgacaucuucaaccccaaguacgacugcaagaucaugaccuccaagaccgacgucuccuccuccgucaucaccucccucggcgccaucgucuccugcuacggcaagaccaagugcaccgccuccaacaagaaccgcggcaucaucaagaccuucuccaacggcugcgacuacgucuccaacaagggcgucgacaccgucuccgucggcaacacccucuacugcgucaacaagcaggagggccagucccucuacgucaagggcgagcccaucaucaacuucuacgacccccucgucuuccccuccgacgaguucgacgccuccaucucccaggucaacgagaagaucaaccagucccucgccuucauccgcaaguccgacgagcuccuccacaacgucaacgccggcaaguccaccaccaacaucaugaucaccaccaucaucaucgucaucaucgucauccuccucucccucaucgccgucggccuccuccucuacugcaaggcccgcuccacccccgucacccucuccaaggaccagcucuccggcaucaacaacaucgccuucuccaacugaggacuaguguccaccugucccuccugggcugcuggauugucucguuuuccugccaaauaaacaggaucagcgcuuuacagaucuaaaaaaaaaaaaaaaaaaaaaaaaaaaaaaaaaaaaaaaaaaaaaaaaaaaaaaaaaaaaaaaaugcaucccccccccccccccccccccccccccccccaaaggcucuuuucagagccaccagaauu

SEQ ID NO: 3164 - RNA, 2057 nt, Artificial Sequence
  mRNA product Design b-1 comprising derived and/or modified sequence from HRSV(A2)__F_DSCav1_mut3 (opt3)
gggagacggagacggccugcaggaccugcucucucagcccucagccgaggccuacgccgagccgagugcgcagccgacgaccgggaggagccgcagccuucaacucugagguacugugauccgcgcugcccgccgggccgccccaguccgcugcugcggcaccuccuucccucgcgcccucuucgcucgccagcgccuucccugugagccugcgucaccgcggccgccaagcuuaccauggagcugcucauccuuaaggccaacgcuauuaccacaauacugacugcagugacguucugcuuugccagcggccagaauaucaccgaagaguucuaccaauccacauguucugcggucucaaaaggguauuugggagcuuuaagaacugguugguacaccaguguuauuacaaucgaacugagcaacauuaaggagaucaaaugcaauggcaccgacgccaaggugaaacuaauaaagcaggaacucgauaaguauaaaaacgcaguaacugaccugcagcuucugaugcaguccacacccgccaccgggucuggaucggcuaucuguucaggcguggcagucugcaagguguugcaccucgagggugagguuaauaaaauuaagagcgcccugcugaguacgaacaaagcuguggucucccucucuaauggggugagcguauuaacuuuuaagguucuggaucuuaagaacuacaucgacaaacaauugcugccuauucuaaauaagcaguccuguucaaucccaaacauagaaaccgugauugaguuccagcagaaaaauaacaggcuccuggaaaucacacgggaguuuagugucaaugccggagugacuaccccggugagcacauauaugcuuaccaacucugagcuguugucccucauuaaugauaugcccaucacgaacgaccaaaagaaacugaugucaaacaauguccagaucguucgccagcagagcuacaguauuaugugcauaaucaaggaagagguguuagcguauguagugcaacugccucucuacggcgucauugauacuccauguuggaaacuucauacaucuccccugugcaccacuaacacaaaggaaggcuccaauaucuguuugacccgaacggaccgugggugguacugcgauaacgcaggaagcgugucguucuuuccucaggccgagaccuguaagguucagucuaauagaguguucugcgacacaaugaacucccuaacucugccaucagaagucaaucucugcaacguggauauauuuaaucccaaauaugacuguaagauuaugaccaguaaaacagauguaagcuccucuguuaucacuagccugggugcuaucgugucaugcuacggcaagaccaaauguacagccaguaacaagaauagggggauuaucaagaccuucuccaacggaugcgacuaugucagcaauaaaggcguggacacugucucuguggguaacacgcuuuacuguguuaauaagcaagaggggcagucacuguaugugaaaggagagccuauuauaaacuuuuacgauccauugguauucccgagugacgaauuugaugcaagcaucucccaggucaacgagaagauuaaucagucucucgcuuucauccggaaaucggacgaacuguuacacaacgugaaugccggcaagagcacaaccaacaucaugauuacuaccauaaucauuguuaucauugugauccugcuaucccucauagcggucggccugcuuuuguauugcaaggcccgcucaacacccgugacccugaguaaagaucaacucucugggaucaauaacauugcauucagcaauugaggacuaguguccaccugucccuccugggcugcuggauugucucguuuuccugccaaauaaacaggaucagcgcuuuacagaucuaaaaaaaaaaaaaaaaaaaaaaaaaaaaaaaaaaaaaaaaaaaaaaaaaaaaaaaaaaaaaaaaugcaucccccccccccccccccccccccccccccccaaaggcucuuuucagagccaccagaauu

SEQ ID NO: 3165 - RNA, 2057 nt, Artificial Sequence
  mRNA product Design b-1 comprising derived and/or modified sequence from HRSV(A2)__F_DSCav1_mut3 (opt4)
gggagacggagacggccugcaggaccugcucucucagcccucagccgaggccuacgccgagccgagugcgcagccgacgaccgggaggagccgcagccuucaacucugagguacugugauccgcgcugcccgccgggccgccccaguccgcugcugcggcaccuccuucccucgcgcccucuucgcucgccagcgccuucccugugagccugcgucaccgcggccgccaagcuuaccauggagcugcugauccugaaggccaacgccaucaccaccauccugaccgccgugaccuucugcuucgccagcggccagaacaucaccgaggaguucuaccagagcaccugcagcgccgugagcaagggcuaccugggcgcccugagaaccggcugguacaccagcgugaucaccaucgagcugagcaacaucaaggagaucaagugcaacggcaccgacgccaaggugaagcugaucaagcaggagcuggacaaguacaagaacgccgugaccgaccugcagcugcugaugcagagcacccccgccaccggcagcggcagcgccaucugcagcggcguggccgugugcaaggugcugcaccuggagggcgaggugaacaagaucaagagcgcccugcugagcaccaacaaggccguggugagccugagcaacggcgugagcgugcugaccuucaaggugcuggaccugaagaacuacaucgacaagcagcugcugcccauccugaacaagcagagcugcagcauccccaacaucgagaccgugaucgaguuccagcagaagaacaacagacugcuggagaucaccagagaguucagcgugaacgccggcgugaccacccccgugagcaccuacaugcugaccaacagcgagcugcugagccugaucaacgacaugcccaucaccaacgaccagaagaagcugaugagcaacaacgugcagaucgugagacagcagagcuacagcaucaugugcaucaucaaggaggaggugcuggccuacguggugcagcugccccuguacggcgugaucgacacccccugcuggaagcugcacaccagcccccugugcaccaccaacaccaaggagggcagcaacaucugccugaccagaaccgacagaggcugguacugcgacaacgccggcagcgugagcuucuucccccaggccgagaccugcaaggugcagagcaacagaguguucugcgacaccaugaacagccugacccugcccagcgaggugaaccugugcaacguggacaucuucaaccccaaguacgacugcaagaucaugaccagcaagaccgacgugagcagcagcgugaucaccagccugggcgccaucgugagcugcuacggcaagaccaagugcaccgccagcaacaagaacagaggcaucaucaagaccuucagcaacggcugcgacuacgugagcaacaagggcguggacaccgugagcgugggcaacacccuguacugcgugaacaagcaggagggccagagccuguacgugaagggcgagcccaucaucaacuucuacgacccccugguguuccccagcgacgaguucgacgccagcaucagccaggugaacgagaagaucaaccagagccuggccuucaucagaaagagcgacgagcugcugcacaacgugaacgccggcaagagcaccaccaacaucaugaucaccaccaucaucaucgugaucaucgugauccugcugagccugaucgccgugggccugcugcuguacugcaaggccagaagcacccccgugacccugagcaaggaccagcugagcggcaucaacaacaucgccuucagcaacugaggacuaguguccaccugucccuccugggcugcuggauugucucguuuuccugccaaauaaacaggaucagcgcuuuacagaucuaaaaaaaaaaaaaaaaaaaaaaaaaaaaaaaaaaaaaaaaaaaaaaaaaaaaaaaaaaaaaaaaugcaucccccccccccccccccccccccccccccccaaaggcucuuuucagagccaccagaauu

SEQ ID NO: 3166 - RNA, 2057 nt, Artificial Sequence
  mRNA product Design b-1 comprising derived and/or modified sequence from HRSV(A2)__F_DSCav1_mut3 (opt5)
gggagacggagacggccugcaggaccugcucucucagcccucagccgaggccuacgccgagccgagugcgcagccgacgaccgggaggagccgcagccuucaacucugagguacugugauccgcgcugcccgccgggccgccccaguccgcugcugcggcaccuccuucccucgcgcccucuucgcucgccagcgccuucccugugagccugcgucaccgcggccgccaagcuuaccauggagcugcucauccugaaggccaacgcuauuaccacaauccuuacggccgugaccuucugcuuugcgagcggccagaauauuacagaagaguucuaccaauccaccuguucugcugucagcaaaggguaucugggagcccucagaacaggcugguacaccuccguuaucacaauugaacugucuaacaucaaggagaucaaaugcaaugggaccgacgccaaggugaaacuuauuaagcaggaacuggauaaguauaaaaacgcugugacggaccuccagcugcugaugcagagcacccccgccacaggauccggcucugcuaucuguagcggggucgccgugugcaagguucuccaccuggagggagaggugaauaaaauuaaguccgcgcuucugagcaccaacaaagccgucgugucucucuccaauggcguuagcgugcugacauuuaagguccuugaucugaagaacuacaucgacaaacaacuccugccuauucugaauaagcagucuuguuccaucccgaacauugaaaccgugaucgaguuccagcagaaaaauaaccggcuccuggaaaucacgcgcgaguuuagcgugaaugcuggcgucacaacccccguuucuacauauaugcuuaccaacuccgagcugcucagccugauuaaugauaugccuaucaccaacgaccaaaagaaacuuauguccaacaaugugcagauugugagacagcagucuuacagcaucaugugcauuaucaaggaagagguccuggccuaugugguucaacucccccuguacggggugaucgauacaccuuguuggaaacugcauacgagcccccucugcaccacaaacaccaaggaaggauccaauauuugucugacacggaccgaccgcggcugguacugcgauaacgcugggucugucuccuucuuuccucaggccgagacguguaaggugcagagcaauagaguuuucugcgacacaaugaacucucuuacccugccgagcgaagugaaucucugcaacgucgauaucuuuaaucccaaauaugacuguaagauuaugaccuccaaaacagaugugucuagcuccgucaucaccagccugggagcgauugugucuugcuacggcaagacaaaauguacggccuccaacaagaaucgggggaucaucaagaccuucagcaacggaugcgacuauguuucuaauaaaggcguggacacagucuccgugggcaacacccuuuacuguguuaauaagcaagaggggcagagccuguaugugaaaggagagccuauuaucaacuuuuacgauccccucgucuucccuuccgacgaauuugaugcuucuauuagccaggugaacgagaagaucaaucagucccuggccuucauucgcaaaucugacgaacugcuccacaacgugaaugcuggcaagagcacaaccaacaucaugauuacgaccaucaucauuguuaucauugucauccugcuuucccugauugccguggggcuccugcuguauugcaaggccagaagcacacccgugacccuuucuaaagaucaacucuccggaaucaauaacaucgcuuucagcaauugaggacuaguguccaccugucccuccugggcugcuggauugucucguuuuccugccaaauaaacaggaucagcgcuuuacagaucuaaaaaaaaaaaaaaaaaaaaaaaaaaaaaaaaaaaaaaaaaaaaaaaaaaaaaaaaaaaaaaaaugcaucccccccccccccccccccccccccccccccaaaggcucuuuucagagccaccagaauu

SEQ ID NO: 3167 - RNA, 2057 nt, Artificial Sequence
  mRNA product Design b-1 comprising derived and/or modified sequence from HRSV(A2)__F_DSCav1_mut3 (opt6)
gggagacggagacggccugcaggaccugcucucucagcccucagccgaggccuacgccgagccgagugcgcagccgacgaccgggaggagccgcagccuucaacucugagguacugugauccgcgcugcccgccgggccgccccaguccgcugcugcggcaccuccuucccucgcgcccucuucgcucgccagcgccuucccugugagccugcgucaccgcggccgccaagcuuaccauggaauuacucauacuaaaagccaaugccauaaccacuauucuaacagcaguaacauucuguuucgccucaggacaaaacauaacagaagaauuuuaucaauccaccuguuccgcagucucgaaaggcuaccuuggcgcacuaagaaccggaugguauacaucaguaauaaccauugaacuaucaaauaucaaagaaauaaaaugcaacggaacugacgcaaaagucaaacuaauaaaacaagaauuagacaaauacaaaaacgccguuacagacuuacaacuacuaaugcaaucaacuccagcaacaggaucaggaucugcuauaugcucaggugucgccguauguaaaguguuacaccucgaaggcgaaguaaacaaaauaaaaucagcacuacuauccacaaauaaagcaguaguaucacuauccaaugguguaucaguacucacauucaaaguacuagacuuaaaaaauuauauagauaaacaauuacuaccaauauuaaacaaacaaucaugcucaauaccaaacauagaaaccgucauugaauuucaacaaaaaaacaaucgacuucuugaaauaacacgagaauuuucaguaaaugccggaguaacaaccccagucucaacauacauguuaaccaacucugaacuccuaagccuaaucaacgacaugcccauaacuaacgaccaaaaaaaacuaauguccaauaauguccaaauaguaagacaacaauccuacucaauaaugugcauuauaaaagaagaaguccucgccuauguaguacaacuacccuuauacggaguaauugacacaccauguuggaaacuacauacaucaccacuaugcaccacuaacacaaaagaaggcuccaacauaugccuaacccgaacagaucgcggaugguauugcgacaacgcaggaaguguauccuucuuuccacaagcagaaacaugcaaaguacaauccaacagaguauucugugacaccaugaacucucuaacacuaccuuccgaaguaaauuuaugcaacguagacauauuuaaucccaaauacgacuguaaaauaaugaccucaaaaacugaugucucaucaucagucauuacaucacucggagcaauagucaguugcuauggaaaaaccaaaugcacagcuaguaacaaaaacagggguauaauaaaaacauuuucaaacggaugcgauuacguaucaaauaaaggaguagacaccguauccguaggaaauacucucuacugcguaaacaaacaagaaggacaaucccuauacguaaaaggcgaaccaaucauuaacuuuuacgacccacuuguauuuccaucagacgaauuugaugccucaauaucccaagucaaugaaaaaauaaaccaaagucuagcauucauccgaaaaucagaugaacuuuuacacaacguaaacgccggaaaaucaacaacaaacaucaugaucacaacaaucaucauaguaauaauaguuauacuacuuuccuuaauagcagucggccuacuacucuacugcaaagcacgauccacaccaguaaccuuaucuaaagaccaacucucaggcauaaacaacauagcauucucaaacuaaggacuaguguccaccugucccuccugggcugcuggauugucucguuuuccugccaaauaaacaggaucagcgcuuuacagaucuaaaaaaaaaaaaaaaaaaaaaaaaaaaaaaaaaaaaaaaaaaaaaaaaaaaaaaaaaaaaaaaaugcaucccccccccccccccccccccccccccccccaaaggcucuuuucagagccaccagaauu

SEQ ID NO: 3168 - RNA, 2057 nt, Artificial Sequence
  mRNA product Design b-1 comprising derived and/or modified sequence from HRSV(A2)__F_DSCav1_mut3 (opt11)
gggagacggagacggccugcaggaccugcucucucagcccucagccgaggccuacgccgagccgagugcgcagccgacgaccgggaggagccgcagccuucaacucugagguacugugauccgcgcugcccgccgggccgccccaguccgcugcugcggcaccuccuucccucgcgcccucuucgcucgccagcgccuucccugugagccugcgucaccgcggccgccaagcuuaccauggaacuccucauccuuaaagcaaacgccaucacaaccauccucacagcagucacuuucugcuucgcauccggacaaaacaucacagaagaguucuaucaauccacgugcuccgcaguuuccaaaggauaccuuggagccuuacgaaccggcugguacaccuccgucaucaccauagaacucagcaacaucaaagaaaucaaaugcaacggaaccgacgcaaaagucaaacucaucaaacaagaacuagacaaauacaaaaacgcagucaccgaccuccaacuacucaugcaaucaacccccgcaaccggcuccggcuccgccaucugcuccggaguagccguaugcaaaguccuccaccucgaaggcgaaguuaacaagaucaaguccgcacuccuaucaaccaacaaagcagucgucucccuauccaacggcgucuccguauuaacauucaaaguccucgaccucaaaaacuacauagacaaacagcuacuccccauccuaaacaaacaauccugcuccauccccaacaucgaaacugucaucgaguuccaacagaaaaacaaccgccuccuagaaaucacccgagaguucuccguaaacgccggcgucacuacccccgucucuaccuauaugcuaaccaacucugaacuccuaucccuaaucaacgauaugcccauaacuaacgaccaaaagaaacuuauguccaacaacguacaaauaguccggcaacaaucauacucuaucaugugcaucaucaaagaagaaguacuugccuacguuguccaacucccacuauacggcgucauagacacuccaugcuggaaacuucacaccucaccccucugcaccacuaacacuaaagaaggcucuaacaucugccuuacccgcaccgaccgcggaugguacugcgacaacgcaggcucaguuagcuucuucccacaagccgaaaccugcaaaguccagucaaaccgugucuucugcgauaccaugaacucgcucacccucccuuccgaagucaaccucugcaacgucgacaucuucaaccccaaauacgacugcaaaaucaugaccucaaaaaccgacguaucuucuuccgucaucaccucccucggcgccaucguauccugcuacggcaaaaccaaaugcacugcaucaaacaaaaaccgaggcaucaucaaaaccuucucgaacggaugcgacuacguauccaacaagggcgucgacacagucuccguugguaacacccucuacugcgucaacaaacaagaaggccaaucccuauacguaaaaggcgaacccaucaucaacuucuacgacccccucgucuuccccagugacgaauuugacgccuccaucucccaagucaacgaaaagaucaaccaaucccuugccuucauacgcaaauccgacgaacuccuacacaacguuaacgccggaaaaucaacaaccaacaucaugaucacaaccaucauaaucgucauaaucgucauacuccucucccucauagccgucggccugcuauuguacuguaaagcccgcuccacaccagucacacuuucaaaagaccaacucuccgggaucaacaacaucgccuucuccaacuaaggacuaguguccaccugucccuccugggcugcuggauugucucguuuuccugccaaauaaacaggaucagcgcuuuacagaucuaaaaaaaaaaaaaaaaaaaaaaaaaaaaaaaaaaaaaaaaaaaaaaaaaaaaaaaaaaaaaaaaugcaucccccccccccccccccccccccccccccccaaaggcucuuuucagagccaccagaauu

SEQ ID NO: 3169 - RNA, 1877 nt, Artificial Sequence
  mRNA product Design b-2 comprising derived and/or modified sequence from HRSV(A2)__F_DSCav1_mut3 (opt1)
gggagagccucugcuggaguccggggaguggcguuggcugcuagagcgaagcuuaccauggagcugcucauccugaaggccaacgccaucaccaccauccugacggcggugaccuucugcuucgccagcggccagaacaucaccgaggaguucuaccaguccacgugcagcgccgucuccaagggguaccucggcgcccugcggaccggcugguacaccuccgugaucaccaucgagcugagcaacaucaaggagaucaagugcaacgggaccgacgccaaggugaagcucaucaagcaggagcuggacaaguacaagaacgcggucacggaccugcagcuccugaugcaguccaccccggcaaccggcuccggcuccgccaucugcagcggcgucgccgugugcaaggugcugcaccucgagggggaggucaacaagaucaagagcgcccugcuguccaccaacaaggccguggugagccucuccaacggcgucagcgugcugaccuucaaggugcuggaccucaagaacuacaucgacaagcagcugcugcccauccugaacaagcagagcugcuccauccccaacaucgagacggugaucgaguuccagcagaagaacaaccggcuccuggagaucacccgcgaguucagcgugaacgccggggucaccacccccguguccacguacaugcugaccaacagcgagcuccugucccugaucaacgacaugccgaucaccaacgaccagaagaagcucaugagcaacaacgugcagaucguccggcagcaguccuacagcaucaugugcaucaucaaggaggaggugcuggcguacgugguccagcugccccucuacggcgugaucgacacccccugcuggaagcugcacacgagcccccugugcaccaccaacaccaaggagggguccaacaucugccucacgcgcaccgaccggggcugguacugcgacaacgccggcagcgucuccuucuucccgcaggccgagaccugcaaggugcagagcaaccgcguguucugcgacaccaugaacucccugacgcugcccagcgagguaaaccucugcaacgucgacaucuucaaccccaaguacgacugcaagaucaugaccuccaagaccgacgugagcuccagcgugaucaccucccugggggccaucgucagcugcuacggcaagacgaagugcaccgccagcaacaagaaccgggggaucaucaagaccuucuccaacggcugcgacuacgugagcaacaagggcguggacaccguguccgucgggaacacccuguacugcgugaacaagcaggagggccagagccucuacgugaagggggagcccaucaucaacuucuacgacccgcuggucuuccccuccgacgaguucgacgcgagcaucucccaggugaacgagaagaucaaccagagccuggccuucauccgcaaguccgacgagcugcuccacaacgugaacgccggcaagagcacgaccaacaucaugaucaccaccaucaucaucgucaucaucgugauccugcugucccucaucgccguggggcugcugcucuacugcaaggcccggagcacgcccgucacccuguccaaggaccagcugagcggcaucaacaacaucgcguucuccaacugaggacuaguguccaccugucccuccugggcugcuggauugucucguuuuccugccaaauaaacaggaucagcgcuuuacagaucuaaaaaaaaaaaaaaaaaaaaaaaaaaaaaaaaaaaaaaaaaaaaaaaaaaaaaaaaaaaaaaaaugcaucccccccccccccccccccccccccccccccaaaggcucuuuucagagccaccagaauu

SEQ ID NO: 3170 - RNA, 1877 nt, Artificial Sequence
  mRNA product Design b-2 comprising derived and/or modified sequence from HRSV(A2)__F_DSCav1_mut3 (opt1)
gggagagccucugcuggaguccggggaguggcguuggcugcuagagcgaagcuuaccauggagcugcucauccugaaggccaacgccaucaccaccauccugacggcggugaccuucugcuucgccagcggccagaacaucaccgaggaguucuaccaguccacgugcagcgccgucuccaagggguaccucggcgcccugcgcaccgggugguacaccagcgugaucaccaucgagcuguccaacaucaaggagaucaagugcaacggcaccgacgccaaggugaagcucaucaagcaggagcuggacaaguacaagaacgcggucacggaccugcagcuccugaugcagagcacccccgccaccggguccggcagcgccaucugcuccggcguggccgugugcaagguccugcaccucgagggggaggugaacaagaucaagagcgcgcugcuguccaccaacaaggccguggucagccucuccaacggcgugagcgugcugacguucaagguccuggaccucaagaacuacaucgacaagcagcugcugccgauccucaacaagcaguccugcagcauccccaacaucgagaccgugaucgaguuccagcagaagaacaaccggcugcuggagaucacccgcgaguucuccgugaacgccggggucaccacgcccgugagcaccuacaugcucaccaacuccgagcugcugagccucaucaacgacaugcccaucaccaacgaccagaagaagcugaugagcaacaacgugcagaucguccggcagcaguccuacagcaucaugugcaucaucaaggaggaggugcuggccuacgugguccagcucccgcuguacggcgugaucgacacgcccugcuggaagcugcacaccagcccccucugcaccaccaacacgaaggagggguccaacaucugccugacccgcaccgaccggggcugguacugcgacaacgccggcuccgugagcuucuucccccaggcggagaccugcaagguccaguccaaccgcguguucugcgacacgaugaacagccugacccucccguccgaggucaaccugugcaacguggacaucuucaaccccaaguacgacugcaagaucaugaccagcaagaccgacguguccagcuccgucaucacgagccugggggccaucguguccugcuacggcaagaccaagugcaccgccagcaacaagaaccgggggaucaucaagaccuucuccaacggcugcgacuacgugagcaacaagggcgucgacacgguguccguggggaacacccucuacugcgucaacaagcaggagggccagagccuguacgugaagggggagcccaucaucaacuucuacgacccccugguguucccgagcgacgaguucgacgccuccaucagccaggucaacgagaagaucaaccagucccucgccuucauccgcaagagcgacgagcugcugcacaacgugaacgcgggcaaguccaccaccaacaucaugaucaccacgaucaucaucgugaucaucgucauccuccugagccugaucgccguggggcuccugcuguacugcaaggcccgguccacccccgugacccugagcaaggaccagcucuccggcaucaacaacaucgccuucagcaacugaggacuaguguccaccugucccuccugggcugcuggauugucucguuuuccugccaaauaaacaggaucagcgcuuuacagaucuaaaaaaaaaaaaaaaaaaaaaaaaaaaaaaaaaaaaaaaaaaaaaaaaaaaaaaaaaaaaaaaaugcaucccccccccccccccccccccccccccccccaaaggcucuuuucagagccaccagaauu

SEQ ID NO: 3171 - RNA, 1877 nt, Artificial Sequence
  mRNA product Design b-2 comprising derived and/or modified sequence from HRSV(A2)__F_DSCav1_mut3 (opt2)
gggagagccucugcuggaguccggggaguggcguuggcugcuagagcgaagcuuaccauggagcuccucauccucaaggccaacgccaucaccaccauccucaccgccgucaccuucugcuucgccuccggccagaacaucaccgaggaguucuaccaguccaccugcuccgccgucuccaagggcuaccucggcgcccuccgcaccggcugguacaccuccgucaucaccaucgagcucuccaacaucaaggagaucaagugcaacggcaccgacgccaaggucaagcucaucaagcaggagcucgacaaguacaagaacgccgucaccgaccuccagcuccucaugcaguccacccccgccaccggcuccggcuccgccaucugcuccggcgucgccgucugcaagguccuccaccucgagggcgaggucaacaagaucaaguccgcccuccucuccaccaacaaggccgucgucucccucuccaacggcgucuccguccucaccuucaagguccucgaccucaagaacuacaucgacaagcagcuccuccccauccucaacaagcaguccugcuccauccccaacaucgagaccgucaucgaguuccagcagaagaacaaccgccuccucgagaucacccgcgaguucuccgucaacgccggcgucaccacccccgucuccaccuacaugcucaccaacuccgagcuccucucccucaucaacgacaugcccaucaccaacgaccagaagaagcucauguccaacaacguccagaucguccgccagcaguccuacuccaucaugugcaucaucaaggaggagguccucgccuacgucguccagcucccccucuacggcgucaucgacacccccugcuggaagcuccacaccuccccccucugcaccaccaacaccaaggagggcuccaacaucugccucacccgcaccgaccgcggcugguacugcgacaacgccggcuccgucuccuucuucccccaggccgagaccugcaagguccaguccaaccgcgucuucugcgacaccaugaacucccucacccuccccuccgaggucaaccucugcaacgucgacaucuucaaccccaaguacgacugcaagaucaugaccuccaagaccgacgucuccuccuccgucaucaccucccucggcgccaucgucuccugcuacggcaagaccaagugcaccgccuccaacaagaaccgcggcaucaucaagaccuucuccaacggcugcgacuacgucuccaacaagggcgucgacaccgucuccgucggcaacacccucuacugcgucaacaagcaggagggccagucccucuacgucaagggcgagcccaucaucaacuucuacgacccccucgucuuccccuccgacgaguucgacgccuccaucucccaggucaacgagaagaucaaccagucccucgccuucauccgcaaguccgacgagcuccuccacaacgucaacgccggcaaguccaccaccaacaucaugaucaccaccaucaucaucgucaucaucgucauccuccucucccucaucgccgucggccuccuccucuacugcaaggcccgcuccacccccgucacccucuccaaggaccagcucuccggcaucaacaacaucgccuucuccaacugaggacuaguguccaccugucccuccugggcugcuggauugucucguuuuccugccaaauaaacaggaucagcgcuuuacagaucuaaaaaaaaaaaaaaaaaaaaaaaaaaaaaaaaaaaaaaaaaaaaaaaaaaaaaaaaaaaaaaaaugcaucccccccccccccccccccccccccccccccaaaggcucuuuucagagccaccagaauu

SEQ ID NO: 3172 - RNA, 1877 nt, Artificial Sequence
  mRNA product Design b-2 comprising derived and/or modified sequence from HRSV(A2)__F_DSCav1_mut3 (opt3)
gggagagccucugcuggaguccggggaguggcguuggcugcuagagcgaagcuuaccauggagcugcucauccuuaaggccaacgcuauuaccacaauacugacugcagugacguucugcuuugccagcggccagaauaucaccgaagaguucuaccaauccacauguucugcggucucaaaaggguauuugggagcuuuaagaacugguugguacaccaguguuauuacaaucgaacugagcaacauuaaggagaucaaaugcaauggcaccgacgccaaggugaaacuaauaaagcaggaacucgauaaguauaaaaacgcaguaacugaccugcagcuucugaugcaguccacacccgccaccgggucuggaucggcuaucuguucaggcguggcagucugcaagguguugcaccucgagggugagguuaauaaaauuaagagcgcccugcugaguacgaacaaagcuguggucucccucucuaauggggugagcguauuaacuuuuaagguucuggaucuuaagaacuacaucgacaaacaauugcugccuauucuaaauaagcaguccuguucaaucccaaacauagaaaccgugauugaguuccagcagaaaaauaacaggcuccuggaaaucacacgggaguuuagugucaaugccggagugacuaccccggugagcacauauaugcuuaccaacucugagcuguugucccucauuaaugauaugcccaucacgaacgaccaaaagaaacugaugucaaacaauguccagaucguucgccagcagagcuacaguauuaugugcauaaucaaggaagagguguuagcguauguagugcaacugccucucuacggcgucauugauacuccauguuggaaacuucauacaucuccccugugcaccacuaacacaaaggaaggcuccaauaucuguuugacccgaacggaccgugggugguacugcgauaacgcaggaagcgugucguucuuuccucaggccgagaccuguaagguucagucuaauagaguguucugcgacacaaugaacucccuaacucugccaucagaagucaaucucugcaacguggauauauuuaaucccaaauaugacuguaagauuaugaccaguaaaacagauguaagcuccucuguuaucacuagccugggugcuaucgugucaugcuacggcaagaccaaauguacagccaguaacaagaauagggggauuaucaagaccuucuccaacggaugcgacuaugucagcaauaaaggcguggacacugucucuguggguaacacgcuuuacuguguuaauaagcaagaggggcagucacuguaugugaaaggagagccuauuauaaacuuuuacgauccauugguauucccgagugacgaauuugaugcaagcaucucccaggucaacgagaagauuaaucagucucucgcuuucauccggaaaucggacgaacuguuacacaacgugaaugccggcaagagcacaaccaacaucaugauuacuaccauaaucauuguuaucauugugauccugcuaucccucauagcggucggccugcuuuuguauugcaaggcccgcucaacacccgugacccugaguaaagaucaacucucugggaucaauaacauugcauucagcaauugaggacuaguguccaccugucccuccugggcugcuggauugucucguuuuccugccaaauaaacaggaucagcgcuuuacagaucuaaaaaaaaaaaaaaaaaaaaaaaaaaaaaaaaaaaaaaaaaaaaaaaaaaaaaaaaaaaaaaaaugcaucccccccccccccccccccccccccccccccaaaggcucuuuucagagccaccagaauu

SEQ ID NO: 3173 - RNA, 1877 nt, Artificial Sequence
  mRNA product Design b-2 comprising derived and/or modified sequence from HRSV(A2)__F_DSCav1_mut3 (opt4)
gggagagccucugcuggaguccggggaguggcguuggcugcuagagcgaagcuuaccauggagcugcugauccugaaggccaacgccaucaccaccauccugaccgccgugaccuucugcuucgccagcggccagaacaucaccgaggaguucuaccagagcaccugcagcgccgugagcaagggcuaccugggcgcccugagaaccggcugguacaccagcgugaucaccaucgagcugagcaacaucaaggagaucaagugcaacggcaccgacgccaaggugaagcugaucaagcaggagcuggacaaguacaagaacgccgugaccgaccugcagcugcugaugcagagcacccccgccaccggcagcggcagcgccaucugcagcggcguggccgugugcaaggugcugcaccuggagggcgaggugaacaagaucaagagcgcccugcugagcaccaacaaggccguggugagccugagcaacggcgugagcgugcugaccuucaaggugcuggaccugaagaacuacaucgacaagcagcugcugcccauccugaacaagcagagcugcagcauccccaacaucgagaccgugaucgaguuccagcagaagaacaacagacugcuggagaucaccagagaguucagcgugaacgccggcgugaccacccccgugagcaccuacaugcugaccaacagcgagcugcugagccugaucaacgacaugcccaucaccaacgaccagaagaagcugaugagcaacaacgugcagaucgugagacagcagagcuacagcaucaugugcaucaucaaggaggaggugcuggccuacguggugcagcugccccuguacggcgugaucgacacccccugcuggaagcugcacaccagcccccugugcaccaccaacaccaaggagggcagcaacaucugccugaccagaaccgacagaggcugguacugcgacaacgccggcagcgugagcuucuucccccaggccgagaccugcaaggugcagagcaacagaguguucugcgacaccaugaacagccugacccugcccagcgaggugaaccugugcaacguggacaucuucaaccccaaguacgacugcaagaucaugaccagcaagaccgacgugagcagcagcgugaucaccagccugggcgccaucgugagcugcuacggcaagaccaagugcaccgccagcaacaagaacagaggcaucaucaagaccuucagcaacggcugcgacuacgugagcaacaagggcguggacaccgugagcgugggcaacacccuguacugcgugaacaagcaggagggccagagccuguacgugaagggcgagcccaucaucaacuucuacgacccccugguguuccccagcgacgaguucgacgccagcaucagccaggugaacgagaagaucaaccagagccuggccuucaucagaaagagcgacgagcugcugcacaacgugaacgccggcaagagcaccaccaacaucaugaucaccaccaucaucaucgugaucaucgugauccugcugagccugaucgccgugggccugcugcuguacugcaaggccagaagcacccccgugacccugagcaaggaccagcugagcggcaucaacaacaucgccuucagcaacugaggacuaguguccaccugucccuccugggcugcuggauugucucguuuuccugccaaauaaacaggaucagcgcuuuacagaucuaaaaaaaaaaaaaaaaaaaaaaaaaaaaaaaaaaaaaaaaaaaaaaaaaaaaaaaaaaaaaaaaugcaucccccccccccccccccccccccccccccccaaaggcucuuuucagagccaccagaauu

SEQ ID NO: 3174 - RNA, 1877 nt, Artificial Sequence
  mRNA product Design b-2 comprising derived and/or modified sequence from HRSV(A2)__F_DSCav1_mut3 (opt5)
gggagagccucugcuggaguccggggaguggcguuggcugcuagagcgaagcuuaccauggagcugcucauccugaaggccaacgcuauuaccacaauccuuacggccgugaccuucugcuuugcgagcggccagaauauuacagaagaguucuaccaauccaccuguucugcugucagcaaaggguaucugggagcccucagaacaggcugguacaccuccguuaucacaauugaacugucuaacaucaaggagaucaaaugcaaugggaccgacgccaaggugaaacuuauuaagcaggaacuggauaaguauaaaaacgcugugacggaccuccagcugcugaugcagagcacccccgccacaggauccggcucugcuaucuguagcggggucgccgugugcaagguucuccaccuggagggagaggugaauaaaauuaaguccgcgcuucugagcaccaacaaagccgucgugucucucuccaauggcguuagcgugcugacauuuaagguccuugaucugaagaacuacaucgacaaacaacuccugccuauucugaauaagcagucuuguuccaucccgaacauugaaaccgugaucgaguuccagcagaaaaauaaccggcuccuggaaaucacgcgcgaguuuagcgugaaugcuggcgucacaacccccguuucuacauauaugcuuaccaacuccgagcugcucagccugauuaaugauaugccuaucaccaacgaccaaaagaaacuuauguccaacaaugugcagauugugagacagcagucuuacagcaucaugugcauuaucaaggaagagguccuggccuaugugguucaacucccccuguacggggugaucgauacaccuuguuggaaacugcauacgagcccccucugcaccacaaacaccaaggaaggauccaauauuugucugacacggaccgaccgcggcugguacugcgauaacgcugggucugucuccuucuuuccucaggccgagacguguaaggugcagagcaauagaguuuucugcgacacaaugaacucucuuacccugccgagcgaagugaaucucugcaacgucgauaucuuuaaucccaaauaugacuguaagauuaugaccuccaaaacagaugugucuagcuccgucaucaccagccugggagcgauugugucuugcuacggcaagacaaaauguacggccuccaacaagaaucgggggaucaucaagaccuucagcaacggaugcgacuauguuucuaauaaaggcguggacacagucuccgugggcaacacccuuuacuguguuaauaagcaagaggggcagagccuguaugugaaaggagagccuauuaucaacuuuuacgauccccucgucuucccuuccgacgaauuugaugcuucuauuagccaggugaacgagaagaucaaucagucccuggccuucauucgcaaaucugacgaacugcuccacaacgugaaugcuggcaagagcacaaccaacaucaugauuacgaccaucaucauuguuaucauugucauccugcuuucccugauugccguggggcuccugcuguauugcaaggccagaagcacacccgugacccuuucuaaagaucaacucuccggaaucaauaacaucgcuuucagcaauugaggacuaguguccaccugucccuccugggcugcuggauugucucguuuuccugccaaauaaacaggaucagcgcuuuacagaucuaaaaaaaaaaaaaaaaaaaaaaaaaaaaaaaaaaaaaaaaaaaaaaaaaaaaaaaaaaaaaaaaugcaucccccccccccccccccccccccccccccccaaaggcucuuuucagagccaccagaauu

SEQ ID NO: 3175 - RNA, 1877 nt, Artificial Sequence
  mRNA product Design b-2 comprising derived and/or modified sequence from HRSV(A2)__F_DSCav1_mut3 (opt6)
gggagagccucugcuggaguccggggaguggcguuggcugcuagagcgaagcuuaccauggaauuacucauacuaaaagccaaugccauaaccacuauucuaacagcaguaacauucuguuucgccucaggacaaaacauaacagaagaauuuuaucaauccaccuguuccgcagucucgaaaggcuaccuuggcgcacuaagaaccggaugguauacaucaguaauaaccauugaacuaucaaauaucaaagaaauaaaaugcaacggaacugacgcaaaagucaaacuaauaaaacaagaauuagacaaauacaaaaacgccguuacagacuuacaacuacuaaugcaaucaacuccagcaacaggaucaggaucugcuauaugcucaggugucgccguauguaaaguguuacaccucgaaggcgaaguaaacaaaauaaaaucagcacuacuauccacaaauaaagcaguaguaucacuauccaaugguguaucaguacucacauucaaaguacuagacuuaaaaaauuauauagauaaacaauuacuaccaauauuaaacaaacaaucaugcucaauaccaaacauagaaaccgucauugaauuucaacaaaaaaacaaucgacuucuugaaauaacacgagaauuuucaguaaaugccggaguaacaaccccagucucaacauacauguuaaccaacucugaacuccuaagccuaaucaacgacaugcccauaacuaacgaccaaaaaaaacuaauguccaauaauguccaaauaguaagacaacaauccuacucaauaaugugcauuauaaaagaagaaguccucgccuauguaguacaacuacccuuauacggaguaauugacacaccauguuggaaacuacauacaucaccacuaugcaccacuaacacaaaagaaggcuccaacauaugccuaacccgaacagaucgcggaugguauugcgacaacgcaggaaguguauccuucuuuccacaagcagaaacaugcaaaguacaauccaacagaguauucugugacaccaugaacucucuaacacuaccuuccgaaguaaauuuaugcaacguagacauauuuaaucccaaauacgacuguaaaauaaugaccucaaaaacugaugucucaucaucagucauuacaucacucggagcaauagucaguugcuauggaaaaaccaaaugcacagcuaguaacaaaaacagggguauaauaaaaacauuuucaaacggaugcgauuacguaucaaauaaaggaguagacaccguauccguaggaaauacucucuacugcguaaacaaacaagaaggacaaucccuauacguaaaaggcgaaccaaucauuaacuuuuacgacccacuuguauuuccaucagacgaauuugaugccucaauaucccaagucaaugaaaaaauaaaccaaagucuagcauucauccgaaaaucagaugaacuuuuacacaacguaaacgccggaaaaucaacaacaaacaucaugaucacaacaaucaucauaguaauaauaguuauacuacuuuccuuaauagcagucggccuacuacucuacugcaaagcacgauccacaccaguaaccuuaucuaaagaccaacucucaggcauaaacaacauagcauucucaaacuaaggacuaguguccaccugucccuccugggcugcuggauugucucguuuuccugccaaauaaacaggaucagcgcuuuacagaucuaaaaaaaaaaaaaaaaaaaaaaaaaaaaaaaaaaaaaaaaaaaaaaaaaaaaaaaaaaaaaaaaugcaucccccccccccccccccccccccccccccccaaaggcucuuuucagagccaccagaauu

SEQ ID NO: 3176 - RNA, 1877 nt, Artificial Sequence
  mRNA product Design b-2 comprising derived and/or modified sequence from HRSV(A2)__F_DSCav1_mut3 (opt11)
gggagagccucugcuggaguccggggaguggcguuggcugcuagagcgaagcuuaccauggaacuccucauccuuaaagcaaacgccaucacaaccauccucacagcagucacuuucugcuucgcauccggacaaaacaucacagaagaguucuaucaauccacgugcuccgcaguuuccaaaggauaccuuggagccuuacgaaccggcugguacaccuccgucaucaccauagaacucagcaacaucaaagaaaucaaaugcaacggaaccgacgcaaaagucaaacucaucaaacaagaacuagacaaauacaaaaacgcagucaccgaccuccaacuacucaugcaaucaacccccgcaaccggcuccggcuccgccaucugcuccggaguagccguaugcaaaguccuccaccucgaaggcgaaguuaacaagaucaaguccgcacuccuaucaaccaacaaagcagucgucucccuauccaacggcgucuccguauuaacauucaaaguccucgaccucaaaaacuacauagacaaacagcuacuccccauccuaaacaaacaauccugcuccauccccaacaucgaaacugucaucgaguuccaacagaaaaacaaccgccuccuagaaaucacccgagaguucuccguaaacgccggcgucacuacccccgucucuaccuauaugcuaaccaacucugaacuccuaucccuaaucaacgauaugcccauaacuaacgaccaaaagaaacuuauguccaacaacguacaaauaguccggcaacaaucauacucuaucaugugcaucaucaaagaagaaguacuugccuacguuguccaacucccacuauacggcgucauagacacuccaugcuggaaacuucacaccucaccccucugcaccacuaacacuaaagaaggcucuaacaucugccuuacccgcaccgaccgcggaugguacugcgacaacgcaggcucaguuagcuucuucccacaagccgaaaccugcaaaguccagucaaaccgugucuucugcgauaccaugaacucgcucacccucccuuccgaagucaaccucugcaacgucgacaucuucaaccccaaauacgacugcaaaaucaugaccucaaaaaccgacguaucuucuuccgucaucaccucccucggcgccaucguauccugcuacggcaaaaccaaaugcacugcaucaaacaaaaaccgaggcaucaucaaaaccuucucgaacggaugcgacuacguauccaacaagggcgucgacacagucuccguugguaacacccucuacugcgucaacaaacaagaaggccaaucccuauacguaaaaggcgaacccaucaucaacuucuacgacccccucgucuuccccagugacgaauuugacgccuccaucucccaagucaacgaaaagaucaaccaaucccuugccuucauacgcaaauccgacgaacuccuacacaacguuaacgccggaaaaucaacaaccaacaucaugaucacaaccaucauaaucgucauaaucgucauacuccucucccucauagccgucggccugcuauuguacuguaaagcccgcuccacaccagucacacuuucaaaagaccaacucuccgggaucaacaacaucgccuucuccaacuaaggacuaguguccaccugucccuccugggcugcuggauugucucguuuuccugccaaauaaacaggaucagcgcuuuacagaucuaaaaaaaaaaaaaaaaaaaaaaaaaaaaaaaaaaaaaaaaaaaaaaaaaaaaaaaaaaaaaaaaugcaucccccccccccccccccccccccccccccccaaaggcucuuuucagagccaccagaauu

SEQ ID NO: 3177 - RNA, 1897 nt, Artificial Sequence
  mRNA product Design b-3 comprising derived and/or modified sequence from HRSV(A2)__F_DSCav1_mut3 (opt1)
gggagagucccgcagucggcguccagcggcucugcuuguucgugugugugucguugcaggccuuauucaagcuuaccauggagcugcucauccugaaggccaacgccaucaccaccauccugacggcggugaccuucugcuucgccagcggccagaacaucaccgaggaguucuaccaguccacgugcagcgccgucuccaagggguaccucggcgcccugcggaccggcugguacaccuccgugaucaccaucgagcugagcaacaucaaggagaucaagugcaacgggaccgacgccaaggugaagcucaucaagcaggagcuggacaaguacaagaacgcggucacggaccugcagcuccugaugcaguccaccccggcaaccggcuccggcuccgccaucugcagcggcgucgccgugugcaaggugcugcaccucgagggggaggucaacaagaucaagagcgcccugcuguccaccaacaaggccguggugagccucuccaacggcgucagcgugcugaccuucaaggugcuggaccucaagaacuacaucgacaagcagcugcugcccauccugaacaagcagagcugcuccauccccaacaucgagacggugaucgaguuccagcagaagaacaaccggcuccuggagaucacccgcgaguucagcgugaacgccggggucaccacccccguguccacguacaugcugaccaacagcgagcuccugucccugaucaacgacaugccgaucaccaacgaccagaagaagcucaugagcaacaacgugcagaucguccggcagcaguccuacagcaucaugugcaucaucaaggaggaggugcuggcguacgugguccagcugccccucuacggcgugaucgacacccccugcuggaagcugcacacgagcccccugugcaccaccaacaccaaggagggguccaacaucugccucacgcgcaccgaccggggcugguacugcgacaacgccggcagcgucuccuucuucccgcaggccgagaccugcaaggugcagagcaaccgcguguucugcgacaccaugaacucccugacgcugcccagcgagguaaaccucugcaacgucgacaucuucaaccccaaguacgacugcaagaucaugaccuccaagaccgacgugagcuccagcgugaucaccucccugggggccaucgucagcugcuacggcaagacgaagugcaccgccagcaacaagaaccgggggaucaucaagaccuucuccaacggcugcgacuacgugagcaacaagggcguggacaccguguccgucgggaacacccuguacugcgugaacaagcaggagggccagagccucuacgugaagggggagcccaucaucaacuucuacgacccgcuggucuuccccuccgacgaguucgacgcgagcaucucccaggugaacgagaagaucaaccagagccuggccuucauccgcaaguccgacgagcugcuccacaacgugaacgccggcaagagcacgaccaacaucaugaucaccaccaucaucaucgucaucaucgugauccugcugucccucaucgccguggggcugcugcucuacugcaaggcccggagcacgcccgucacccuguccaaggaccagcugagcggcaucaacaacaucgcguucuccaacugaggacuaguguccaccugucccuccugggcugcuggauugucucguuuuccugccaaauaaacaggaucagcgcuuuacagaucuaaaaaaaaaaaaaaaaaaaaaaaaaaaaaaaaaaaaaaaaaaaaaaaaaaaaaaaaaaaaaaaaugcaucccccccccccccccccccccccccccccccaaaggcucuuuucagagccaccagaauu

SEQ ID NO: 3178 - RNA, 1897 nt, Artificial Sequence
  mRNA product Design b-3 comprising derived and/or modified sequence from HRSV(A2)__F_DSCav1_mut3 (opt1)
gggagagucccgcagucggcguccagcggcucugcuuguucgugugugugucguugcaggccuuauucaagcuuaccauggagcugcucauccugaaggccaacgccaucaccaccauccugacggcggugaccuucugcuucgccagcggccagaacaucaccgaggaguucuaccaguccacgugcagcgccgucuccaagggguaccucggcgcccugcgcaccgggugguacaccagcgugaucaccaucgagcuguccaacaucaaggagaucaagugcaacggcaccgacgccaaggugaagcucaucaagcaggagcuggacaaguacaagaacgcggucacggaccugcagcuccugaugcagagcacccccgccaccggguccggcagcgccaucugcuccggcguggccgugugcaagguccugcaccucgagggggaggugaacaagaucaagagcgcgcugcuguccaccaacaaggccguggucagccucuccaacggcgugagcgugcugacguucaagguccuggaccucaagaacuacaucgacaagcagcugcugccgauccucaacaagcaguccugcagcauccccaacaucgagaccgugaucgaguuccagcagaagaacaaccggcugcuggagaucacccgcgaguucuccgugaacgccggggucaccacgcccgugagcaccuacaugcucaccaacuccgagcugcugagccucaucaacgacaugcccaucaccaacgaccagaagaagcugaugagcaacaacgugcagaucguccggcagcaguccuacagcaucaugugcaucaucaaggaggaggugcuggccuacgugguccagcucccgcuguacggcgugaucgacacgcccugcuggaagcugcacaccagcccccucugcaccaccaacacgaaggagggguccaacaucugccugacccgcaccgaccggggcugguacugcgacaacgccggcuccgugagcuucuucccccaggcggagaccugcaagguccaguccaaccgcguguucugcgacacgaugaacagccugacccucccguccgaggucaaccugugcaacguggacaucuucaaccccaaguacgacugcaagaucaugaccagcaagaccgacguguccagcuccgucaucacgagccugggggccaucguguccugcuacggcaagaccaagugcaccgccagcaacaagaaccgggggaucaucaagaccuucuccaacggcugcgacuacgugagcaacaagggcgucgacacgguguccguggggaacacccucuacugcgucaacaagcaggagggccagagccuguacgugaagggggagcccaucaucaacuucuacgacccccugguguucccgagcgacgaguucgacgccuccaucagccaggucaacgagaagaucaaccagucccucgccuucauccgcaagagcgacgagcugcugcacaacgugaacgcgggcaaguccaccaccaacaucaugaucaccacgaucaucaucgugaucaucgucauccuccugagccugaucgccguggggcuccugcuguacugcaaggcccgguccacccccgugacccugagcaaggaccagcucuccggcaucaacaacaucgccuucagcaacugaggacuaguguccaccugucccuccugggcugcuggauugucucguuuuccugccaaauaaacaggaucagcgcuuuacagaucuaaaaaaaaaaaaaaaaaaaaaaaaaaaaaaaaaaaaaaaaaaaaaaaaaaaaaaaaaaaaaaaaugcaucccccccccccccccccccccccccccccccaaaggcucuuuucagagccaccagaauu

SEQ ID NO: 3179 - RNA, 1897 nt, Artificial Sequence
  mRNA product Design b-3 comprising derived and/or modified sequence from HRSV(A2)__F_DSCav1_mut3 (opt2)
gggagagucccgcagucggcguccagcggcucugcuuguucgugugugugucguugcaggccuuauucaagcuuaccauggagcuccucauccucaaggccaacgccaucaccaccauccucaccgccgucaccuucugcuucgccuccggccagaacaucaccgaggaguucuaccaguccaccugcuccgccgucuccaagggcuaccucggcgcccuccgcaccggcugguacaccuccgucaucaccaucgagcucuccaacaucaaggagaucaagugcaacggcaccgacgccaaggucaagcucaucaagcaggagcucgacaaguacaagaacgccgucaccgaccuccagcuccucaugcaguccacccccgccaccggcuccggcuccgccaucugcuccggcgucgccgucugcaagguccuccaccucgagggcgaggucaacaagaucaaguccgcccuccucuccaccaacaaggccgucgucucccucuccaacggcgucuccguccucaccuucaagguccucgaccucaagaacuacaucgacaagcagcuccuccccauccucaacaagcaguccugcuccauccccaacaucgagaccgucaucgaguuccagcagaagaacaaccgccuccucgagaucacccgcgaguucuccgucaacgccggcgucaccacccccgucuccaccuacaugcucaccaacuccgagcuccucucccucaucaacgacaugcccaucaccaacgaccagaagaagcucauguccaacaacguccagaucguccgccagcaguccuacuccaucaugugcaucaucaaggaggagguccucgccuacgucguccagcucccccucuacggcgucaucgacacccccugcuggaagcuccacaccuccccccucugcaccaccaacaccaaggagggcuccaacaucugccucacccgcaccgaccgcggcugguacugcgacaacgccggcuccgucuccuucuucccccaggccgagaccugcaagguccaguccaaccgcgucuucugcgacaccaugaacucccucacccuccccuccgaggucaaccucugcaacgucgacaucuucaaccccaaguacgacugcaagaucaugaccuccaagaccgacgucuccuccuccgucaucaccucccucggcgccaucgucuccugcuacggcaagaccaagugcaccgccuccaacaagaaccgcggcaucaucaagaccuucuccaacggcugcgacuacgucuccaacaagggcgucgacaccgucuccgucggcaacacccucuacugcgucaacaagcaggagggccagucccucuacgucaagggcgagcccaucaucaacuucuacgacccccucgucuuccccuccgacgaguucgacgccuccaucucccaggucaacgagaagaucaaccagucccucgccuucauccgcaaguccgacgagcuccuccacaacgucaacgccggcaaguccaccaccaacaucaugaucaccaccaucaucaucgucaucaucgucauccuccucucccucaucgccgucggccuccuccucuacugcaaggcccgcuccacccccgucacccucuccaaggaccagcucuccggcaucaacaacaucgccuucuccaacugaggacuaguguccaccugucccuccugggcugcuggauugucucguuuuccugccaaauaaacaggaucagcgcuuuacagaucuaaaaaaaaaaaaaaaaaaaaaaaaaaaaaaaaaaaaaaaaaaaaaaaaaaaaaaaaaaaaaaaaugcaucccccccccccccccccccccccccccccccaaaggcucuuuucagagccaccagaauu

SEQ ID NO: 3180 - RNA, 1897 nt, Artificial Sequence
  mRNA product Design b-3 comprising derived and/or modified sequence from HRSV(A2)__F_DSCav1_mut3 (opt3)
gggagagucccgcagucggcguccagcggcucugcuuguucgugugugugucguugcaggccuuauucaagcuuaccauggagcugcucauccuuaaggccaacgcuauuaccacaauacugacugcagugacguucugcuuugccagcggccagaauaucaccgaagaguucuaccaauccacauguucugcggucucaaaaggguauuugggagcuuuaagaacugguugguacaccaguguuauuacaaucgaacugagcaacauuaaggagaucaaaugcaauggcaccgacgccaaggugaaacuaauaaagcaggaacucgauaaguauaaaaacgcaguaacugaccugcagcuucugaugcaguccacacccgccaccgggucuggaucggcuaucuguucaggcguggcagucugcaagguguugcaccucgagggugagguuaauaaaauuaagagcgcccugcugaguacgaacaaagcuguggucucccucucuaauggggugagcguauuaacuuuuaagguucuggaucuuaagaacuacaucgacaaacaauugcugccuauucuaaauaagcaguccuguucaaucccaaacauagaaaccgugauugaguuccagcagaaaaauaacaggcuccuggaaaucacacgggaguuuagugucaaugccggagugacuaccccggugagcacauauaugcuuaccaacucugagcuguugucccucauuaaugauaugcccaucacgaacgaccaaaagaaacugaugucaaacaauguccagaucguucgccagcagagcuacaguauuaugugcauaaucaaggaagagguguuagcguauguagugcaacugccucucuacggcgucauugauacuccauguuggaaacuucauacaucuccccugugcaccacuaacacaaaggaaggcuccaauaucuguuugacccgaacggaccgugggugguacugcgauaacgcaggaagcgugucguucuuuccucaggccgagaccuguaagguucagucuaauagaguguucugcgacacaaugaacucccuaacucugccaucagaagucaaucucugcaacguggauauauuuaaucccaaauaugacuguaagauuaugaccaguaaaacagauguaagcuccucuguuaucacuagccugggugcuaucgugucaugcuacggcaagaccaaauguacagccaguaacaagaauagggggauuaucaagaccuucuccaacggaugcgacuaugucagcaauaaaggcguggacacugucucuguggguaacacgcuuuacuguguuaauaagcaagaggggcagucacuguaugugaaaggagagccuauuauaaacuuuuacgauccauugguauucccgagugacgaauuugaugcaagcaucucccaggucaacgagaagauuaaucagucucucgcuuucauccggaaaucggacgaacuguuacacaacgugaaugccggcaagagcacaaccaacaucaugauuacuaccauaaucauuguuaucauugugauccugcuaucccucauagcggucggccugcuuuuguauugcaaggcccgcucaacacccgugacccugaguaaagaucaacucucugggaucaauaacauugcauucagcaauugaggacuaguguccaccugucccuccugggcugcuggauugucucguuuuccugccaaauaaacaggaucagcgcuuuacagaucuaaaaaaaaaaaaaaaaaaaaaaaaaaaaaaaaaaaaaaaaaaaaaaaaaaaaaaaaaaaaaaaaugcaucccccccccccccccccccccccccccccccaaaggcucuuuucagagccaccagaauu

SEQ ID NO: 3181 - RNA, 1897 nt, Artificial Sequence
  mRNA product Design b-3 comprising derived and/or modified sequence from HRSV(A2)__F_DSCav1_mut3 (opt4)
gggagagucccgcagucggcguccagcggcucugcuuguucgugugugugucguugcaggccuuauucaagcuuaccauggagcugcugauccugaaggccaacgccaucaccaccauccugaccgccgugaccuucugcuucgccagcggccagaacaucaccgaggaguucuaccagagcaccugcagcgccgugagcaagggcuaccugggcgcccugagaaccggcugguacaccagcgugaucaccaucgagcugagcaacaucaaggagaucaagugcaacggcaccgacgccaaggugaagcugaucaagcaggagcuggacaaguacaagaacgccgugaccgaccugcagcugcugaugcagagcacccccgccaccggcagcggcagcgccaucugcagcggcguggccgugugcaaggugcugcaccuggagggcgaggugaacaagaucaagagcgcccugcugagcaccaacaaggccguggugagccugagcaacggcgugagcgugcugaccuucaaggugcuggaccugaagaacuacaucgacaagcagcugcugcccauccugaacaagcagagcugcagcauccccaacaucgagaccgugaucgaguuccagcagaagaacaacagacugcuggagaucaccagagaguucagcgugaacgccggcgugaccacccccgugagcaccuacaugcugaccaacagcgagcugcugagccugaucaacgacaugcccaucaccaacgaccagaagaagcugaugagcaacaacgugcagaucgugagacagcagagcuacagcaucaugugcaucaucaaggaggaggugcuggccuacguggugcagcugccccuguacggcgugaucgacacccccugcuggaagcugcacaccagcccccugugcaccaccaacaccaaggagggcagcaacaucugccugaccagaaccgacagaggcugguacugcgacaacgccggcagcgugagcuucuucccccaggccgagaccugcaaggugcagagcaacagaguguucugcgacaccaugaacagccugacccugcccagcgaggugaaccugugcaacguggacaucuucaaccccaaguacgacugcaagaucaugaccagcaagaccgacgugagcagcagcgugaucaccagccugggcgccaucgugagcugcuacggcaagaccaagugcaccgccagcaacaagaacagaggcaucaucaagaccuucagcaacggcugcgacuacgugagcaacaagggcguggacaccgugagcgugggcaacacccuguacugcgugaacaagcaggagggccagagccuguacgugaagggcgagcccaucaucaacuucuacgacccccugguguuccccagcgacgaguucgacgccagcaucagccaggugaacgagaagaucaaccagagccuggccuucaucagaaagagcgacgagcugcugcacaacgugaacgccggcaagagcaccaccaacaucaugaucaccaccaucaucaucgugaucaucgugauccugcugagccugaucgccgugggccugcugcuguacugcaaggccagaagcacccccgugacccugagcaaggaccagcugagcggcaucaacaacaucgccuucagcaacugaggacuaguguccaccugucccuccugggcugcuggauugucucguuuuccugccaaauaaacaggaucagcgcuuuacagaucuaaaaaaaaaaaaaaaaaaaaaaaaaaaaaaaaaaaaaaaaaaaaaaaaaaaaaaaaaaaaaaaaugcaucccccccccccccccccccccccccccccccaaaggcucuuuucagagccaccagaauu

SEQ ID NO: 3182 - RNA, 1897 nt, Artificial Sequence
  mRNA product Design b-3 comprising derived and/or modified sequence from HRSV(A2)__F_DSCav1_mut3 (opt5)
gggagagucccgcagucggcguccagcggcucugcuuguucgugugugugucguugcaggccuuauucaagcuuaccauggagcugcucauccugaaggccaacgcuauuaccacaauccuuacggccgugaccuucugcuuugcgagcggccagaauauuacagaagaguucuaccaauccaccuguucugcugucagcaaaggguaucugggagcccucagaacaggcugguacaccuccguuaucacaauugaacugucuaacaucaaggagaucaaaugcaaugggaccgacgccaaggugaaacuuauuaagcaggaacuggauaaguauaaaaacgcugugacggaccuccagcugcugaugcagagcacccccgccacaggauccggcucugcuaucuguagcggggucgccgugugcaagguucuccaccuggagggagaggugaauaaaauuaaguccgcgcuucugagcaccaacaaagccgucgugucucucuccaauggcguuagcgugcugacauuuaagguccuugaucugaagaacuacaucgacaaacaacuccugccuauucugaauaagcagucuuguuccaucccgaacauugaaaccgugaucgaguuccagcagaaaaauaaccggcuccuggaaaucacgcgcgaguuuagcgugaaugcuggcgucacaacccccguuucuacauauaugcuuaccaacuccgagcugcucagccugauuaaugauaugccuaucaccaacgaccaaaagaaacuuauguccaacaaugugcagauugugagacagcagucuuacagcaucaugugcauuaucaaggaagagguccuggccuaugugguucaacucccccuguacggggugaucgauacaccuuguuggaaacugcauacgagcccccucugcaccacaaacaccaaggaaggauccaauauuugucugacacggaccgaccgcggcugguacugcgauaacgcugggucugucuccuucuuuccucaggccgagacguguaaggugcagagcaauagaguuuucugcgacacaaugaacucucuuacccugccgagcgaagugaaucucugcaacgucgauaucuuuaaucccaaauaugacuguaagauuaugaccuccaaaacagaugugucuagcuccgucaucaccagccugggagcgauugugucuugcuacggcaagacaaaauguacggccuccaacaagaaucgggggaucaucaagaccuucagcaacggaugcgacuauguuucuaauaaaggcguggacacagucuccgugggcaacacccuuuacuguguuaauaagcaagaggggcagagccuguaugugaaaggagagccuauuaucaacuuuuacgauccccucgucuucccuuccgacgaauuugaugcuucuauuagccaggugaacgagaagaucaaucagucccuggccuucauucgcaaaucugacgaacugcuccacaacgugaaugcuggcaagagcacaaccaacaucaugauuacgaccaucaucauuguuaucauugucauccugcuuucccugauugccguggggcuccugcuguauugcaaggccagaagcacacccgugacccuuucuaaagaucaacucuccggaaucaauaacaucgcuuucagcaauugaggacuaguguccaccugucccuccugggcugcuggauugucucguuuuccugccaaauaaacaggaucagcgcuuuacagaucuaaaaaaaaaaaaaaaaaaaaaaaaaaaaaaaaaaaaaaaaaaaaaaaaaaaaaaaaaaaaaaaaugcaucccccccccccccccccccccccccccccccaaaggcucuuuucagagccaccagaauu

SEQ ID NO: 3183 - RNA, 1897 nt, Artificial Sequence
  mRNA product Design b-3 comprising derived and/or modified sequence from HRSV(A2)__F_DSCav1_mut3 (opt6)
gggagagucccgcagucggcguccagcggcucugcuuguucgugugugugucguugcaggccuuauucaagcuuaccauggaauuacucauacuaaaagccaaugccauaaccacuauucuaacagcaguaacauucuguuucgccucaggacaaaacauaacagaagaauuuuaucaauccaccuguuccgcagucucgaaaggcuaccuuggcgcacuaagaaccggaugguauacaucaguaauaaccauugaacuaucaaauaucaaagaaauaaaaugcaacggaacugacgcaaaagucaaacuaauaaaacaagaauuagacaaauacaaaaacgccguuacagacuuacaacuacuaaugcaaucaacuccagcaacaggaucaggaucugcuauaugcucaggugucgccguauguaaaguguuacaccucgaaggcgaaguaaacaaaauaaaaucagcacuacuauccacaaauaaagcaguaguaucacuauccaaugguguaucaguacucacauucaaaguacuagacuuaaaaaauuauauagauaaacaauuacuaccaauauuaaacaaacaaucaugcucaauaccaaacauagaaaccgucauugaauuucaacaaaaaaacaaucgacuucuugaaauaacacgagaauuuucaguaaaugccggaguaacaaccccagucucaacauacauguuaaccaacucugaacuccuaagccuaaucaacgacaugcccauaacuaacgaccaaaaaaaacuaauguccaauaauguccaaauaguaagacaacaauccuacucaauaaugugcauuauaaaagaagaaguccucgccuauguaguacaacuacccuuauacggaguaauugacacaccauguuggaaacuacauacaucaccacuaugcaccacuaacacaaaagaaggcuccaacauaugccuaacccgaacagaucgcggaugguauugcgacaacgcaggaaguguauccuucuuuccacaagcagaaacaugcaaaguacaauccaacagaguauucugugacaccaugaacucucuaacacuaccuuccgaaguaaauuuaugcaacguagacauauuuaaucccaaauacgacuguaaaauaaugaccucaaaaacugaugucucaucaucagucauuacaucacucggagcaauagucaguugcuauggaaaaaccaaaugcacagcuaguaacaaaaacagggguauaauaaaaacauuuucaaacggaugcgauuacguaucaaauaaaggaguagacaccguauccguaggaaauacucucuacugcguaaacaaacaagaaggacaaucccuauacguaaaaggcgaaccaaucauuaacuuuuacgacccacuuguauuuccaucagacgaauuugaugccucaauaucccaagucaaugaaaaaauaaaccaaagucuagcauucauccgaaaaucagaugaacuuuuacacaacguaaacgccggaaaaucaacaacaaacaucaugaucacaacaaucaucauaguaauaauaguuauacuacuuuccuuaauagcagucggccuacuacucuacugcaaagcacgauccacaccaguaaccuuaucuaaagaccaacucucaggcauaaacaacauagcauucucaaacuaaggacuaguguccaccugucccuccugggcugcuggauugucucguuuuccugccaaauaaacaggaucagcgcuuuacagaucuaaaaaaaaaaaaaaaaaaaaaaaaaaaaaaaaaaaaaaaaaaaaaaaaaaaaaaaaaaaaaaaaugcaucccccccccccccccccccccccccccccccaaaggcucuuuucagagccaccagaauu

SEQ ID NO: 3184 - RNA, 1897 nt, Artificial Sequence
  mRNA product Design b-3 comprising derived and/or modified sequence from HRSV(A2)__F_DSCav1_mut3 (opt11)
gggagagucccgcagucggcguccagcggcucugcuuguucgugugugugucguugcaggccuuauucaagcuuaccauggaacuccucauccuuaaagcaaacgccaucacaaccauccucacagcagucacuuucugcuucgcauccggacaaaacaucacagaagaguucuaucaauccacgugcuccgcaguuuccaaaggauaccuuggagccuuacgaaccggcugguacaccuccgucaucaccauagaacucagcaacaucaaagaaaucaaaugcaacggaaccgacgcaaaagucaaacucaucaaacaagaacuagacaaauacaaaaacgcagucaccgaccuccaacuacucaugcaaucaacccccgcaaccggcuccggcuccgccaucugcuccggaguagccguaugcaaaguccuccaccucgaaggcgaaguuaacaagaucaaguccgcacuccuaucaaccaacaaagcagucgucucccuauccaacggcgucuccguauuaacauucaaaguccucgaccucaaaaacuacauagacaaacagcuacuccccauccuaaacaaacaauccugcuccauccccaacaucgaaacugucaucgaguuccaacagaaaaacaaccgccuccuagaaaucacccgagaguucuccguaaacgccggcgucacuacccccgucucuaccuauaugcuaaccaacucugaacuccuaucccuaaucaacgauaugcccauaacuaacgaccaaaagaaacuuauguccaacaacguacaaauaguccggcaacaaucauacucuaucaugugcaucaucaaagaagaaguacuugccuacguuguccaacucccacuauacggcgucauagacacuccaugcuggaaacuucacaccucaccccucugcaccacuaacacuaaagaaggcucuaacaucugccuuacccgcaccgaccgcggaugguacugcgacaacgcaggcucaguuagcuucuucccacaagccgaaaccugcaaaguccagucaaaccgugucuucugcgauaccaugaacucgcucacccucccuuccgaagucaaccucugcaacgucgacaucuucaaccccaaauacgacugcaaaaucaugaccucaaaaaccgacguaucuucuuccgucaucaccucccucggcgccaucguauccugcuacggcaaaaccaaaugcacugcaucaaacaaaaaccgaggcaucaucaaaaccuucucgaacggaugcgacuacguauccaacaagggcgucgacacagucuccguugguaacacccucuacugcgucaacaaacaagaaggccaaucccuauacguaaaaggcgaacccaucaucaacuucuacgacccccucgucuuccccagugacgaauuugacgccuccaucucccaagucaacgaaaagaucaaccaaucccuugccuucauacgcaaauccgacgaacuccuacacaacguuaacgccggaaaaucaacaaccaacaucaugaucacaaccaucauaaucgucauaaucgucauacuccucucccucauagccgucggccugcuauuguacuguaaagcccgcuccacaccagucacacuuucaaaagaccaacucuccgggaucaacaacaucgccuucuccaacuaaggacuaguguccaccugucccuccugggcugcuggauugucucguuuuccugccaaauaaacaggaucagcgcuuuacagaucuaaaaaaaaaaaaaaaaaaaaaaaaaaaaaaaaaaaaaaaaaaaaaaaaaaaaaaaaaaaaaaaaugcaucccccccccccccccccccccccccccccccaaaggcucuuuucagagccaccagaauu

SEQ ID NO: 3185 - RNA, 1948 nt, Artificial Sequence
  mRNA product Design b-4 comprising derived and/or modified sequence from HRSV(A2)__F_DSCav1_mut3 (opt1)
gggagagucccgcagucggcguccagcggcucugcuuguucgugugugugucguugcaggccuuauucaagcuuaccauggagcugcucauccugaaggccaacgccaucaccaccauccugacggcggugaccuucugcuucgccagcggccagaacaucaccgaggaguucuaccaguccacgugcagcgccgucuccaagggguaccucggcgcccugcggaccggcugguacaccuccgugaucaccaucgagcugagcaacaucaaggagaucaagugcaacgggaccgacgccaaggugaagcucaucaagcaggagcuggacaaguacaagaacgcggucacggaccugcagcuccugaugcaguccaccccggcaaccggcuccggcuccgccaucugcagcggcgucgccgugugcaaggugcugcaccucgagggggaggucaacaagaucaagagcgcccugcuguccaccaacaaggccguggugagccucuccaacggcgucagcgugcugaccuucaaggugcuggaccucaagaacuacaucgacaagcagcugcugcccauccugaacaagcagagcugcuccauccccaacaucgagacggugaucgaguuccagcagaagaacaaccggcuccuggagaucacccgcgaguucagcgugaacgccggggucaccacccccguguccacguacaugcugaccaacagcgagcuccugucccugaucaacgacaugccgaucaccaacgaccagaagaagcucaugagcaacaacgugcagaucguccggcagcaguccuacagcaucaugugcaucaucaaggaggaggugcuggcguacgugguccagcugccccucuacggcgugaucgacacccccugcuggaagcugcacacgagcccccugugcaccaccaacaccaaggagggguccaacaucugccucacgcgcaccgaccggggcugguacugcgacaacgccggcagcgucuccuucuucccgcaggccgagaccugcaaggugcagagcaaccgcguguucugcgacaccaugaacucccugacgcugcccagcgagguaaaccucugcaacgucgacaucuucaaccccaaguacgacugcaagaucaugaccuccaagaccgacgugagcuccagcgugaucaccucccugggggccaucgucagcugcuacggcaagacgaagugcaccgccagcaacaagaaccgggggaucaucaagaccuucuccaacggcugcgacuacgugagcaacaagggcguggacaccguguccgucgggaacacccuguacugcgugaacaagcaggagggccagagccucuacgugaagggggagcccaucaucaacuucuacgacccgcuggucuuccccuccgacgaguucgacgcgagcaucucccaggugaacgagaagaucaaccagagccuggccuucauccgcaaguccgacgagcugcuccacaacgugaacgccggcaagagcacgaccaacaucaugaucaccaccaucaucaucgucaucaucgugauccugcugucccucaucgccguggggcugcugcucuacugcaaggcccggagcacgcccgucacccuguccaaggaccagcugagcggcaucaacaacaucgcguucuccaacugaggacuaguaauaaggaaacuguaugaaugucugugggcaggaagugaagagauccuucuguaaagguuuuuggaauuaugucugcugaauaauaaacuuuuuugaaauaauaaaucugguagaaaaaugagaucuaaaaaaaaaaaaaaaaaaaaaaaaaaaaaaaaaaaaaaaaaaaaaaaaaaaaaaaaaaaaaaaaugcaucccccccccccccccccccccccccccccccaaaggcucuuuucagagccaccagaauu

SEQ ID NO: 3186 - RNA, 1948 nt, Artificial Sequence
  mRNA product Design b-4 comprising derived and/or modified sequence from HRSV(A2)__F_DSCav1_mut3 (opt1)
gggagagucccgcagucggcguccagcggcucugcuuguucgugugugugucguugcaggccuuauucaagcuuaccauggagcugcucauccugaaggccaacgccaucaccaccauccugacggcggugaccuucugcuucgccagcggccagaacaucaccgaggaguucuaccaguccacgugcagcgccgucuccaagggguaccucggcgcccugcgcaccgggugguacaccagcgugaucaccaucgagcuguccaacaucaaggagaucaagugcaacggcaccgacgccaaggugaagcucaucaagcaggagcuggacaaguacaagaacgcggucacggaccugcagcuccugaugcagagcacccccgccaccggguccggcagcgccaucugcuccggcguggccgugugcaagguccugcaccucgagggggaggugaacaagaucaagagcgcgcugcuguccaccaacaaggccguggucagccucuccaacggcgugagcgugcugacguucaagguccuggaccucaagaacuacaucgacaagcagcugcugccgauccucaacaagcaguccugcagcauccccaacaucgagaccgugaucgaguuccagcagaagaacaaccggcugcuggagaucacccgcgaguucuccgugaacgccggggucaccacgcccgugagcaccuacaugcucaccaacuccgagcugcugagccucaucaacgacaugcccaucaccaacgaccagaagaagcugaugagcaacaacgugcagaucguccggcagcaguccuacagcaucaugugcaucaucaaggaggaggugcuggccuacgugguccagcucccgcuguacggcgugaucgacacgcccugcuggaagcugcacaccagcccccucugcaccaccaacacgaaggagggguccaacaucugccugacccgcaccgaccggggcugguacugcgacaacgccggcuccgugagcuucuucccccaggcggagaccugcaagguccaguccaaccgcguguucugcgacacgaugaacagccugacccucccguccgaggucaaccugugcaacguggacaucuucaaccccaaguacgacugcaagaucaugaccagcaagaccgacguguccagcuccgucaucacgagccugggggccaucguguccugcuacggcaagaccaagugcaccgccagcaacaagaaccgggggaucaucaagaccuucuccaacggcugcgacuacgugagcaacaagggcgucgacacgguguccguggggaacacccucuacugcgucaacaagcaggagggccagagccuguacgugaagggggagcccaucaucaacuucuacgacccccugguguucccgagcgacgaguucgacgccuccaucagccaggucaacgagaagaucaaccagucccucgccuucauccgcaagagcgacgagcugcugcacaacgugaacgcgggcaaguccaccaccaacaucaugaucaccacgaucaucaucgugaucaucgucauccuccugagccugaucgccguggggcuccugcuguacugcaaggcccgguccacccccgugacccugagcaaggaccagcucuccggcaucaacaacaucgccuucagcaacugaggacuaguaauaaggaaacuguaugaaugucugugggcaggaagugaagagauccuucuguaaagguuuuuggaauuaugucugcugaauaauaaacuuuuuugaaauaauaaaucugguagaaaaaugagaucuaaaaaaaaaaaaaaaaaaaaaaaaaaaaaaaaaaaaaaaaaaaaaaaaaaaaaaaaaaaaaaaaugcaucccccccccccccccccccccccccccccccaaaggcucuuuucagagccaccagaauu

SEQ ID NO: 3187 - RNA, 1948 nt, Artificial Sequence
  mRNA product Design b-4 comprising derived and/or modified sequence from HRSV(A2)__F_DSCav1_mut3 (opt2)
gggagagucccgcagucggcguccagcggcucugcuuguucgugugugugucguugcaggccuuauucaagcuuaccauggagcuccucauccucaaggccaacgccaucaccaccauccucaccgccgucaccuucugcuucgccuccggccagaacaucaccgaggaguucuaccaguccaccugcuccgccgucuccaagggcuaccucggcgcccuccgcaccggcugguacaccuccgucaucaccaucgagcucuccaacaucaaggagaucaagugcaacggcaccgacgccaaggucaagcucaucaagcaggagcucgacaaguacaagaacgccgucaccgaccuccagcuccucaugcaguccacccccgccaccggcuccggcuccgccaucugcuccggcgucgccgucugcaagguccuccaccucgagggcgaggucaacaagaucaaguccgcccuccucuccaccaacaaggccgucgucucccucuccaacggcgucuccguccucaccuucaagguccucgaccucaagaacuacaucgacaagcagcuccuccccauccucaacaagcaguccugcuccauccccaacaucgagaccgucaucgaguuccagcagaagaacaaccgccuccucgagaucacccgcgaguucuccgucaacgccggcgucaccacccccgucuccaccuacaugcucaccaacuccgagcuccucucccucaucaacgacaugcccaucaccaacgaccagaagaagcucauguccaacaacguccagaucguccgccagcaguccuacuccaucaugugcaucaucaaggaggagguccucgccuacgucguccagcucccccucuacggcgucaucgacacccccugcuggaagcuccacaccuccccccucugcaccaccaacaccaaggagggcuccaacaucugccucacccgcaccgaccgcggcugguacugcgacaacgccggcuccgucuccuucuucccccaggccgagaccugcaagguccaguccaaccgcgucuucugcgacaccaugaacucccucacccuccccuccgaggucaaccucugcaacgucgacaucuucaaccccaaguacgacugcaagaucaugaccuccaagaccgacgucuccuccuccgucaucaccucccucggcgccaucgucuccugcuacggcaagaccaagugcaccgccuccaacaagaaccgcggcaucaucaagaccuucuccaacggcugcgacuacgucuccaacaagggcgucgacaccgucuccgucggcaacacccucuacugcgucaacaagcaggagggccagucccucuacgucaagggcgagcccaucaucaacuucuacgacccccucgucuuccccuccgacgaguucgacgccuccaucucccaggucaacgagaagaucaaccagucccucgccuucauccgcaaguccgacgagcuccuccacaacgucaacgccggcaaguccaccaccaacaucaugaucaccaccaucaucaucgucaucaucgucauccuccucucccucaucgccgucggccuccuccucuacugcaaggcccgcuccacccccgucacccucuccaaggaccagcucuccggcaucaacaacaucgccuucuccaacugaggacuaguaauaaggaaacuguaugaaugucugugggcaggaagugaagagauccuucuguaaagguuuuuggaauuaugucugcugaauaauaaacuuuuuugaaauaauaaaucugguagaaaaaugagaucuaaaaaaaaaaaaaaaaaaaaaaaaaaaaaaaaaaaaaaaaaaaaaaaaaaaaaaaaaaaaaaaaugcaucccccccccccccccccccccccccccccccaaaggcucuuuucagagccaccagaauu

SEQ ID NO: 3188 - RNA, 1948 nt, Artificial Sequence
  mRNA product Design b-4 comprising derived and/or modified sequence from HRSV(A2)__F_DSCav1_mut3 (opt3)
gggagagucccgcagucggcguccagcggcucugcuuguucgugugugugucguugcaggccuuauucaagcuuaccauggagcugcucauccuuaaggccaacgcuauuaccacaauacugacugcagugacguucugcuuugccagcggccagaauaucaccgaagaguucuaccaauccacauguucugcggucucaaaaggguauuugggagcuuuaagaacugguugguacaccaguguuauuacaaucgaacugagcaacauuaaggagaucaaaugcaauggcaccgacgccaaggugaaacuaauaaagcaggaacucgauaaguauaaaaacgcaguaacugaccugcagcuucugaugcaguccacacccgccaccgggucuggaucggcuaucuguucaggcguggcagucugcaagguguugcaccucgagggugagguuaauaaaauuaagagcgcccugcugaguacgaacaaagcuguggucucccucucuaauggggugagcguauuaacuuuuaagguucuggaucuuaagaacuacaucgacaaacaauugcugccuauucuaaauaagcaguccuguucaaucccaaacauagaaaccgugauugaguuccagcagaaaaauaacaggcuccuggaaaucacacgggaguuuagugucaaugccggagugacuaccccggugagcacauauaugcuuaccaacucugagcuguugucccucauuaaugauaugcccaucacgaacgaccaaaagaaacugaugucaaacaauguccagaucguucgccagcagagcuacaguauuaugugcauaaucaaggaagagguguuagcguauguagugcaacugccucucuacggcgucauugauacuccauguuggaaacuucauacaucuccccugugcaccacuaacacaaaggaaggcuccaauaucuguuugacccgaacggaccgugggugguacugcgauaacgcaggaagcgugucguucuuuccucaggccgagaccuguaagguucagucuaauagaguguucugcgacacaaugaacucccuaacucugccaucagaagucaaucucugcaacguggauauauuuaaucccaaauaugacuguaagauuaugaccaguaaaacagauguaagcuccucuguuaucacuagccugggugcuaucgugucaugcuacggcaagaccaaauguacagccaguaacaagaauagggggauuaucaagaccuucuccaacggaugcgacuaugucagcaauaaaggcguggacacugucucuguggguaacacgcuuuacuguguuaauaagcaagaggggcagucacuguaugugaaaggagagccuauuauaaacuuuuacgauccauugguauucccgagugacgaauuugaugcaagcaucucccaggucaacgagaagauuaaucagucucucgcuuucauccggaaaucggacgaacuguuacacaacgugaaugccggcaagagcacaaccaacaucaugauuacuaccauaaucauuguuaucauugugauccugcuaucccucauagcggucggccugcuuuuguauugcaaggcccgcucaacacccgugacccugaguaaagaucaacucucugggaucaauaacauugcauucagcaauugaggacuaguaauaaggaaacuguaugaaugucugugggcaggaagugaagagauccuucuguaaagguuuuuggaauuaugucugcugaauaauaaacuuuuuugaaauaauaaaucugguagaaaaaugagaucuaaaaaaaaaaaaaaaaaaaaaaaaaaaaaaaaaaaaaaaaaaaaaaaaaaaaaaaaaaaaaaaaugcaucccccccccccccccccccccccccccccccaaaggcucuuuucagagccaccagaauu

SEQ ID NO: 3189 - RNA, 1948 nt, Artificial Sequence
  mRNA product Design b-4 comprising derived and/or modified sequence from HRSV(A2)__F_DSCav1_mut3 (opt4)
gggagagucccgcagucggcguccagcggcucugcuuguucgugugugugucguugcaggccuuauucaagcuuaccauggagcugcugauccugaaggccaacgccaucaccaccauccugaccgccgugaccuucugcuucgccagcggccagaacaucaccgaggaguucuaccagagcaccugcagcgccgugagcaagggcuaccugggcgcccugagaaccggcugguacaccagcgugaucaccaucgagcugagcaacaucaaggagaucaagugcaacggcaccgacgccaaggugaagcugaucaagcaggagcuggacaaguacaagaacgccgugaccgaccugcagcugcugaugcagagcacccccgccaccggcagcggcagcgccaucugcagcggcguggccgugugcaaggugcugcaccuggagggcgaggugaacaagaucaagagcgcccugcugagcaccaacaaggccguggugagccugagcaacggcgugagcgugcugaccuucaaggugcuggaccugaagaacuacaucgacaagcagcugcugcccauccugaacaagcagagcugcagcauccccaacaucgagaccgugaucgaguuccagcagaagaacaacagacugcuggagaucaccagagaguucagcgugaacgccggcgugaccacccccgugagcaccuacaugcugaccaacagcgagcugcugagccugaucaacgacaugcccaucaccaacgaccagaagaagcugaugagcaacaacgugcagaucgugagacagcagagcuacagcaucaugugcaucaucaaggaggaggugcuggccuacguggugcagcugccccuguacggcgugaucgacacccccugcuggaagcugcacaccagcccccugugcaccaccaacaccaaggagggcagcaacaucugccugaccagaaccgacagaggcugguacugcgacaacgccggcagcgugagcuucuucccccaggccgagaccugcaaggugcagagcaacagaguguucugcgacaccaugaacagccugacccugcccagcgaggugaaccugugcaacguggacaucuucaaccccaaguacgacugcaagaucaugaccagcaagaccgacgugagcagcagcgugaucaccagccugggcgccaucgugagcugcuacggcaagaccaagugcaccgccagcaacaagaacagaggcaucaucaagaccuucagcaacggcugcgacuacgugagcaacaagggcguggacaccgugagcgugggcaacacccuguacugcgugaacaagcaggagggccagagccuguacgugaagggcgagcccaucaucaacuucuacgacccccugguguuccccagcgacgaguucgacgccagcaucagccaggugaacgagaagaucaaccagagccuggccuucaucagaaagagcgacgagcugcugcacaacgugaacgccggcaagagcaccaccaacaucaugaucaccaccaucaucaucgugaucaucgugauccugcugagccugaucgccgugggccugcugcuguacugcaaggccagaagcacccccgugacccugagcaaggaccagcugagcggcaucaacaacaucgccuucagcaacugaggacuaguaauaaggaaacuguaugaaugucugugggcaggaagugaagagauccuucuguaaagguuuuuggaauuaugucugcugaauaauaaacuuuuuugaaauaauaaaucugguagaaaaaugagaucuaaaaaaaaaaaaaaaaaaaaaaaaaaaaaaaaaaaaaaaaaaaaaaaaaaaaaaaaaaaaaaaaugcaucccccccccccccccccccccccccccccccaaaggcucuuuucagagccaccagaauu

SEQ ID NO: 3190 - RNA, 1948 nt, Artificial Sequence
  mRNA product Design b-4 comprising derived and/or modified sequence from HRSV(A2)__F_DSCav1_mut3 (opt5)
gggagagucccgcagucggcguccagcggcucugcuuguucgugugugugucguugcaggccuuauucaagcuuaccauggagcugcucauccugaaggccaacgcuauuaccacaauccuuacggccgugaccuucugcuuugcgagcggccagaauauuacagaagaguucuaccaauccaccuguucugcugucagcaaaggguaucugggagcccucagaacaggcugguacaccuccguuaucacaauugaacugucuaacaucaaggagaucaaaugcaaugggaccgacgccaaggugaaacuuauuaagcaggaacuggauaaguauaaaaacgcugugacggaccuccagcugcugaugcagagcacccccgccacaggauccggcucugcuaucuguagcggggucgccgugugcaagguucuccaccuggagggagaggugaauaaaauuaaguccgcgcuucugagcaccaacaaagccgucgugucucucuccaauggcguuagcgugcugacauuuaagguccuugaucugaagaacuacaucgacaaacaacuccugccuauucugaauaagcagucuuguuccaucccgaacauugaaaccgugaucgaguuccagcagaaaaauaaccggcuccuggaaaucacgcgcgaguuuagcgugaaugcuggcgucacaacccccguuucuacauauaugcuuaccaacuccgagcugcucagccugauuaaugauaugccuaucaccaacgaccaaaagaaacuuauguccaacaaugugcagauugugagacagcagucuuacagcaucaugugcauuaucaaggaagagguccuggccuaugugguucaacucccccuguacggggugaucgauacaccuuguuggaaacugcauacgagcccccucugcaccacaaacaccaaggaaggauccaauauuugucugacacggaccgaccgcggcugguacugcgauaacgcugggucugucuccuucuuuccucaggccgagacguguaaggugcagagcaauagaguuuucugcgacacaaugaacucucuuacccugccgagcgaagugaaucucugcaacgucgauaucuuuaaucccaaauaugacuguaagauuaugaccuccaaaacagaugugucuagcuccgucaucaccagccugggagcgauugugucuugcuacggcaagacaaaauguacggccuccaacaagaaucgggggaucaucaagaccuucagcaacggaugcgacuauguuucuaauaaaggcguggacacagucuccgugggcaacacccuuuacuguguuaauaagcaagaggggcagagccuguaugugaaaggagagccuauuaucaacuuuuacgauccccucgucuucccuuccgacgaauuugaugcuucuauuagccaggugaacgagaagaucaaucagucccuggccuucauucgcaaaucugacgaacugcuccacaacgugaaugcuggcaagagcacaaccaacaucaugauuacgaccaucaucauuguuaucauugucauccugcuuucccugauugccguggggcuccugcuguauugcaaggccagaagcacacccgugacccuuucuaaagaucaacucuccggaaucaauaacaucgcuuucagcaauugaggacuaguaauaaggaaacuguaugaaugucugugggcaggaagugaagagauccuucuguaaagguuuuuggaauuaugucugcugaauaauaaacuuuuuugaaauaauaaaucugguagaaaaaugagaucuaaaaaaaaaaaaaaaaaaaaaaaaaaaaaaaaaaaaaaaaaaaaaaaaaaaaaaaaaaaaaaaaugcaucccccccccccccccccccccccccccccccaaaggcucuuuucagagccaccagaauu

SEQ ID NO: 3191 - RNA, 1948 nt, Artificial Sequence
  mRNA product Design b-4 comprising derived and/or modified sequence from HRSV(A2)__F_DSCav1_mut3 (opt6)
gggagagucccgcagucggcguccagcggcucugcuuguucgugugugugucguugcaggccuuauucaagcuuaccauggaauuacucauacuaaaagccaaugccauaaccacuauucuaacagcaguaacauucuguuucgccucaggacaaaacauaacagaagaauuuuaucaauccaccuguuccgcagucucgaaaggcuaccuuggcgcacuaagaaccggaugguauacaucaguaauaaccauugaacuaucaaauaucaaagaaauaaaaugcaacggaacugacgcaaaagucaaacuaauaaaacaagaauuagacaaauacaaaaacgccguuacagacuuacaacuacuaaugcaaucaacuccagcaacaggaucaggaucugcuauaugcucaggugucgccguauguaaaguguuacaccucgaaggcgaaguaaacaaaauaaaaucagcacuacuauccacaaauaaagcaguaguaucacuauccaaugguguaucaguacucacauucaaaguacuagacuuaaaaaauuauauagauaaacaauuacuaccaauauuaaacaaacaaucaugcucaauaccaaacauagaaaccgucauugaauuucaacaaaaaaacaaucgacuucuugaaauaacacgagaauuuucaguaaaugccggaguaacaaccccagucucaacauacauguuaaccaacucugaacuccuaagccuaaucaacgacaugcccauaacuaacgaccaaaaaaaacuaauguccaauaauguccaaauaguaagacaacaauccuacucaauaaugugcauuauaaaagaagaaguccucgccuauguaguacaacuacccuuauacggaguaauugacacaccauguuggaaacuacauacaucaccacuaugcaccacuaacacaaaagaaggcuccaacauaugccuaacccgaacagaucgcggaugguauugcgacaacgcaggaaguguauccuucuuuccacaagcagaaacaugcaaaguacaauccaacagaguauucugugacaccaugaacucucuaacacuaccuuccgaaguaaauuuaugcaacguagacauauuuaaucccaaauacgacuguaaaauaaugaccucaaaaacugaugucucaucaucagucauuacaucacucggagcaauagucaguugcuauggaaaaaccaaaugcacagcuaguaacaaaaacagggguauaauaaaaacauuuucaaacggaugcgauuacguaucaaauaaaggaguagacaccguauccguaggaaauacucucuacugcguaaacaaacaagaaggacaaucccuauacguaaaaggcgaaccaaucauuaacuuuuacgacccacuuguauuuccaucagacgaauuugaugccucaauaucccaagucaaugaaaaaauaaaccaaagucuagcauucauccgaaaaucagaugaacuuuuacacaacguaaacgccggaaaaucaacaacaaacaucaugaucacaacaaucaucauaguaauaauaguuauacuacuuuccuuaauagcagucggccuacuacucuacugcaaagcacgauccacaccaguaaccuuaucuaaagaccaacucucaggcauaaacaacauagcauucucaaacuaaggacuaguaauaaggaaacuguaugaaugucugugggcaggaagugaagagauccuucuguaaagguuuuuggaauuaugucugcugaauaauaaacuuuuuugaaauaauaaaucugguagaaaaaugagaucuaaaaaaaaaaaaaaaaaaaaaaaaaaaaaaaaaaaaaaaaaaaaaaaaaaaaaaaaaaaaaaaaugcaucccccccccccccccccccccccccccccccaaaggcucuuuucagagccaccagaauu

SEQ ID NO: 3192 - RNA, 1948 nt, Artificial Sequence
  mRNA product Design b-4 comprising derived and/or modified sequence from HRSV(A2)__F_DSCav1_mut3 (opt11)
gggagagucccgcagucggcguccagcggcucugcuuguucgugugugugucguugcaggccuuauucaagcuuaccauggaacuccucauccuuaaagcaaacgccaucacaaccauccucacagcagucacuuucugcuucgcauccggacaaaacaucacagaagaguucuaucaauccacgugcuccgcaguuuccaaaggauaccuuggagccuuacgaaccggcugguacaccuccgucaucaccauagaacucagcaacaucaaagaaaucaaaugcaacggaaccgacgcaaaagucaaacucaucaaacaagaacuagacaaauacaaaaacgcagucaccgaccuccaacuacucaugcaaucaacccccgcaaccggcuccggcuccgccaucugcuccggaguagccguaugcaaaguccuccaccucgaaggcgaaguuaacaagaucaaguccgcacuccuaucaaccaacaaagcagucgucucccuauccaacggcgucuccguauuaacauucaaaguccucgaccucaaaaacuacauagacaaacagcuacuccccauccuaaacaaacaauccugcuccauccccaacaucgaaacugucaucgaguuccaacagaaaaacaaccgccuccuagaaaucacccgagaguucuccguaaacgccggcgucacuacccccgucucuaccuauaugcuaaccaacucugaacuccuaucccuaaucaacgauaugcccauaacuaacgaccaaaagaaacuuauguccaacaacguacaaauaguccggcaacaaucauacucuaucaugugcaucaucaaagaagaaguacuugccuacguuguccaacucccacuauacggcgucauagacacuccaugcuggaaacuucacaccucaccccucugcaccacuaacacuaaagaaggcucuaacaucugccuuacccgcaccgaccgcggaugguacugcgacaacgcaggcucaguuagcuucuucccacaagccgaaaccugcaaaguccagucaaaccgugucuucugcgauaccaugaacucgcucacccucccuuccgaagucaaccucugcaacgucgacaucuucaaccccaaauacgacugcaaaaucaugaccucaaaaaccgacguaucuucuuccgucaucaccucccucggcgccaucguauccugcuacggcaaaaccaaaugcacugcaucaaacaaaaaccgaggcaucaucaaaaccuucucgaacggaugcgacuacguauccaacaagggcgucgacacagucuccguugguaacacccucuacugcgucaacaaacaagaaggccaaucccuauacguaaaaggcgaacccaucaucaacuucuacgacccccucgucuuccccagugacgaauuugacgccuccaucucccaagucaacgaaaagaucaaccaaucccuugccuucauacgcaaauccgacgaacuccuacacaacguuaacgccggaaaaucaacaaccaacaucaugaucacaaccaucauaaucgucauaaucgucauacuccucucccucauagccgucggccugcuauuguacuguaaagcccgcuccacaccagucacacuuucaaaagaccaacucuccgggaucaacaacaucgccuucuccaacuaaggacuaguaauaaggaaacuguaugaaugucugugggcaggaagugaagagauccuucuguaaagguuuuuggaauuaugucugcugaauaauaaacuuuuuugaaauaauaaaucugguagaaaaaugagaucuaaaaaaaaaaaaaaaaaaaaaaaaaaaaaaaaaaaaaaaaaaaaaaaaaaaaaaaaaaaaaaaaugcaucccccccccccccccccccccccccccccccaaaggcucuuuucagagccaccagaauu

SEQ ID NO: 3193 - RNA, 2010 nt, Artificial Sequence
  mRNA product Design b-5 comprising derived and/or modified sequence from HRSV(A2)__F_DSCav1_mut3 (opt1)
gggagacuccugucgggcggaaguaggaggaguagaguuuaaaaacaguacucuuuuuccgguucgggacguaguugaagcaacgacaagccggauaaccgcucuugagacaggaagcuuaccauggagcugcucauccugaaggccaacgccaucaccaccauccugacggcggugaccuucugcuucgccagcggccagaacaucaccgaggaguucuaccaguccacgugcagcgccgucuccaagggguaccucggcgcccugcggaccggcugguacaccuccgugaucaccaucgagcugagcaacaucaaggagaucaagugcaacgggaccgacgccaaggugaagcucaucaagcaggagcuggacaaguacaagaacgcggucacggaccugcagcuccugaugcaguccaccccggcaaccggcuccggcuccgccaucugcagcggcgucgccgugugcaaggugcugcaccucgagggggaggucaacaagaucaagagcgcccugcuguccaccaacaaggccguggugagccucuccaacggcgucagcgugcugaccuucaaggugcuggaccucaagaacuacaucgacaagcagcugcugcccauccugaacaagcagagcugcuccauccccaacaucgagacggugaucgaguuccagcagaagaacaaccggcuccuggagaucacccgcgaguucagcgugaacgccggggucaccacccccguguccacguacaugcugaccaacagcgagcuccugucccugaucaacgacaugccgaucaccaacgaccagaagaagcucaugagcaacaacgugcagaucguccggcagcaguccuacagcaucaugugcaucaucaaggaggaggugcuggcguacgugguccagcugccccucuacggcgugaucgacacccccugcuggaagcugcacacgagcccccugugcaccaccaacaccaaggagggguccaacaucugccucacgcgcaccgaccggggcugguacugcgacaacgccggcagcgucuccuucuucccgcaggccgagaccugcaaggugcagagcaaccgcguguucugcgacaccaugaacucccugacgcugcccagcgagguaaaccucugcaacgucgacaucuucaaccccaaguacgacugcaagaucaugaccuccaagaccgacgugagcuccagcgugaucaccucccugggggccaucgucagcugcuacggcaagacgaagugcaccgccagcaacaagaaccgggggaucaucaagaccuucuccaacggcugcgacuacgugagcaacaagggcguggacaccguguccgucgggaacacccuguacugcgugaacaagcaggagggccagagccucuacgugaagggggagcccaucaucaacuucuacgacccgcuggucuuccccuccgacgaguucgacgcgagcaucucccaggugaacgagaagaucaaccagagccuggccuucauccgcaaguccgacgagcugcuccacaacgugaacgccggcaagagcacgaccaacaucaugaucaccaccaucaucaucgucaucaucgugauccugcugucccucaucgccguggggcugcugcucuacugcaaggcccggagcacgcccgucacccuguccaaggaccagcugagcggcaucaacaacaucgcguucuccaacugaggacuaguacuggcugcaucucccuuuccucuguccuccauccuucucccaggauggugaagggggaccugguacccagugauccccaccccaggauccuaaaucaugacuuaccugcuaauaaaaacucauuggaaaagugagaagaucuaaaaaaaaaaaaaaaaaaaaaaaaaaaaaaaaaaaaaaaaaaaaaaaaaaaaaaaaaaaaaaaaugcaucccccccccccccccccccccccccccccccaaaggcucuuuucagagccaccagaauu

SEQ ID NO: 3194 - RNA, 2010 nt, Artificial Sequence
  mRNA product Design b-5 comprising derived and/or modified sequence from HRSV(A2)__F_DSCav1_mut3 (opt1)
gggagacuccugucgggcggaaguaggaggaguagaguuuaaaaacaguacucuuuuuccgguucgggacguaguugaagcaacgacaagccggauaaccgcucuugagacaggaagcuuaccauggagcugcucauccugaaggccaacgccaucaccaccauccugacggcggugaccuucugcuucgccagcggccagaacaucaccgaggaguucuaccaguccacgugcagcgccgucuccaagggguaccucggcgcccugcgcaccgggugguacaccagcgugaucaccaucgagcuguccaacaucaaggagaucaagugcaacggcaccgacgccaaggugaagcucaucaagcaggagcuggacaaguacaagaacgcggucacggaccugcagcuccugaugcagagcacccccgccaccggguccggcagcgccaucugcuccggcguggccgugugcaagguccugcaccucgagggggaggugaacaagaucaagagcgcgcugcuguccaccaacaaggccguggucagccucuccaacggcgugagcgugcugacguucaagguccuggaccucaagaacuacaucgacaagcagcugcugccgauccucaacaagcaguccugcagcauccccaacaucgagaccgugaucgaguuccagcagaagaacaaccggcugcuggagaucacccgcgaguucuccgugaacgccggggucaccacgcccgugagcaccuacaugcucaccaacuccgagcugcugagccucaucaacgacaugcccaucaccaacgaccagaagaagcugaugagcaacaacgugcagaucguccggcagcaguccuacagcaucaugugcaucaucaaggaggaggugcuggccuacgugguccagcucccgcuguacggcgugaucgacacgcccugcuggaagcugcacaccagcccccucugcaccaccaacacgaaggagggguccaacaucugccugacccgcaccgaccggggcugguacugcgacaacgccggcuccgugagcuucuucccccaggcggagaccugcaagguccaguccaaccgcguguucugcgacacgaugaacagccugacccucccguccgaggucaaccugugcaacguggacaucuucaaccccaaguacgacugcaagaucaugaccagcaagaccgacguguccagcuccgucaucacgagccugggggccaucguguccugcuacggcaagaccaagugcaccgccagcaacaagaaccgggggaucaucaagaccuucuccaacggcugcgacuacgugagcaacaagggcgucgacacgguguccguggggaacacccucuacugcgucaacaagcaggagggccagagccuguacgugaagggggagcccaucaucaacuucuacgacccccugguguucccgagcgacgaguucgacgccuccaucagccaggucaacgagaagaucaaccagucccucgccuucauccgcaagagcgacgagcugcugcacaacgugaacgcgggcaaguccaccaccaacaucaugaucaccacgaucaucaucgugaucaucgucauccuccugagccugaucgccguggggcuccugcuguacugcaaggcccgguccacccccgugacccugagcaaggaccagcucuccggcaucaacaacaucgccuucagcaacugaggacuaguacuggcugcaucucccuuuccucuguccuccauccuucucccaggauggugaagggggaccugguacccagugauccccaccccaggauccuaaaucaugacuuaccugcuaauaaaaacucauuggaaaagugagaagaucuaaaaaaaaaaaaaaaaaaaaaaaaaaaaaaaaaaaaaaaaaaaaaaaaaaaaaaaaaaaaaaaaugcaucccccccccccccccccccccccccccccccaaaggcucuuuucagagccaccagaauu

SEQ ID NO: 3195 - RNA, 2010 nt, Artificial Sequence
  mRNA product Design b-5 comprising derived and/or modified sequence from HRSV(A2)__F_DSCav1_mut3 (opt2)
gggagacuccugucgggcggaaguaggaggaguagaguuuaaaaacaguacucuuuuuccgguucgggacguaguugaagcaacgacaagccggauaaccgcucuugagacaggaagcuuaccauggagcuccucauccucaaggccaacgccaucaccaccauccucaccgccgucaccuucugcuucgccuccggccagaacaucaccgaggaguucuaccaguccaccugcuccgccgucuccaagggcuaccucggcgcccuccgcaccggcugguacaccuccgucaucaccaucgagcucuccaacaucaaggagaucaagugcaacggcaccgacgccaaggucaagcucaucaagcaggagcucgacaaguacaagaacgccgucaccgaccuccagcuccucaugcaguccacccccgccaccggcuccggcuccgccaucugcuccggcgucgccgucugcaagguccuccaccucgagggcgaggucaacaagaucaaguccgcccuccucuccaccaacaaggccgucgucucccucuccaacggcgucuccguccucaccuucaagguccucgaccucaagaacuacaucgacaagcagcuccuccccauccucaacaagcaguccugcuccauccccaacaucgagaccgucaucgaguuccagcagaagaacaaccgccuccucgagaucacccgcgaguucuccgucaacgccggcgucaccacccccgucuccaccuacaugcucaccaacuccgagcuccucucccucaucaacgacaugcccaucaccaacgaccagaagaagcucauguccaacaacguccagaucguccgccagcaguccuacuccaucaugugcaucaucaaggaggagguccucgccuacgucguccagcucccccucuacggcgucaucgacacccccugcuggaagcuccacaccuccccccucugcaccaccaacaccaaggagggcuccaacaucugccucacccgcaccgaccgcggcugguacugcgacaacgccggcuccgucuccuucuucccccaggccgagaccugcaagguccaguccaaccgcgucuucugcgacaccaugaacucccucacccuccccuccgaggucaaccucugcaacgucgacaucuucaaccccaaguacgacugcaagaucaugaccuccaagaccgacgucuccuccuccgucaucaccucccucggcgccaucgucuccugcuacggcaagaccaagugcaccgccuccaacaagaaccgcggcaucaucaagaccuucuccaacggcugcgacuacgucuccaacaagggcgucgacaccgucuccgucggcaacacccucuacugcgucaacaagcaggagggccagucccucuacgucaagggcgagcccaucaucaacuucuacgacccccucgucuuccccuccgacgaguucgacgccuccaucucccaggucaacgagaagaucaaccagucccucgccuucauccgcaaguccgacgagcuccuccacaacgucaacgccggcaaguccaccaccaacaucaugaucaccaccaucaucaucgucaucaucgucauccuccucucccucaucgccgucggccuccuccucuacugcaaggcccgcuccacccccgucacccucuccaaggaccagcucuccggcaucaacaacaucgccuucuccaacugaggacuaguacuggcugcaucucccuuuccucuguccuccauccuucucccaggauggugaagggggaccugguacccagugauccccaccccaggauccuaaaucaugacuuaccugcuaauaaaaacucauuggaaaagugagaagaucuaaaaaaaaaaaaaaaaaaaaaaaaaaaaaaaaaaaaaaaaaaaaaaaaaaaaaaaaaaaaaaaaugcaucccccccccccccccccccccccccccccccaaaggcucuuuucagagccaccagaauu

SEQ ID NO: 3196 - RNA, 2010 nt, Artificial Sequence
  mRNA product Design b-5 comprising derived and/or modified sequence from HRSV(A2)__F_DSCav1_mut3 (opt3)
gggagacuccugucgggcggaaguaggaggaguagaguuuaaaaacaguacucuuuuuccgguucgggacguaguugaagcaacgacaagccggauaaccgcucuugagacaggaagcuuaccauggagcugcucauccuuaaggccaacgcuauuaccacaauacugacugcagugacguucugcuuugccagcggccagaauaucaccgaagaguucuaccaauccacauguucugcggucucaaaaggguauuugggagcuuuaagaacugguugguacaccaguguuauuacaaucgaacugagcaacauuaaggagaucaaaugcaauggcaccgacgccaaggugaaacuaauaaagcaggaacucgauaaguauaaaaacgcaguaacugaccugcagcuucugaugcaguccacacccgccaccgggucuggaucggcuaucuguucaggcguggcagucugcaagguguugcaccucgagggugagguuaauaaaauuaagagcgcccugcugaguacgaacaaagcuguggucucccucucuaauggggugagcguauuaacuuuuaagguucuggaucuuaagaacuacaucgacaaacaauugcugccuauucuaaauaagcaguccuguucaaucccaaacauagaaaccgugauugaguuccagcagaaaaauaacaggcuccuggaaaucacacgggaguuuagugucaaugccggagugacuaccccggugagcacauauaugcuuaccaacucugagcuguugucccucauuaaugauaugcccaucacgaacgaccaaaagaaacugaugucaaacaauguccagaucguucgccagcagagcuacaguauuaugugcauaaucaaggaagagguguuagcguauguagugcaacugccucucuacggcgucauugauacuccauguuggaaacuucauacaucuccccugugcaccacuaacacaaaggaaggcuccaauaucuguuugacccgaacggaccgugggugguacugcgauaacgcaggaagcgugucguucuuuccucaggccgagaccuguaagguucagucuaauagaguguucugcgacacaaugaacucccuaacucugccaucagaagucaaucucugcaacguggauauauuuaaucccaaauaugacuguaagauuaugaccaguaaaacagauguaagcuccucuguuaucacuagccugggugcuaucgugucaugcuacggcaagaccaaauguacagccaguaacaagaauagggggauuaucaagaccuucuccaacggaugcgacuaugucagcaauaaaggcguggacacugucucuguggguaacacgcuuuacuguguuaauaagcaagaggggcagucacuguaugugaaaggagagccuauuauaaacuuuuacgauccauugguauucccgagugacgaauuugaugcaagcaucucccaggucaacgagaagauuaaucagucucucgcuuucauccggaaaucggacgaacuguuacacaacgugaaugccggcaagagcacaaccaacaucaugauuacuaccauaaucauuguuaucauugugauccugcuaucccucauagcggucggccugcuuuuguauugcaaggcccgcucaacacccgugacccugaguaaagaucaacucucugggaucaauaacauugcauucagcaauugaggacuaguacuggcugcaucucccuuuccucuguccuccauccuucucccaggauggugaagggggaccugguacccagugauccccaccccaggauccuaaaucaugacuuaccugcuaauaaaaacucauuggaaaagugagaagaucuaaaaaaaaaaaaaaaaaaaaaaaaaaaaaaaaaaaaaaaaaaaaaaaaaaaaaaaaaaaaaaaaugcaucccccccccccccccccccccccccccccccaaaggcucuuuucagagccaccagaauu

SEQ ID NO: 3197 - RNA, 2010 nt, Artificial Sequence
  mRNA product Design b-5 comprising derived and/or modified sequence from HRSV(A2)__F_DSCav1_mut3 (opt4)
gggagacuccugucgggcggaaguaggaggaguagaguuuaaaaacaguacucuuuuuccgguucgggacguaguugaagcaacgacaagccggauaaccgcucuugagacaggaagcuuaccauggagcugcugauccugaaggccaacgccaucaccaccauccugaccgccgugaccuucugcuucgccagcggccagaacaucaccgaggaguucuaccagagcaccugcagcgccgugagcaagggcuaccugggcgcccugagaaccggcugguacaccagcgugaucaccaucgagcugagcaacaucaaggagaucaagugcaacggcaccgacgccaaggugaagcugaucaagcaggagcuggacaaguacaagaacgccgugaccgaccugcagcugcugaugcagagcacccccgccaccggcagcggcagcgccaucugcagcggcguggccgugugcaaggugcugcaccuggagggcgaggugaacaagaucaagagcgcccugcugagcaccaacaaggccguggugagccugagcaacggcgugagcgugcugaccuucaaggugcuggaccugaagaacuacaucgacaagcagcugcugcccauccugaacaagcagagcugcagcauccccaacaucgagaccgugaucgaguuccagcagaagaacaacagacugcuggagaucaccagagaguucagcgugaacgccggcgugaccacccccgugagcaccuacaugcugaccaacagcgagcugcugagccugaucaacgacaugcccaucaccaacgaccagaagaagcugaugagcaacaacgugcagaucgugagacagcagagcuacagcaucaugugcaucaucaaggaggaggugcuggccuacguggugcagcugccccuguacggcgugaucgacacccccugcuggaagcugcacaccagcccccugugcaccaccaacaccaaggagggcagcaacaucugccugaccagaaccgacagaggcugguacugcgacaacgccggcagcgugagcuucuucccccaggccgagaccugcaaggugcagagcaacagaguguucugcgacaccaugaacagccugacccugcccagcgaggugaaccugugcaacguggacaucuucaaccccaaguacgacugcaagaucaugaccagcaagaccgacgugagcagcagcgugaucaccagccugggcgccaucgugagcugcuacggcaagaccaagugcaccgccagcaacaagaacagaggcaucaucaagaccuucagcaacggcugcgacuacgugagcaacaagggcguggacaccgugagcgugggcaacacccuguacugcgugaacaagcaggagggccagagccuguacgugaagggcgagcccaucaucaacuucuacgacccccugguguuccccagcgacgaguucgacgccagcaucagccaggugaacgagaagaucaaccagagccuggccuucaucagaaagagcgacgagcugcugcacaacgugaacgccggcaagagcaccaccaacaucaugaucaccaccaucaucaucgugaucaucgugauccugcugagccugaucgccgugggccugcugcuguacugcaaggccagaagcacccccgugacccugagcaaggaccagcugagcggcaucaacaacaucgccuucagcaacugaggacuaguacuggcugcaucucccuuuccucuguccuccauccuucucccaggauggugaagggggaccugguacccagugauccccaccccaggauccuaaaucaugacuuaccugcuaauaaaaacucauuggaaaagugagaagaucuaaaaaaaaaaaaaaaaaaaaaaaaaaaaaaaaaaaaaaaaaaaaaaaaaaaaaaaaaaaaaaaaugcaucccccccccccccccccccccccccccccccaaaggcucuuuucagagccaccagaauu

SEQ ID NO: 3198 - RNA, 2010 nt, Artificial Sequence
  mRNA product Design b-5 comprising derived and/or modified sequence from HRSV(A2)__F_DSCav1_mut3 (opt5)
gggagacuccugucgggcggaaguaggaggaguagaguuuaaaaacaguacucuuuuuccgguucgggacguaguugaagcaacgacaagccggauaaccgcucuugagacaggaagcuuaccauggagcugcucauccugaaggccaacgcuauuaccacaauccuuacggccgugaccuucugcuuugcgagcggccagaauauuacagaagaguucuaccaauccaccuguucugcugucagcaaaggguaucugggagcccucagaacaggcugguacaccuccguuaucacaauugaacugucuaacaucaaggagaucaaaugcaaugggaccgacgccaaggugaaacuuauuaagcaggaacuggauaaguauaaaaacgcugugacggaccuccagcugcugaugcagagcacccccgccacaggauccggcucugcuaucuguagcggggucgccgugugcaagguucuccaccuggagggagaggugaauaaaauuaaguccgcgcuucugagcaccaacaaagccgucgugucucucuccaauggcguuagcgugcugacauuuaagguccuugaucugaagaacuacaucgacaaacaacuccugccuauucugaauaagcagucuuguuccaucccgaacauugaaaccgugaucgaguuccagcagaaaaauaaccggcuccuggaaaucacgcgcgaguuuagcgugaaugcuggcgucacaacccccguuucuacauauaugcuuaccaacuccgagcugcucagccugauuaaugauaugccuaucaccaacgaccaaaagaaacuuauguccaacaaugugcagauugugagacagcagucuuacagcaucaugugcauuaucaaggaagagguccuggccuaugugguucaacucccccuguacggggugaucgauacaccuuguuggaaacugcauacgagcccccucugcaccacaaacaccaaggaaggauccaauauuugucugacacggaccgaccgcggcugguacugcgauaacgcugggucugucuccuucuuuccucaggccgagacguguaaggugcagagcaauagaguuuucugcgacacaaugaacucucuuacccugccgagcgaagugaaucucugcaacgucgauaucuuuaaucccaaauaugacuguaagauuaugaccuccaaaacagaugugucuagcuccgucaucaccagccugggagcgauugugucuugcuacggcaagacaaaauguacggccuccaacaagaaucgggggaucaucaagaccuucagcaacggaugcgacuauguuucuaauaaaggcguggacacagucuccgugggcaacacccuuuacuguguuaauaagcaagaggggcagagccuguaugugaaaggagagccuauuaucaacuuuuacgauccccucgucuucccuuccgacgaauuugaugcuucuauuagccaggugaacgagaagaucaaucagucccuggccuucauucgcaaaucugacgaacugcuccacaacgugaaugcuggcaagagcacaaccaacaucaugauuacgaccaucaucauuguuaucauugucauccugcuuucccugauugccguggggcuccugcuguauugcaaggccagaagcacacccgugacccuuucuaaagaucaacucuccggaaucaauaacaucgcuuucagcaauugaggacuaguacuggcugcaucucccuuuccucuguccuccauccuucucccaggauggugaagggggaccugguacccagugauccccaccccaggauccuaaaucaugacuuaccugcuaauaaaaacucauuggaaaagugagaagaucuaaaaaaaaaaaaaaaaaaaaaaaaaaaaaaaaaaaaaaaaaaaaaaaaaaaaaaaaaaaaaaaaugcaucccccccccccccccccccccccccccccccaaaggcucuuuucagagccaccagaauu

SEQ ID NO: 3199 - RNA, 2010 nt, Artificial Sequence
  mRNA product Design b-5 comprising derived and/or modified sequence from HRSV(A2)__F_DSCav1_mut3 (opt6)
gggagacuccugucgggcggaaguaggaggaguagaguuuaaaaacaguacucuuuuuccgguucgggacguaguugaagcaacgacaagccggauaaccgcucuugagacaggaagcuuaccauggaauuacucauacuaaaagccaaugccauaaccacuauucuaacagcaguaacauucuguuucgccucaggacaaaacauaacagaagaauuuuaucaauccaccuguuccgcagucucgaaaggcuaccuuggcgcacuaagaaccggaugguauacaucaguaauaaccauugaacuaucaaauaucaaagaaauaaaaugcaacggaacugacgcaaaagucaaacuaauaaaacaagaauuagacaaauacaaaaacgccguuacagacuuacaacuacuaaugcaaucaacuccagcaacaggaucaggaucugcuauaugcucaggugucgccguauguaaaguguuacaccucgaaggcgaaguaaacaaaauaaaaucagcacuacuauccacaaauaaagcaguaguaucacuauccaaugguguaucaguacucacauucaaaguacuagacuuaaaaaauuauauagauaaacaauuacuaccaauauuaaacaaacaaucaugcucaauaccaaacauagaaaccgucauugaauuucaacaaaaaaacaaucgacuucuugaaauaacacgagaauuuucaguaaaugccggaguaacaaccccagucucaacauacauguuaaccaacucugaacuccuaagccuaaucaacgacaugcccauaacuaacgaccaaaaaaaacuaauguccaauaauguccaaauaguaagacaacaauccuacucaauaaugugcauuauaaaagaagaaguccucgccuauguaguacaacuacccuuauacggaguaauugacacaccauguuggaaacuacauacaucaccacuaugcaccacuaacacaaaagaaggcuccaacauaugccuaacccgaacagaucgcggaugguauugcgacaacgcaggaaguguauccuucuuuccacaagcagaaacaugcaaaguacaauccaacagaguauucugugacaccaugaacucucuaacacuaccuuccgaaguaaauuuaugcaacguagacauauuuaaucccaaauacgacuguaaaauaaugaccucaaaaacugaugucucaucaucagucauuacaucacucggagcaauagucaguugcuauggaaaaaccaaaugcacagcuaguaacaaaaacagggguauaauaaaaacauuuucaaacggaugcgauuacguaucaaauaaaggaguagacaccguauccguaggaaauacucucuacugcguaaacaaacaagaaggacaaucccuauacguaaaaggcgaaccaaucauuaacuuuuacgacccacuuguauuuccaucagacgaauuugaugccucaauaucccaagucaaugaaaaaauaaaccaaagucuagcauucauccgaaaaucagaugaacuuuuacacaacguaaacgccggaaaaucaacaacaaacaucaugaucacaacaaucaucauaguaauaauaguuauacuacuuuccuuaauagcagucggccuacuacucuacugcaaagcacgauccacaccaguaaccuuaucuaaagaccaacucucaggcauaaacaacauagcauucucaaacuaaggacuaguacuggcugcaucucccuuuccucuguccuccauccuucucccaggauggugaagggggaccugguacccagugauccccaccccaggauccuaaaucaugacuuaccugcuaauaaaaacucauuggaaaagugagaagaucuaaaaaaaaaaaaaaaaaaaaaaaaaaaaaaaaaaaaaaaaaaaaaaaaaaaaaaaaaaaaaaaaugcaucccccccccccccccccccccccccccccccaaaggcucuuuucagagccaccagaauu

SEQ ID NO: 3200 - RNA, 2010 nt, Artificial Sequence
  mRNA product Design b-5 comprising derived and/or modified sequence from HRSV(A2)__F_DSCav1_mut3 (opt11)
gggagacuccugucgggcggaaguaggaggaguagaguuuaaaaacaguacucuuuuuccgguucgggacguaguugaagcaacgacaagccggauaaccgcucuugagacaggaagcuuaccauggaacuccucauccuuaaagcaaacgccaucacaaccauccucacagcagucacuuucugcuucgcauccggacaaaacaucacagaagaguucuaucaauccacgugcuccgcaguuuccaaaggauaccuuggagccuuacgaaccggcugguacaccuccgucaucaccauagaacucagcaacaucaaagaaaucaaaugcaacggaaccgacgcaaaagucaaacucaucaaacaagaacuagacaaauacaaaaacgcagucaccgaccuccaacuacucaugcaaucaacccccgcaaccggcuccggcuccgccaucugcuccggaguagccguaugcaaaguccuccaccucgaaggcgaaguuaacaagaucaaguccgcacuccuaucaaccaacaaagcagucgucucccuauccaacggcgucuccguauuaacauucaaaguccucgaccucaaaaacuacauagacaaacagcuacuccccauccuaaacaaacaauccugcuccauccccaacaucgaaacugucaucgaguuccaacagaaaaacaaccgccuccuagaaaucacccgagaguucuccguaaacgccggcgucacuacccccgucucuaccuauaugcuaaccaacucugaacuccuaucccuaaucaacgauaugcccauaacuaacgaccaaaagaaacuuauguccaacaacguacaaauaguccggcaacaaucauacucuaucaugugcaucaucaaagaagaaguacuugccuacguuguccaacucccacuauacggcgucauagacacuccaugcuggaaacuucacaccucaccccucugcaccacuaacacuaaagaaggcucuaacaucugccuuacccgcaccgaccgcggaugguacugcgacaacgcaggcucaguuagcuucuucccacaagccgaaaccugcaaaguccagucaaaccgugucuucugcgauaccaugaacucgcucacccucccuuccgaagucaaccucugcaacgucgacaucuucaaccccaaauacgacugcaaaaucaugaccucaaaaaccgacguaucuucuuccgucaucaccucccucggcgccaucguauccugcuacggcaaaaccaaaugcacugcaucaaacaaaaaccgaggcaucaucaaaaccuucucgaacggaugcgacuacguauccaacaagggcgucgacacagucuccguugguaacacccucuacugcgucaacaaacaagaaggccaaucccuauacguaaaaggcgaacccaucaucaacuucuacgacccccucgucuuccccagugacgaauuugacgccuccaucucccaagucaacgaaaagaucaaccaaucccuugccuucauacgcaaauccgacgaacuccuacacaacguuaacgccggaaaaucaacaaccaacaucaugaucacaaccaucauaaucgucauaaucgucauacuccucucccucauagccgucggccugcuauuguacuguaaagcccgcuccacaccagucacacuuucaaaagaccaacucuccgggaucaacaacaucgccuucuccaacuaaggacuaguacuggcugcaucucccuuuccucuguccuccauccuucucccaggauggugaagggggaccugguacccagugauccccaccccaggauccuaaaucaugacuuaccugcuaauaaaaacucauuggaaaagugagaagaucuaaaaaaaaaaaaaaaaaaaaaaaaaaaaaaaaaaaaaaaaaaaaaaaaaaaaaaaaaaaaaaaaugcaucccccccccccccccccccccccccccccccaaaggcucuuuucagagccaccagaauu

SEQ ID NO: 3201 - RNA, 1916 nt, Artificial Sequence
  mRNA product Design c-1 comprising derived and/or modified sequence from HRSV(A2)__F_DSCav1_mut3 (opt1)
gggagaguccgcucagccagguugcagaagcggcuuagcguguguccuaaucuucucucugcguguagguaggccugugccgcaaacaagcuuaccauggagcugcucauccugaaggccaacgccaucaccaccauccugacggcggugaccuucugcuucgccagcggccagaacaucaccgaggaguucuaccaguccacgugcagcgccgucuccaagggguaccucggcgcccugcggaccggcugguacaccuccgugaucaccaucgagcugagcaacaucaaggagaucaagugcaacgggaccgacgccaaggugaagcucaucaagcaggagcuggacaaguacaagaacgcggucacggaccugcagcuccugaugcaguccaccccggcaaccggcuccggcuccgccaucugcagcggcgucgccgugugcaaggugcugcaccucgagggggaggucaacaagaucaagagcgcccugcuguccaccaacaaggccguggugagccucuccaacggcgucagcgugcugaccuucaaggugcuggaccucaagaacuacaucgacaagcagcugcugcccauccugaacaagcagagcugcuccauccccaacaucgagacggugaucgaguuccagcagaagaacaaccggcuccuggagaucacccgcgaguucagcgugaacgccggggucaccacccccguguccacguacaugcugaccaacagcgagcuccugucccugaucaacgacaugccgaucaccaacgaccagaagaagcucaugagcaacaacgugcagaucguccggcagcaguccuacagcaucaugugcaucaucaaggaggaggugcuggcguacgugguccagcugccccucuacggcgugaucgacacccccugcuggaagcugcacacgagcccccugugcaccaccaacaccaaggagggguccaacaucugccucacgcgcaccgaccggggcugguacugcgacaacgccggcagcgucuccuucuucccgcaggccgagaccugcaaggugcagagcaaccgcguguucugcgacaccaugaacucccugacgcugcccagcgagguaaaccucugcaacgucgacaucuucaaccccaaguacgacugcaagaucaugaccuccaagaccgacgugagcuccagcgugaucaccucccugggggccaucgucagcugcuacggcaagacgaagugcaccgccagcaacaagaaccgggggaucaucaagaccuucuccaacggcugcgacuacgugagcaacaagggcguggacaccguguccgucgggaacacccuguacugcgugaacaagcaggagggccagagccucuacgugaagggggagcccaucaucaacuucuacgacccgcuggucuuccccuccgacgaguucgacgcgagcaucucccaggugaacgagaagaucaaccagagccuggccuucauccgcaaguccgacgagcugcuccacaacgugaacgccggcaagagcacgaccaacaucaugaucaccaccaucaucaucgucaucaucgugauccugcugucccucaucgccguggggcugcugcucuacugcaaggcccggagcacgcccgucacccuguccaaggaccagcugagcggcaucaacaacaucgcguucuccaacugaggacuaguguccaccugucccuccugggcugcuggauugucucguuuuccugccaaauaaacaggaucagcgcuuuacagaucuaaaaaaaaaaaaaaaaaaaaaaaaaaaaaaaaaaaaaaaaaaaaaaaaaaaaaaaaaaaaaaaaugcaucccccccccccccccccccccccccccccccaaaggcucuuuucagagccaccagaauu

SEQ ID NO: 3202 - RNA, 1916 nt, Artificial Sequence
  mRNA product Design c-1 comprising derived and/or modified sequence from HRSV(A2)__F_DSCav1_mut3 (opt1)
gggagaguccgcucagccagguugcagaagcggcuuagcguguguccuaaucuucucucugcguguagguaggccugugccgcaaacaagcuuaccauggagcugcucauccugaaggccaacgccaucaccaccauccugacggcggugaccuucugcuucgccagcggccagaacaucaccgaggaguucuaccaguccacgugcagcgccgucuccaagggguaccucggcgcccugcgcaccgggugguacaccagcgugaucaccaucgagcuguccaacaucaaggagaucaagugcaacggcaccgacgccaaggugaagcucaucaagcaggagcuggacaaguacaagaacgcggucacggaccugcagcuccugaugcagagcacccccgccaccggguccggcagcgccaucugcuccggcguggccgugugcaagguccugcaccucgagggggaggugaacaagaucaagagcgcgcugcuguccaccaacaaggccguggucagccucuccaacggcgugagcgugcugacguucaagguccuggaccucaagaacuacaucgacaagcagcugcugccgauccucaacaagcaguccugcagcauccccaacaucgagaccgugaucgaguuccagcagaagaacaaccggcugcuggagaucacccgcgaguucuccgugaacgccggggucaccacgcccgugagcaccuacaugcucaccaacuccgagcugcugagccucaucaacgacaugcccaucaccaacgaccagaagaagcugaugagcaacaacgugcagaucguccggcagcaguccuacagcaucaugugcaucaucaaggaggaggugcuggccuacgugguccagcucccgcuguacggcgugaucgacacgcccugcuggaagcugcacaccagcccccucugcaccaccaacacgaaggagggguccaacaucugccugacccgcaccgaccggggcugguacugcgacaacgccggcuccgugagcuucuucccccaggcggagaccugcaagguccaguccaaccgcguguucugcgacacgaugaacagccugacccucccguccgaggucaaccugugcaacguggacaucuucaaccccaaguacgacugcaagaucaugaccagcaagaccgacguguccagcuccgucaucacgagccugggggccaucguguccugcuacggcaagaccaagugcaccgccagcaacaagaaccgggggaucaucaagaccuucuccaacggcugcgacuacgugagcaacaagggcgucgacacgguguccguggggaacacccucuacugcgucaacaagcaggagggccagagccuguacgugaagggggagcccaucaucaacuucuacgacccccugguguucccgagcgacgaguucgacgccuccaucagccaggucaacgagaagaucaaccagucccucgccuucauccgcaagagcgacgagcugcugcacaacgugaacgcgggcaaguccaccaccaacaucaugaucaccacgaucaucaucgugaucaucgucauccuccugagccugaucgccguggggcuccugcuguacugcaaggcccgguccacccccgugacccugagcaaggaccagcucuccggcaucaacaacaucgccuucagcaacugaggacuaguguccaccugucccuccugggcugcuggauugucucguuuuccugccaaauaaacaggaucagcgcuuuacagaucuaaaaaaaaaaaaaaaaaaaaaaaaaaaaaaaaaaaaaaaaaaaaaaaaaaaaaaaaaaaaaaaaugcaucccccccccccccccccccccccccccccccaaaggcucuuuucagagccaccagaauu

SEQ ID NO: 3203 - RNA, 1916 nt, Artificial Sequence
  mRNA product Design c-1 comprising derived and/or modified sequence from HRSV(A2)__F_DSCav1_mut3 (opt2)
gggagaguccgcucagccagguugcagaagcggcuuagcguguguccuaaucuucucucugcguguagguaggccugugccgcaaacaagcuuaccauggagcuccucauccucaaggccaacgccaucaccaccauccucaccgccgucaccuucugcuucgccuccggccagaacaucaccgaggaguucuaccaguccaccugcuccgccgucuccaagggcuaccucggcgcccuccgcaccggcugguacaccuccgucaucaccaucgagcucuccaacaucaaggagaucaagugcaacggcaccgacgccaaggucaagcucaucaagcaggagcucgacaaguacaagaacgccgucaccgaccuccagcuccucaugcaguccacccccgccaccggcuccggcuccgccaucugcuccggcgucgccgucugcaagguccuccaccucgagggcgaggucaacaagaucaaguccgcccuccucuccaccaacaaggccgucgucucccucuccaacggcgucuccguccucaccuucaagguccucgaccucaagaacuacaucgacaagcagcuccuccccauccucaacaagcaguccugcuccauccccaacaucgagaccgucaucgaguuccagcagaagaacaaccgccuccucgagaucacccgcgaguucuccgucaacgccggcgucaccacccccgucuccaccuacaugcucaccaacuccgagcuccucucccucaucaacgacaugcccaucaccaacgaccagaagaagcucauguccaacaacguccagaucguccgccagcaguccuacuccaucaugugcaucaucaaggaggagguccucgccuacgucguccagcucccccucuacggcgucaucgacacccccugcuggaagcuccacaccuccccccucugcaccaccaacaccaaggagggcuccaacaucugccucacccgcaccgaccgcggcugguacugcgacaacgccggcuccgucuccuucuucccccaggccgagaccugcaagguccaguccaaccgcgucuucugcgacaccaugaacucccucacccuccccuccgaggucaaccucugcaacgucgacaucuucaaccccaaguacgacugcaagaucaugaccuccaagaccgacgucuccuccuccgucaucaccucccucggcgccaucgucuccugcuacggcaagaccaagugcaccgccuccaacaagaaccgcggcaucaucaagaccuucuccaacggcugcgacuacgucuccaacaagggcgucgacaccgucuccgucggcaacacccucuacugcgucaacaagcaggagggccagucccucuacgucaagggcgagcccaucaucaacuucuacgacccccucgucuuccccuccgacgaguucgacgccuccaucucccaggucaacgagaagaucaaccagucccucgccuucauccgcaaguccgacgagcuccuccacaacgucaacgccggcaaguccaccaccaacaucaugaucaccaccaucaucaucgucaucaucgucauccuccucucccucaucgccgucggccuccuccucuacugcaaggcccgcuccacccccgucacccucuccaaggaccagcucuccggcaucaacaacaucgccuucuccaacugaggacuaguguccaccugucccuccugggcugcuggauugucucguuuuccugccaaauaaacaggaucagcgcuuuacagaucuaaaaaaaaaaaaaaaaaaaaaaaaaaaaaaaaaaaaaaaaaaaaaaaaaaaaaaaaaaaaaaaaugcaucccccccccccccccccccccccccccccccaaaggcucuuuucagagccaccagaauu

SEQ ID NO: 3204 - RNA, 1916 nt, Artificial Sequence
  mRNA product Design c-1 comprising derived and/or modified sequence from HRSV(A2)__F_DSCav1_mut3 (opt3)
gggagaguccgcucagccagguugcagaagcggcuuagcguguguccuaaucuucucucugcguguagguaggccugugccgcaaacaagcuuaccauggagcugcucauccuuaaggccaacgcuauuaccacaauacugacugcagugacguucugcuuugccagcggccagaauaucaccgaagaguucuaccaauccacauguucugcggucucaaaaggguauuugggagcuuuaagaacugguugguacaccaguguuauuacaaucgaacugagcaacauuaaggagaucaaaugcaauggcaccgacgccaaggugaaacuaauaaagcaggaacucgauaaguauaaaaacgcaguaacugaccugcagcuucugaugcaguccacacccgccaccgggucuggaucggcuaucuguucaggcguggcagucugcaagguguugcaccucgagggugagguuaauaaaauuaagagcgcccugcugaguacgaacaaagcuguggucucccucucuaauggggugagcguauuaacuuuuaagguucuggaucuuaagaacuacaucgacaaacaauugcugccuauucuaaauaagcaguccuguucaaucccaaacauagaaaccgugauugaguuccagcagaaaaauaacaggcuccuggaaaucacacgggaguuuagugucaaugccggagugacuaccccggugagcacauauaugcuuaccaacucugagcuguugucccucauuaaugauaugcccaucacgaacgaccaaaagaaacugaugucaaacaauguccagaucguucgccagcagagcuacaguauuaugugcauaaucaaggaagagguguuagcguauguagugcaacugccucucuacggcgucauugauacuccauguuggaaacuucauacaucuccccugugcaccacuaacacaaaggaaggcuccaauaucuguuugacccgaacggaccgugggugguacugcgauaacgcaggaagcgugucguucuuuccucaggccgagaccuguaagguucagucuaauagaguguucugcgacacaaugaacucccuaacucugccaucagaagucaaucucugcaacguggauauauuuaaucccaaauaugacuguaagauuaugaccaguaaaacagauguaagcuccucuguuaucacuagccugggugcuaucgugucaugcuacggcaagaccaaauguacagccaguaacaagaauagggggauuaucaagaccuucuccaacggaugcgacuaugucagcaauaaaggcguggacacugucucuguggguaacacgcuuuacuguguuaauaagcaagaggggcagucacuguaugugaaaggagagccuauuauaaacuuuuacgauccauugguauucccgagugacgaauuugaugcaagcaucucccaggucaacgagaagauuaaucagucucucgcuuucauccggaaaucggacgaacuguuacacaacgugaaugccggcaagagcacaaccaacaucaugauuacuaccauaaucauuguuaucauugugauccugcuaucccucauagcggucggccugcuuuuguauugcaaggcccgcucaacacccgugacccugaguaaagaucaacucucugggaucaauaacauugcauucagcaauugaggacuaguguccaccugucccuccugggcugcuggauugucucguuuuccugccaaauaaacaggaucagcgcuuuacagaucuaaaaaaaaaaaaaaaaaaaaaaaaaaaaaaaaaaaaaaaaaaaaaaaaaaaaaaaaaaaaaaaaugcaucccccccccccccccccccccccccccccccaaaggcucuuuucagagccaccagaauu

SEQ ID NO: 3205 - RNA, 1916 nt, Artificial Sequence
  mRNA product Design c-1 comprising derived and/or modified sequence from HRSV(A2)__F_DSCav1_mut3 (opt4)
gggagaguccgcucagccagguugcagaagcggcuuagcguguguccuaaucuucucucugcguguagguaggccugugccgcaaacaagcuuaccauggagcugcugauccugaaggccaacgccaucaccaccauccugaccgccgugaccuucugcuucgccagcggccagaacaucaccgaggaguucuaccagagcaccugcagcgccgugagcaagggcuaccugggcgcccugagaaccggcugguacaccagcgugaucaccaucgagcugagcaacaucaaggagaucaagugcaacggcaccgacgccaaggugaagcugaucaagcaggagcuggacaaguacaagaacgccgugaccgaccugcagcugcugaugcagagcacccccgccaccggcagcggcagcgccaucugcagcggcguggccgugugcaaggugcugcaccuggagggcgaggugaacaagaucaagagcgcccugcugagcaccaacaaggccguggugagccugagcaacggcgugagcgugcugaccuucaaggugcuggaccugaagaacuacaucgacaagcagcugcugcccauccugaacaagcagagcugcagcauccccaacaucgagaccgugaucgaguuccagcagaagaacaacagacugcuggagaucaccagagaguucagcgugaacgccggcgugaccacccccgugagcaccuacaugcugaccaacagcgagcugcugagccugaucaacgacaugcccaucaccaacgaccagaagaagcugaugagcaacaacgugcagaucgugagacagcagagcuacagcaucaugugcaucaucaaggaggaggugcuggccuacguggugcagcugccccuguacggcgugaucgacacccccugcuggaagcugcacaccagcccccugugcaccaccaacaccaaggagggcagcaacaucugccugaccagaaccgacagaggcugguacugcgacaacgccggcagcgugagcuucuucccccaggccgagaccugcaaggugcagagcaacagaguguucugcgacaccaugaacagccugacccugcccagcgaggugaaccugugcaacguggacaucuucaaccccaaguacgacugcaagaucaugaccagcaagaccgacgugagcagcagcgugaucaccagccugggcgccaucgugagcugcuacggcaagaccaagugcaccgccagcaacaagaacagaggcaucaucaagaccuucagcaacggcugcgacuacgugagcaacaagggcguggacaccgugagcgugggcaacacccuguacugcgugaacaagcaggagggccagagccuguacgugaagggcgagcccaucaucaacuucuacgacccccugguguuccccagcgacgaguucgacgccagcaucagccaggugaacgagaagaucaaccagagccuggccuucaucagaaagagcgacgagcugcugcacaacgugaacgccggcaagagcaccaccaacaucaugaucaccaccaucaucaucgugaucaucgugauccugcugagccugaucgccgugggccugcugcuguacugcaaggccagaagcacccccgugacccugagcaaggaccagcugagcggcaucaacaacaucgccuucagcaacugaggacuaguguccaccugucccuccugggcugcuggauugucucguuuuccugccaaauaaacaggaucagcgcuuuacagaucuaaaaaaaaaaaaaaaaaaaaaaaaaaaaaaaaaaaaaaaaaaaaaaaaaaaaaaaaaaaaaaaaugcaucccccccccccccccccccccccccccccccaaaggcucuuuucagagccaccagaauu

SEQ ID NO: 3206 - RNA, 1916 nt, Artificial Sequence
  mRNA product Design c-1 comprising derived and/or modified sequence from HRSV(A2)__F_DSCav1_mut3 (opt5)
gggagaguccgcucagccagguugcagaagcggcuuagcguguguccuaaucuucucucugcguguagguaggccugugccgcaaacaagcuuaccauggagcugcucauccugaaggccaacgcuauuaccacaauccuuacggccgugaccuucugcuuugcgagcggccagaauauuacagaagaguucuaccaauccaccuguucugcugucagcaaaggguaucugggagcccucagaacaggcugguacaccuccguuaucacaauugaacugucuaacaucaaggagaucaaaugcaaugggaccgacgccaaggugaaacuuauuaagcaggaacuggauaaguauaaaaacgcugugacggaccuccagcugcugaugcagagcacccccgccacaggauccggcucugcuaucuguagcggggucgccgugugcaagguucuccaccuggagggagaggugaauaaaauuaaguccgcgcuucugagcaccaacaaagccgucgugucucucuccaauggcguuagcgugcugacauuuaagguccuugaucugaagaacuacaucgacaaacaacuccugccuauucugaauaagcagucuuguuccaucccgaacauugaaaccgugaucgaguuccagcagaaaaauaaccggcuccuggaaaucacgcgcgaguuuagcgugaaugcuggcgucacaacccccguuucuacauauaugcuuaccaacuccgagcugcucagccugauuaaugauaugccuaucaccaacgaccaaaagaaacuuauguccaacaaugugcagauugugagacagcagucuuacagcaucaugugcauuaucaaggaagagguccuggccuaugugguucaacucccccuguacggggugaucgauacaccuuguuggaaacugcauacgagcccccucugcaccacaaacaccaaggaaggauccaauauuugucugacacggaccgaccgcggcugguacugcgauaacgcugggucugucuccuucuuuccucaggccgagacguguaaggugcagagcaauagaguuuucugcgacacaaugaacucucuuacccugccgagcgaagugaaucucugcaacgucgauaucuuuaaucccaaauaugacuguaagauuaugaccuccaaaacagaugugucuagcuccgucaucaccagccugggagcgauugugucuugcuacggcaagacaaaauguacggccuccaacaagaaucgggggaucaucaagaccuucagcaacggaugcgacuauguuucuaauaaaggcguggacacagucuccgugggcaacacccuuuacuguguuaauaagcaagaggggcagagccuguaugugaaaggagagccuauuaucaacuuuuacgauccccucgucuucccuuccgacgaauuugaugcuucuauuagccaggugaacgagaagaucaaucagucccuggccuucauucgcaaaucugacgaacugcuccacaacgugaaugcuggcaagagcacaaccaacaucaugauuacgaccaucaucauuguuaucauugucauccugcuuucccugauugccguggggcuccugcuguauugcaaggccagaagcacacccgugacccuuucuaaagaucaacucuccggaaucaauaacaucgcuuucagcaauugaggacuaguguccaccugucccuccugggcugcuggauugucucguuuuccugccaaauaaacaggaucagcgcuuuacagaucuaaaaaaaaaaaaaaaaaaaaaaaaaaaaaaaaaaaaaaaaaaaaaaaaaaaaaaaaaaaaaaaaugcaucccccccccccccccccccccccccccccccaaaggcucuuuucagagccaccagaauu

SEQ ID NO: 3207 - RNA, 1916 nt, Artificial Sequence
  mRNA product Design c-1 comprising derived and/or modified sequence from HRSV(A2)__F_DSCav1_mut3 (opt6)
gggagaguccgcucagccagguugcagaagcggcuuagcguguguccuaaucuucucucugcguguagguaggccugugccgcaaacaagcuuaccauggaauuacucauacuaaaagccaaugccauaaccacuauucuaacagcaguaacauucuguuucgccucaggacaaaacauaacagaagaauuuuaucaauccaccuguuccgcagucucgaaaggcuaccuuggcgcacuaagaaccggaugguauacaucaguaauaaccauugaacuaucaaauaucaaagaaauaaaaugcaacggaacugacgcaaaagucaaacuaauaaaacaagaauuagacaaauacaaaaacgccguuacagacuuacaacuacuaaugcaaucaacuccagcaacaggaucaggaucugcuauaugcucaggugucgccguauguaaaguguuacaccucgaaggcgaaguaaacaaaauaaaaucagcacuacuauccacaaauaaagcaguaguaucacuauccaaugguguaucaguacucacauucaaaguacuagacuuaaaaaauuauauagauaaacaauuacuaccaauauuaaacaaacaaucaugcucaauaccaaacauagaaaccgucauugaauuucaacaaaaaaacaaucgacuucuugaaauaacacgagaauuuucaguaaaugccggaguaacaaccccagucucaacauacauguuaaccaacucugaacuccuaagccuaaucaacgacaugcccauaacuaacgaccaaaaaaaacuaauguccaauaauguccaaauaguaagacaacaauccuacucaauaaugugcauuauaaaagaagaaguccucgccuauguaguacaacuacccuuauacggaguaauugacacaccauguuggaaacuacauacaucaccacuaugcaccacuaacacaaaagaaggcuccaacauaugccuaacccgaacagaucgcggaugguauugcgacaacgcaggaaguguauccuucuuuccacaagcagaaacaugcaaaguacaauccaacagaguauucugugacaccaugaacucucuaacacuaccuuccgaaguaaauuuaugcaacguagacauauuuaaucccaaauacgacuguaaaauaaugaccucaaaaacugaugucucaucaucagucauuacaucacucggagcaauagucaguugcuauggaaaaaccaaaugcacagcuaguaacaaaaacagggguauaauaaaaacauuuucaaacggaugcgauuacguaucaaauaaaggaguagacaccguauccguaggaaauacucucuacugcguaaacaaacaagaaggacaaucccuauacguaaaaggcgaaccaaucauuaacuuuuacgacccacuuguauuuccaucagacgaauuugaugccucaauaucccaagucaaugaaaaaauaaaccaaagucuagcauucauccgaaaaucagaugaacuuuuacacaacguaaacgccggaaaaucaacaacaaacaucaugaucacaacaaucaucauaguaauaauaguuauacuacuuuccuuaauagcagucggccuacuacucuacugcaaagcacgauccacaccaguaaccuuaucuaaagaccaacucucaggcauaaacaacauagcauucucaaacuaaggacuaguguccaccugucccuccugggcugcuggauugucucguuuuccugccaaauaaacaggaucagcgcuuuacagaucuaaaaaaaaaaaaaaaaaaaaaaaaaaaaaaaaaaaaaaaaaaaaaaaaaaaaaaaaaaaaaaaaugcaucccccccccccccccccccccccccccccccaaaggcucuuuucagagccaccagaauu

SEQ ID NO: 3208 - RNA, 1916 nt, Artificial Sequence
  mRNA product Design c-1 comprising derived and/or modified sequence from HRSV(A2)__F_DSCav1_mut3 (opt11)
gggagaguccgcucagccagguugcagaagcggcuuagcguguguccuaaucuucucucugcguguagguaggccugugccgcaaacaagcuuaccauggaacuccucauccuuaaagcaaacgccaucacaaccauccucacagcagucacuuucugcuucgcauccggacaaaacaucacagaagaguucuaucaauccacgugcuccgcaguuuccaaaggauaccuuggagccuuacgaaccggcugguacaccuccgucaucaccauagaacucagcaacaucaaagaaaucaaaugcaacggaaccgacgcaaaagucaaacucaucaaacaagaacuagacaaauacaaaaacgcagucaccgaccuccaacuacucaugcaaucaacccccgcaaccggcuccggcuccgccaucugcuccggaguagccguaugcaaaguccuccaccucgaaggcgaaguuaacaagaucaaguccgcacuccuaucaaccaacaaagcagucgucucccuauccaacggcgucuccguauuaacauucaaaguccucgaccucaaaaacuacauagacaaacagcuacuccccauccuaaacaaacaauccugcuccauccccaacaucgaaacugucaucgaguuccaacagaaaaacaaccgccuccuagaaaucacccgagaguucuccguaaacgccggcgucacuacccccgucucuaccuauaugcuaaccaacucugaacuccuaucccuaaucaacgauaugcccauaacuaacgaccaaaagaaacuuauguccaacaacguacaaauaguccggcaacaaucauacucuaucaugugcaucaucaaagaagaaguacuugccuacguuguccaacucccacuauacggcgucauagacacuccaugcuggaaacuucacaccucaccccucugcaccacuaacacuaaagaaggcucuaacaucugccuuacccgcaccgaccgcggaugguacugcgacaacgcaggcucaguuagcuucuucccacaagccgaaaccugcaaaguccagucaaaccgugucuucugcgauaccaugaacucgcucacccucccuuccgaagucaaccucugcaacgucgacaucuucaaccccaaauacgacugcaaaaucaugaccucaaaaaccgacguaucuucuuccgucaucaccucccucggcgccaucguauccugcuacggcaaaaccaaaugcacugcaucaaacaaaaaccgaggcaucaucaaaaccuucucgaacggaugcgacuacguauccaacaagggcgucgacacagucuccguugguaacacccucuacugcgucaacaaacaagaaggccaaucccuauacguaaaaggcgaacccaucaucaacuucuacgacccccucgucuuccccagugacgaauuugacgccuccaucucccaagucaacgaaaagaucaaccaaucccuugccuucauacgcaaauccgacgaacuccuacacaacguuaacgccggaaaaucaacaaccaacaucaugaucacaaccaucauaaucgucauaaucgucauacuccucucccucauagccgucggccugcuauuguacuguaaagcccgcuccacaccagucacacuuucaaaagaccaacucuccgggaucaacaacaucgccuucuccaacuaaggacuaguguccaccugucccuccugggcugcuggauugucucguuuuccugccaaauaaacaggaucagcgcuuuacagaucuaaaaaaaaaaaaaaaaaaaaaaaaaaaaaaaaaaaaaaaaaaaaaaaaaaaaaaaaaaaaaaaaugcaucccccccccccccccccccccccccccccccaaaggcucuuuucagagccaccagaauu

SEQ ID NO: 3209 - RNA, 2006 nt, Artificial Sequence
  mRNA product Design c-2 comprising derived and/or modified sequence from HRSV(A2)__F_DSCav1_mut3 (opt1)
gggagacuccugucgggcggaaguaggaggaguagaguuuaaaaacaguacucuuuuuccgguucgggacguaguugaagcaacgacaagccggauaaccgcucuugagacaggaagcuuaccauggagcugcucauccugaaggccaacgccaucaccaccauccugacggcggugaccuucugcuucgccagcggccagaacaucaccgaggaguucuaccaguccacgugcagcgccgucuccaagggguaccucggcgcccugcggaccggcugguacaccuccgugaucaccaucgagcugagcaacaucaaggagaucaagugcaacgggaccgacgccaaggugaagcucaucaagcaggagcuggacaaguacaagaacgcggucacggaccugcagcuccugaugcaguccaccccggcaaccggcuccggcuccgccaucugcagcggcgucgccgugugcaaggugcugcaccucgagggggaggucaacaagaucaagagcgcccugcuguccaccaacaaggccguggugagccucuccaacggcgucagcgugcugaccuucaaggugcuggaccucaagaacuacaucgacaagcagcugcugcccauccugaacaagcagagcugcuccauccccaacaucgagacggugaucgaguuccagcagaagaacaaccggcuccuggagaucacccgcgaguucagcgugaacgccggggucaccacccccguguccacguacaugcugaccaacagcgagcuccugucccugaucaacgacaugccgaucaccaacgaccagaagaagcucaugagcaacaacgugcagaucguccggcagcaguccuacagcaucaugugcaucaucaaggaggaggugcuggcguacgugguccagcugccccucuacggcgugaucgacacccccugcuggaagcugcacacgagcccccugugcaccaccaacaccaaggagggguccaacaucugccucacgcgcaccgaccggggcugguacugcgacaacgccggcagcgucuccuucuucccgcaggccgagaccugcaaggugcagagcaaccgcguguucugcgacaccaugaacucccugacgcugcccagcgagguaaaccucugcaacgucgacaucuucaaccccaaguacgacugcaagaucaugaccuccaagaccgacgugagcuccagcgugaucaccucccugggggccaucgucagcugcuacggcaagacgaagugcaccgccagcaacaagaaccgggggaucaucaagaccuucuccaacggcugcgacuacgugagcaacaagggcguggacaccguguccgucgggaacacccuguacugcgugaacaagcaggagggccagagccucuacgugaagggggagcccaucaucaacuucuacgacccgcuggucuuccccuccgacgaguucgacgcgagcaucucccaggugaacgagaagaucaaccagagccuggccuucauccgcaaguccgacgagcugcuccacaacgugaacgccggcaagagcacgaccaacaucaugaucaccaccaucaucaucgucaucaucgugauccugcugucccucaucgccguggggcugcugcucuacugcaaggcccggagcacgcccgucacccuguccaaggaccagcugagcggcaucaacaacaucgcguucuccaacugaggacuaguggaagcauuuuccuggcugauuaaaagaaauuacucagcuauggucaucuguuccuguuagaaggcuaugcagcauauuauauacuaugcgcauguuaugaaaugcauaauaaaaaauuuuaaaaaaucuaaaagaucuaaaaaaaaaaaaaaaaaaaaaaaaaaaaaaaaaaaaaaaaaaaaaaaaaaaaaaaaaaaaaaaaugcaucccccccccccccccccccccccccccccccaaaggcucuuuucagagccaccagaauu

SEQ ID NO: 3210 - RNA, 2006 nt, Artificial Sequence
  mRNA product Design c-2 comprising derived and/or modified sequence from HRSV(A2)__F_DSCav1_mut3 (opt1)
gggagacuccugucgggcggaaguaggaggaguagaguuuaaaaacaguacucuuuuuccgguucgggacguaguugaagcaacgacaagccggauaaccgcucuugagacaggaagcuuaccauggagcugcucauccugaaggccaacgccaucaccaccauccugacggcggugaccuucugcuucgccagcggccagaacaucaccgaggaguucuaccaguccacgugcagcgccgucuccaagggguaccucggcgcccugcgcaccgggugguacaccagcgugaucaccaucgagcuguccaacaucaaggagaucaagugcaacggcaccgacgccaaggugaagcucaucaagcaggagcuggacaaguacaagaacgcggucacggaccugcagcuccugaugcagagcacccccgccaccggguccggcagcgccaucugcuccggcguggccgugugcaagguccugcaccucgagggggaggugaacaagaucaagagcgcgcugcuguccaccaacaaggccguggucagccucuccaacggcgugagcgugcugacguucaagguccuggaccucaagaacuacaucgacaagcagcugcugccgauccucaacaagcaguccugcagcauccccaacaucgagaccgugaucgaguuccagcagaagaacaaccggcugcuggagaucacccgcgaguucuccgugaacgccggggucaccacgcccgugagcaccuacaugcucaccaacuccgagcugcugagccucaucaacgacaugcccaucaccaacgaccagaagaagcugaugagcaacaacgugcagaucguccggcagcaguccuacagcaucaugugcaucaucaaggaggaggugcuggccuacgugguccagcucccgcuguacggcgugaucgacacgcccugcuggaagcugcacaccagcccccucugcaccaccaacacgaaggagggguccaacaucugccugacccgcaccgaccggggcugguacugcgacaacgccggcuccgugagcuucuucccccaggcggagaccugcaagguccaguccaaccgcguguucugcgacacgaugaacagccugacccucccguccgaggucaaccugugcaacguggacaucuucaaccccaaguacgacugcaagaucaugaccagcaagaccgacguguccagcuccgucaucacgagccugggggccaucguguccugcuacggcaagaccaagugcaccgccagcaacaagaaccgggggaucaucaagaccuucuccaacggcugcgacuacgugagcaacaagggcgucgacacgguguccguggggaacacccucuacugcgucaacaagcaggagggccagagccuguacgugaagggggagcccaucaucaacuucuacgacccccugguguucccgagcgacgaguucgacgccuccaucagccaggucaacgagaagaucaaccagucccucgccuucauccgcaagagcgacgagcugcugcacaacgugaacgcgggcaaguccaccaccaacaucaugaucaccacgaucaucaucgugaucaucgucauccuccugagccugaucgccguggggcuccugcuguacugcaaggcccgguccacccccgugacccugagcaaggaccagcucuccggcaucaacaacaucgccuucagcaacugaggacuaguggaagcauuuuccuggcugauuaaaagaaauuacucagcuauggucaucuguuccuguuagaaggcuaugcagcauauuauauacuaugcgcauguuaugaaaugcauaauaaaaaauuuuaaaaaaucuaaaagaucuaaaaaaaaaaaaaaaaaaaaaaaaaaaaaaaaaaaaaaaaaaaaaaaaaaaaaaaaaaaaaaaaugcaucccccccccccccccccccccccccccccccaaaggcucuuuucagagccaccagaauu

SEQ ID NO: 3211 - RNA, 2006 nt, Artificial Sequence
  mRNA product Design c-2 comprising derived and/or modified sequence from HRSV(A2)__F_DSCav1_mut3 (opt2)
gggagacuccugucgggcggaaguaggaggaguagaguuuaaaaacaguacucuuuuuccgguucgggacguaguugaagcaacgacaagccggauaaccgcucuugagacaggaagcuuaccauggagcuccucauccucaaggccaacgccaucaccaccauccucaccgccgucaccuucugcuucgccuccggccagaacaucaccgaggaguucuaccaguccaccugcuccgccgucuccaagggcuaccucggcgcccuccgcaccggcugguacaccuccgucaucaccaucgagcucuccaacaucaaggagaucaagugcaacggcaccgacgccaaggucaagcucaucaagcaggagcucgacaaguacaagaacgccgucaccgaccuccagcuccucaugcaguccacccccgccaccggcuccggcuccgccaucugcuccggcgucgccgucugcaagguccuccaccucgagggcgaggucaacaagaucaaguccgcccuccucuccaccaacaaggccgucgucucccucuccaacggcgucuccguccucaccuucaagguccucgaccucaagaacuacaucgacaagcagcuccuccccauccucaacaagcaguccugcuccauccccaacaucgagaccgucaucgaguuccagcagaagaacaaccgccuccucgagaucacccgcgaguucuccgucaacgccggcgucaccacccccgucuccaccuacaugcucaccaacuccgagcuccucucccucaucaacgacaugcccaucaccaacgaccagaagaagcucauguccaacaacguccagaucguccgccagcaguccuacuccaucaugugcaucaucaaggaggagguccucgccuacgucguccagcucccccucuacggcgucaucgacacccccugcuggaagcuccacaccuccccccucugcaccaccaacaccaaggagggcuccaacaucugccucacccgcaccgaccgcggcugguacugcgacaacgccggcuccgucuccuucuucccccaggccgagaccugcaagguccaguccaaccgcgucuucugcgacaccaugaacucccucacccuccccuccgaggucaaccucugcaacgucgacaucuucaaccccaaguacgacugcaagaucaugaccuccaagaccgacgucuccuccuccgucaucaccucccucggcgccaucgucuccugcuacggcaagaccaagugcaccgccuccaacaagaaccgcggcaucaucaagaccuucuccaacggcugcgacuacgucuccaacaagggcgucgacaccgucuccgucggcaacacccucuacugcgucaacaagcaggagggccagucccucuacgucaagggcgagcccaucaucaacuucuacgacccccucgucuuccccuccgacgaguucgacgccuccaucucccaggucaacgagaagaucaaccagucccucgccuucauccgcaaguccgacgagcuccuccacaacgucaacgccggcaaguccaccaccaacaucaugaucaccaccaucaucaucgucaucaucgucauccuccucucccucaucgccgucggccuccuccucuacugcaaggcccgcuccacccccgucacccucuccaaggaccagcucuccggcaucaacaacaucgccuucuccaacugaggacuaguggaagcauuuuccuggcugauuaaaagaaauuacucagcuauggucaucuguuccuguuagaaggcuaugcagcauauuauauacuaugcgcauguuaugaaaugcauaauaaaaaauuuuaaaaaaucuaaaagaucuaaaaaaaaaaaaaaaaaaaaaaaaaaaaaaaaaaaaaaaaaaaaaaaaaaaaaaaaaaaaaaaaugcaucccccccccccccccccccccccccccccccaaaggcucuuuucagagccaccagaauu

SEQ ID NO: 3212 - RNA, 2006 nt, Artificial Sequence
  mRNA product Design c-2 comprising derived and/or modified sequence from HRSV(A2)__F_DSCav1_mut3 (opt3)
gggagacuccugucgggcggaaguaggaggaguagaguuuaaaaacaguacucuuuuuccgguucgggacguaguugaagcaacgacaagccggauaaccgcucuugagacaggaagcuuaccauggagcugcucauccuuaaggccaacgcuauuaccacaauacugacugcagugacguucugcuuugccagcggccagaauaucaccgaagaguucuaccaauccacauguucugcggucucaaaaggguauuugggagcuuuaagaacugguugguacaccaguguuauuacaaucgaacugagcaacauuaaggagaucaaaugcaauggcaccgacgccaaggugaaacuaauaaagcaggaacucgauaaguauaaaaacgcaguaacugaccugcagcuucugaugcaguccacacccgccaccgggucuggaucggcuaucuguucaggcguggcagucugcaagguguugcaccucgagggugagguuaauaaaauuaagagcgcccugcugaguacgaacaaagcuguggucucccucucuaauggggugagcguauuaacuuuuaagguucuggaucuuaagaacuacaucgacaaacaauugcugccuauucuaaauaagcaguccuguucaaucccaaacauagaaaccgugauugaguuccagcagaaaaauaacaggcuccuggaaaucacacgggaguuuagugucaaugccggagugacuaccccggugagcacauauaugcuuaccaacucugagcuguugucccucauuaaugauaugcccaucacgaacgaccaaaagaaacugaugucaaacaauguccagaucguucgccagcagagcuacaguauuaugugcauaaucaaggaagagguguuagcguauguagugcaacugccucucuacggcgucauugauacuccauguuggaaacuucauacaucuccccugugcaccacuaacacaaaggaaggcuccaauaucuguuugacccgaacggaccgugggugguacugcgauaacgcaggaagcgugucguucuuuccucaggccgagaccuguaagguucagucuaauagaguguucugcgacacaaugaacucccuaacucugccaucagaagucaaucucugcaacguggauauauuuaaucccaaauaugacuguaagauuaugaccaguaaaacagauguaagcuccucuguuaucacuagccugggugcuaucgugucaugcuacggcaagaccaaauguacagccaguaacaagaauagggggauuaucaagaccuucuccaacggaugcgacuaugucagcaauaaaggcguggacacugucucuguggguaacacgcuuuacuguguuaauaagcaagaggggcagucacuguaugugaaaggagagccuauuauaaacuuuuacgauccauugguauucccgagugacgaauuugaugcaagcaucucccaggucaacgagaagauuaaucagucucucgcuuucauccggaaaucggacgaacuguuacacaacgugaaugccggcaagagcacaaccaacaucaugauuacuaccauaaucauuguuaucauugugauccugcuaucccucauagcggucggccugcuuuuguauugcaaggcccgcucaacacccgugacccugaguaaagaucaacucucugggaucaauaacauugcauucagcaauugaggacuaguggaagcauuuuccuggcugauuaaaagaaauuacucagcuauggucaucuguuccuguuagaaggcuaugcagcauauuauauacuaugcgcauguuaugaaaugcauaauaaaaaauuuuaaaaaaucuaaaagaucuaaaaaaaaaaaaaaaaaaaaaaaaaaaaaaaaaaaaaaaaaaaaaaaaaaaaaaaaaaaaaaaaugcaucccccccccccccccccccccccccccccccaaaggcucuuuucagagccaccagaauu

SEQ ID NO: 3213 - RNA, 2006 nt, Artificial Sequence
  mRNA product Design c-2 comprising derived and/or modified sequence from HRSV(A2)__F_DSCav1_mut3 (opt4)
gggagacuccugucgggcggaaguaggaggaguagaguuuaaaaacaguacucuuuuuccgguucgggacguaguugaagcaacgacaagccggauaaccgcucuugagacaggaagcuuaccauggagcugcugauccugaaggccaacgccaucaccaccauccugaccgccgugaccuucugcuucgccagcggccagaacaucaccgaggaguucuaccagagcaccugcagcgccgugagcaagggcuaccugggcgcccugagaaccggcugguacaccagcgugaucaccaucgagcugagcaacaucaaggagaucaagugcaacggcaccgacgccaaggugaagcugaucaagcaggagcuggacaaguacaagaacgccgugaccgaccugcagcugcugaugcagagcacccccgccaccggcagcggcagcgccaucugcagcggcguggccgugugcaaggugcugcaccuggagggcgaggugaacaagaucaagagcgcccugcugagcaccaacaaggccguggugagccugagcaacggcgugagcgugcugaccuucaaggugcuggaccugaagaacuacaucgacaagcagcugcugcccauccugaacaagcagagcugcagcauccccaacaucgagaccgugaucgaguuccagcagaagaacaacagacugcuggagaucaccagagaguucagcgugaacgccggcgugaccacccccgugagcaccuacaugcugaccaacagcgagcugcugagccugaucaacgacaugcccaucaccaacgaccagaagaagcugaugagcaacaacgugcagaucgugagacagcagagcuacagcaucaugugcaucaucaaggaggaggugcuggccuacguggugcagcugccccuguacggcgugaucgacacccccugcuggaagcugcacaccagcccccugugcaccaccaacaccaaggagggcagcaacaucugccugaccagaaccgacagaggcugguacugcgacaacgccggcagcgugagcuucuucccccaggccgagaccugcaaggugcagagcaacagaguguucugcgacaccaugaacagccugacccugcccagcgaggugaaccugugcaacguggacaucuucaaccccaaguacgacugcaagaucaugaccagcaagaccgacgugagcagcagcgugaucaccagccugggcgccaucgugagcugcuacggcaagaccaagugcaccgccagcaacaagaacagaggcaucaucaagaccuucagcaacggcugcgacuacgugagcaacaagggcguggacaccgugagcgugggcaacacccuguacugcgugaacaagcaggagggccagagccuguacgugaagggcgagcccaucaucaacuucuacgacccccugguguuccccagcgacgaguucgacgccagcaucagccaggugaacgagaagaucaaccagagccuggccuucaucagaaagagcgacgagcugcugcacaacgugaacgccggcaagagcaccaccaacaucaugaucaccaccaucaucaucgugaucaucgugauccugcugagccugaucgccgugggccugcugcuguacugcaaggccagaagcacccccgugacccugagcaaggaccagcugagcggcaucaacaacaucgccuucagcaacugaggacuaguggaagcauuuuccuggcugauuaaaagaaauuacucagcuauggucaucuguuccuguuagaaggcuaugcagcauauuauauacuaugcgcauguuaugaaaugcauaauaaaaaauuuuaaaaaaucuaaaagaucuaaaaaaaaaaaaaaaaaaaaaaaaaaaaaaaaaaaaaaaaaaaaaaaaaaaaaaaaaaaaaaaaugcaucccccccccccccccccccccccccccccccaaaggcucuuuucagagccaccagaauu

SEQ ID NO: 3214 - RNA, 2006 nt, Artificial Sequence
  mRNA product Design c-2 comprising derived and/or modified sequence from HRSV(A2)__F_DSCav1_mut3 (opt5)
gggagacuccugucgggcggaaguaggaggaguagaguuuaaaaacaguacucuuuuuccgguucgggacguaguugaagcaacgacaagccggauaaccgcucuugagacaggaagcuuaccauggagcugcucauccugaaggccaacgcuauuaccacaauccuuacggccgugaccuucugcuuugcgagcggccagaauauuacagaagaguucuaccaauccaccuguucugcugucagcaaaggguaucugggagcccucagaacaggcugguacaccuccguuaucacaauugaacugucuaacaucaaggagaucaaaugcaaugggaccgacgccaaggugaaacuuauuaagcaggaacuggauaaguauaaaaacgcugugacggaccuccagcugcugaugcagagcacccccgccacaggauccggcucugcuaucuguagcggggucgccgugugcaagguucuccaccuggagggagaggugaauaaaauuaaguccgcgcuucugagcaccaacaaagccgucgugucucucuccaauggcguuagcgugcugacauuuaagguccuugaucugaagaacuacaucgacaaacaacuccugccuauucugaauaagcagucuuguuccaucccgaacauugaaaccgugaucgaguuccagcagaaaaauaaccggcuccuggaaaucacgcgcgaguuuagcgugaaugcuggcgucacaacccccguuucuacauauaugcuuaccaacuccgagcugcucagccugauuaaugauaugccuaucaccaacgaccaaaagaaacuuauguccaacaaugugcagauugugagacagcagucuuacagcaucaugugcauuaucaaggaagagguccuggccuaugugguucaacucccccuguacggggugaucgauacaccuuguuggaaacugcauacgagcccccucugcaccacaaacaccaaggaaggauccaauauuugucugacacggaccgaccgcggcugguacugcgauaacgcugggucugucuccuucuuuccucaggccgagacguguaaggugcagagcaauagaguuuucugcgacacaaugaacucucuuacccugccgagcgaagugaaucucugcaacgucgauaucuuuaaucccaaauaugacuguaagauuaugaccuccaaaacagaugugucuagcuccgucaucaccagccugggagcgauugugucuugcuacggcaagacaaaauguacggccuccaacaagaaucgggggaucaucaagaccuucagcaacggaugcgacuauguuucuaauaaaggcguggacacagucuccgugggcaacacccuuuacuguguuaauaagcaagaggggcagagccuguaugugaaaggagagccuauuaucaacuuuuacgauccccucgucuucccuuccgacgaauuugaugcuucuauuagccaggugaacgagaagaucaaucagucccuggccuucauucgcaaaucugacgaacugcuccacaacgugaaugcuggcaagagcacaaccaacaucaugauuacgaccaucaucauuguuaucauugucauccugcuuucccugauugccguggggcuccugcuguauugcaaggccagaagcacacccgugacccuuucuaaagaucaacucuccggaaucaauaacaucgcuuucagcaauugaggacuaguggaagcauuuuccuggcugauuaaaagaaauuacucagcuauggucaucuguuccuguuagaaggcuaugcagcauauuauauacuaugcgcauguuaugaaaugcauaauaaaaaauuuuaaaaaaucuaaaagaucuaaaaaaaaaaaaaaaaaaaaaaaaaaaaaaaaaaaaaaaaaaaaaaaaaaaaaaaaaaaaaaaaugcaucccccccccccccccccccccccccccccccaaaggcucuuuucagagccaccagaauu

SEQ ID NO: 3215 - RNA, 2006 nt, Artificial Sequence
  mRNA product Design c-2 comprising derived and/or modified sequence from HRSV(A2)__F_DSCav1_mut3 (opt6)
gggagacuccugucgggcggaaguaggaggaguagaguuuaaaaacaguacucuuuuuccgguucgggacguaguugaagcaacgacaagccggauaaccgcucuugagacaggaagcuuaccauggaauuacucauacuaaaagccaaugccauaaccacuauucuaacagcaguaacauucuguuucgccucaggacaaaacauaacagaagaauuuuaucaauccaccuguuccgcagucucgaaaggcuaccuuggcgcacuaagaaccggaugguauacaucaguaauaaccauugaacuaucaaauaucaaagaaauaaaaugcaacggaacugacgcaaaagucaaacuaauaaaacaagaauuagacaaauacaaaaacgccguuacagacuuacaacuacuaaugcaaucaacuccagcaacaggaucaggaucugcuauaugcucaggugucgccguauguaaaguguuacaccucgaaggcgaaguaaacaaaauaaaaucagcacuacuauccacaaauaaagcaguaguaucacuauccaaugguguaucaguacucacauucaaaguacuagacuuaaaaaauuauauagauaaacaauuacuaccaauauuaaacaaacaaucaugcucaauaccaaacauagaaaccgucauugaauuucaacaaaaaaacaaucgacuucuugaaauaacacgagaauuuucaguaaaugccggaguaacaaccccagucucaacauacauguuaaccaacucugaacuccuaagccuaaucaacgacaugcccauaacuaacgaccaaaaaaaacuaauguccaauaauguccaaauaguaagacaacaauccuacucaauaaugugcauuauaaaagaagaaguccucgccuauguaguacaacuacccuuauacggaguaauugacacaccauguuggaaacuacauacaucaccacuaugcaccacuaacacaaaagaaggcuccaacauaugccuaacccgaacagaucgcggaugguauugcgacaacgcaggaaguguauccuucuuuccacaagcagaaacaugcaaaguacaauccaacagaguauucugugacaccaugaacucucuaacacuaccuuccgaaguaaauuuaugcaacguagacauauuuaaucccaaauacgacuguaaaauaaugaccucaaaaacugaugucucaucaucagucauuacaucacucggagcaauagucaguugcuauggaaaaaccaaaugcacagcuaguaacaaaaacagggguauaauaaaaacauuuucaaacggaugcgauuacguaucaaauaaaggaguagacaccguauccguaggaaauacucucuacugcguaaacaaacaagaaggacaaucccuauacguaaaaggcgaaccaaucauuaacuuuuacgacccacuuguauuuccaucagacgaauuugaugccucaauaucccaagucaaugaaaaaauaaaccaaagucuagcauucauccgaaaaucagaugaacuuuuacacaacguaaacgccggaaaaucaacaacaaacaucaugaucacaacaaucaucauaguaauaauaguuauacuacuuuccuuaauagcagucggccuacuacucuacugcaaagcacgauccacaccaguaaccuuaucuaaagaccaacucucaggcauaaacaacauagcauucucaaacuaaggacuaguggaagcauuuuccuggcugauuaaaagaaauuacucagcuauggucaucuguuccuguuagaaggcuaugcagcauauuauauacuaugcgcauguuaugaaaugcauaauaaaaaauuuuaaaaaaucuaaaagaucuaaaaaaaaaaaaaaaaaaaaaaaaaaaaaaaaaaaaaaaaaaaaaaaaaaaaaaaaaaaaaaaaugcaucccccccccccccccccccccccccccccccaaaggcucuuuucagagccaccagaauu

SEQ ID NO: 3216 - RNA, 2006 nt, Artificial Sequence
  mRNA product Design c-2 comprising derived and/or modified sequence from HRSV(A2)__F_DSCav1_mut3 (opt11)
gggagacuccugucgggcggaaguaggaggaguagaguuuaaaaacaguacucuuuuuccgguucgggacguaguugaagcaacgacaagccggauaaccgcucuugagacaggaagcuuaccauggaacuccucauccuuaaagcaaacgccaucacaaccauccucacagcagucacuuucugcuucgcauccggacaaaacaucacagaagaguucuaucaauccacgugcuccgcaguuuccaaaggauaccuuggagccuuacgaaccggcugguacaccuccgucaucaccauagaacucagcaacaucaaagaaaucaaaugcaacggaaccgacgcaaaagucaaacucaucaaacaagaacuagacaaauacaaaaacgcagucaccgaccuccaacuacucaugcaaucaacccccgcaaccggcuccggcuccgccaucugcuccggaguagccguaugcaaaguccuccaccucgaaggcgaaguuaacaagaucaaguccgcacuccuaucaaccaacaaagcagucgucucccuauccaacggcgucuccguauuaacauucaaaguccucgaccucaaaaacuacauagacaaacagcuacuccccauccuaaacaaacaauccugcuccauccccaacaucgaaacugucaucgaguuccaacagaaaaacaaccgccuccuagaaaucacccgagaguucuccguaaacgccggcgucacuacccccgucucuaccuauaugcuaaccaacucugaacuccuaucccuaaucaacgauaugcccauaacuaacgaccaaaagaaacuuauguccaacaacguacaaauaguccggcaacaaucauacucuaucaugugcaucaucaaagaagaaguacuugccuacguuguccaacucccacuauacggcgucauagacacuccaugcuggaaacuucacaccucaccccucugcaccacuaacacuaaagaaggcucuaacaucugccuuacccgcaccgaccgcggaugguacugcgacaacgcaggcucaguuagcuucuucccacaagccgaaaccugcaaaguccagucaaaccgugucuucugcgauaccaugaacucgcucacccucccuuccgaagucaaccucugcaacgucgacaucuucaaccccaaauacgacugcaaaaucaugaccucaaaaaccgacguaucuucuuccgucaucaccucccucggcgccaucguauccugcuacggcaaaaccaaaugcacugcaucaaacaaaaaccgaggcaucaucaaaaccuucucgaacggaugcgacuacguauccaacaagggcgucgacacagucuccguugguaacacccucuacugcgucaacaaacaagaaggccaaucccuauacguaaaaggcgaacccaucaucaacuucuacgacccccucgucuuccccagugacgaauuugacgccuccaucucccaagucaacgaaaagaucaaccaaucccuugccuucauacgcaaauccgacgaacuccuacacaacguuaacgccggaaaaucaacaaccaacaucaugaucacaaccaucauaaucgucauaaucgucauacuccucucccucauagccgucggccugcuauuguacuguaaagcccgcuccacaccagucacacuuucaaaagaccaacucuccgggaucaacaacaucgccuucuccaacuaaggacuaguggaagcauuuuccuggcugauuaaaagaaauuacucagcuauggucaucuguuccuguuagaaggcuaugcagcauauuauauacuaugcgcauguuaugaaaugcauaauaaaaaauuuuaaaaaaucuaaaagaucuaaaaaaaaaaaaaaaaaaaaaaaaaaaaaaaaaaaaaaaaaaaaaaaaaaaaaaaaaaaaaaaaugcaucccccccccccccccccccccccccccccccaaaggcucuuuucagagccaccagaauu

SEQ ID NO: 3217 - RNA, 1983 nt, Artificial Sequence
  mRNA product Design c-3 comprising derived and/or modified sequence from HRSV(A2)__F_DSCav1_mut3 (opt1)
gggagaguccgcucagccagguugcagaagcggcuuagcguguguccuaaucuucucucugcguguagguaggccugugccgcaaacaagcuuaccauggagcugcucauccugaaggccaacgccaucaccaccauccugacggcggugaccuucugcuucgccagcggccagaacaucaccgaggaguucuaccaguccacgugcagcgccgucuccaagggguaccucggcgcccugcggaccggcugguacaccuccgugaucaccaucgagcugagcaacaucaaggagaucaagugcaacgggaccgacgccaaggugaagcucaucaagcaggagcuggacaaguacaagaacgcggucacggaccugcagcuccugaugcaguccaccccggcaaccggcuccggcuccgccaucugcagcggcgucgccgugugcaaggugcugcaccucgagggggaggucaacaagaucaagagcgcccugcuguccaccaacaaggccguggugagccucuccaacggcgucagcgugcugaccuucaaggugcuggaccucaagaacuacaucgacaagcagcugcugcccauccugaacaagcagagcugcuccauccccaacaucgagacggugaucgaguuccagcagaagaacaaccggcuccuggagaucacccgcgaguucagcgugaacgccggggucaccacccccguguccacguacaugcugaccaacagcgagcuccugucccugaucaacgacaugccgaucaccaacgaccagaagaagcucaugagcaacaacgugcagaucguccggcagcaguccuacagcaucaugugcaucaucaaggaggaggugcuggcguacgugguccagcugccccucuacggcgugaucgacacccccugcuggaagcugcacacgagcccccugugcaccaccaacaccaaggagggguccaacaucugccucacgcgcaccgaccggggcugguacugcgacaacgccggcagcgucuccuucuucccgcaggccgagaccugcaaggugcagagcaaccgcguguucugcgacaccaugaacucccugacgcugcccagcgagguaaaccucugcaacgucgacaucuucaaccccaaguacgacugcaagaucaugaccuccaagaccgacgugagcuccagcgugaucaccucccugggggccaucgucagcugcuacggcaagacgaagugcaccgccagcaacaagaaccgggggaucaucaagaccuucuccaacggcugcgacuacgugagcaacaagggcguggacaccguguccgucgggaacacccuguacugcgugaacaagcaggagggccagagccucuacgugaagggggagcccaucaucaacuucuacgacccgcuggucuuccccuccgacgaguucgacgcgagcaucucccaggugaacgagaagaucaaccagagccuggccuucauccgcaaguccgacgagcugcuccacaacgugaacgccggcaagagcacgaccaacaucaugaucaccaccaucaucaucgucaucaucgugauccugcugucccucaucgccguggggcugcugcucuacugcaaggcccggagcacgcccgucacccuguccaaggaccagcugagcggcaucaacaacaucgcguucuccaacugaggacuaguacuggcugcaucucccuuuccucuguccuccauccuucucccaggauggugaagggggaccugguacccagugauccccaccccaggauccuaaaucaugacuuaccugcuaauaaaaacucauuggaaaagugagaagaucuaaaaaaaaaaaaaaaaaaaaaaaaaaaaaaaaaaaaaaaaaaaaaaaaaaaaaaaaaaaaaaaaugcaucccccccccccccccccccccccccccccccaaaggcucuuuucagagccaccagaauu

SEQ ID NO: 3218 - RNA, 1983 nt, Artificial Sequence
  mRNA product Design c-3 comprising derived and/or modified sequence from HRSV(A2)__F_DSCav1_mut3 (opt1)
gggagaguccgcucagccagguugcagaagcggcuuagcguguguccuaaucuucucucugcguguagguaggccugugccgcaaacaagcuuaccauggagcugcucauccugaaggccaacgccaucaccaccauccugacggcggugaccuucugcuucgccagcggccagaacaucaccgaggaguucuaccaguccacgugcagcgccgucuccaagggguaccucggcgcccugcgcaccgggugguacaccagcgugaucaccaucgagcuguccaacaucaaggagaucaagugcaacggcaccgacgccaaggugaagcucaucaagcaggagcuggacaaguacaagaacgcggucacggaccugcagcuccugaugcagagcacccccgccaccggguccggcagcgccaucugcuccggcguggccgugugcaagguccugcaccucgagggggaggugaacaagaucaagagcgcgcugcuguccaccaacaaggccguggucagccucuccaacggcgugagcgugcugacguucaagguccuggaccucaagaacuacaucgacaagcagcugcugccgauccucaacaagcaguccugcagcauccccaacaucgagaccgugaucgaguuccagcagaagaacaaccggcugcuggagaucacccgcgaguucuccgugaacgccggggucaccacgcccgugagcaccuacaugcucaccaacuccgagcugcugagccucaucaacgacaugcccaucaccaacgaccagaagaagcugaugagcaacaacgugcagaucguccggcagcaguccuacagcaucaugugcaucaucaaggaggaggugcuggccuacgugguccagcucccgcuguacggcgugaucgacacgcccugcuggaagcugcacaccagcccccucugcaccaccaacacgaaggagggguccaacaucugccugacccgcaccgaccggggcugguacugcgacaacgccggcuccgugagcuucuucccccaggcggagaccugcaagguccaguccaaccgcguguucugcgacacgaugaacagccugacccucccguccgaggucaaccugugcaacguggacaucuucaaccccaaguacgacugcaagaucaugaccagcaagaccgacguguccagcuccgucaucacgagccugggggccaucguguccugcuacggcaagaccaagugcaccgccagcaacaagaaccgggggaucaucaagaccuucuccaacggcugcgacuacgugagcaacaagggcgucgacacgguguccguggggaacacccucuacugcgucaacaagcaggagggccagagccuguacgugaagggggagcccaucaucaacuucuacgacccccugguguucccgagcgacgaguucgacgccuccaucagccaggucaacgagaagaucaaccagucccucgccuucauccgcaagagcgacgagcugcugcacaacgugaacgcgggcaaguccaccaccaacaucaugaucaccacgaucaucaucgugaucaucgucauccuccugagccugaucgccguggggcuccugcuguacugcaaggcccgguccacccccgugacccugagcaaggaccagcucuccggcaucaacaacaucgccuucagcaacugaggacuaguacuggcugcaucucccuuuccucuguccuccauccuucucccaggauggugaagggggaccugguacccagugauccccaccccaggauccuaaaucaugacuuaccugcuaauaaaaacucauuggaaaagugagaagaucuaaaaaaaaaaaaaaaaaaaaaaaaaaaaaaaaaaaaaaaaaaaaaaaaaaaaaaaaaaaaaaaaugcaucccccccccccccccccccccccccccccccaaaggcucuuuucagagccaccagaauu

SEQ ID NO: 3219 - RNA, 1983 nt, Artificial Sequence
  mRNA product Design c-3 comprising derived and/or modified sequence from HRSV(A2)__F_DSCav1_mut3 (opt2)
gggagaguccgcucagccagguugcagaagcggcuuagcguguguccuaaucuucucucugcguguagguaggccugugccgcaaacaagcuuaccauggagcuccucauccucaaggccaacgccaucaccaccauccucaccgccgucaccuucugcuucgccuccggccagaacaucaccgaggaguucuaccaguccaccugcuccgccgucuccaagggcuaccucggcgcccuccgcaccggcugguacaccuccgucaucaccaucgagcucuccaacaucaaggagaucaagugcaacggcaccgacgccaaggucaagcucaucaagcaggagcucgacaaguacaagaacgccgucaccgaccuccagcuccucaugcaguccacccccgccaccggcuccggcuccgccaucugcuccggcgucgccgucugcaagguccuccaccucgagggcgaggucaacaagaucaaguccgcccuccucuccaccaacaaggccgucgucucccucuccaacggcgucuccguccucaccuucaagguccucgaccucaagaacuacaucgacaagcagcuccuccccauccucaacaagcaguccugcuccauccccaacaucgagaccgucaucgaguuccagcagaagaacaaccgccuccucgagaucacccgcgaguucuccgucaacgccggcgucaccacccccgucuccaccuacaugcucaccaacuccgagcuccucucccucaucaacgacaugcccaucaccaacgaccagaagaagcucauguccaacaacguccagaucguccgccagcaguccuacuccaucaugugcaucaucaaggaggagguccucgccuacgucguccagcucccccucuacggcgucaucgacacccccugcuggaagcuccacaccuccccccucugcaccaccaacaccaaggagggcuccaacaucugccucacccgcaccgaccgcggcugguacugcgacaacgccggcuccgucuccuucuucccccaggccgagaccugcaagguccaguccaaccgcgucuucugcgacaccaugaacucccucacccuccccuccgaggucaaccucugcaacgucgacaucuucaaccccaaguacgacugcaagaucaugaccuccaagaccgacgucuccuccuccgucaucaccucccucggcgccaucgucuccugcuacggcaagaccaagugcaccgccuccaacaagaaccgcggcaucaucaagaccuucuccaacggcugcgacuacgucuccaacaagggcgucgacaccgucuccgucggcaacacccucuacugcgucaacaagcaggagggccagucccucuacgucaagggcgagcccaucaucaacuucuacgacccccucgucuuccccuccgacgaguucgacgccuccaucucccaggucaacgagaagaucaaccagucccucgccuucauccgcaaguccgacgagcuccuccacaacgucaacgccggcaaguccaccaccaacaucaugaucaccaccaucaucaucgucaucaucgucauccuccucucccucaucgccgucggccuccuccucuacugcaaggcccgcuccacccccgucacccucuccaaggaccagcucuccggcaucaacaacaucgccuucuccaacugaggacuaguacuggcugcaucucccuuuccucuguccuccauccuucucccaggauggugaagggggaccugguacccagugauccccaccccaggauccuaaaucaugacuuaccugcuaauaaaaacucauuggaaaagugagaagaucuaaaaaaaaaaaaaaaaaaaaaaaaaaaaaaaaaaaaaaaaaaaaaaaaaaaaaaaaaaaaaaaaugcaucccccccccccccccccccccccccccccccaaaggcucuuuucagagccaccagaauu

SEQ ID NO: 3220 - RNA, 1983 nt, Artificial Sequence
  mRNA product Design c-3 comprising derived and/or modified sequence from HRSV(A2)__F_DSCav1_mut3 (opt3)
gggagaguccgcucagccagguugcagaagcggcuuagcguguguccuaaucuucucucugcguguagguaggccugugccgcaaacaagcuuaccauggagcugcucauccuuaaggccaacgcuauuaccacaauacugacugcagugacguucugcuuugccagcggccagaauaucaccgaagaguucuaccaauccacauguucugcggucucaaaaggguauuugggagcuuuaagaacugguugguacaccaguguuauuacaaucgaacugagcaacauuaaggagaucaaaugcaauggcaccgacgccaaggugaaacuaauaaagcaggaacucgauaaguauaaaaacgcaguaacugaccugcagcuucugaugcaguccacacccgccaccgggucuggaucggcuaucuguucaggcguggcagucugcaagguguugcaccucgagggugagguuaauaaaauuaagagcgcccugcugaguacgaacaaagcuguggucucccucucuaauggggugagcguauuaacuuuuaagguucuggaucuuaagaacuacaucgacaaacaauugcugccuauucuaaauaagcaguccuguucaaucccaaacauagaaaccgugauugaguuccagcagaaaaauaacaggcuccuggaaaucacacgggaguuuagugucaaugccggagugacuaccccggugagcacauauaugcuuaccaacucugagcuguugucccucauuaaugauaugcccaucacgaacgaccaaaagaaacugaugucaaacaauguccagaucguucgccagcagagcuacaguauuaugugcauaaucaaggaagagguguuagcguauguagugcaacugccucucuacggcgucauugauacuccauguuggaaacuucauacaucuccccugugcaccacuaacacaaaggaaggcuccaauaucuguuugacccgaacggaccgugggugguacugcgauaacgcaggaagcgugucguucuuuccucaggccgagaccuguaagguucagucuaauagaguguucugcgacacaaugaacucccuaacucugccaucagaagucaaucucugcaacguggauauauuuaaucccaaauaugacuguaagauuaugaccaguaaaacagauguaagcuccucuguuaucacuagccugggugcuaucgugucaugcuacggcaagaccaaauguacagccaguaacaagaauagggggauuaucaagaccuucuccaacggaugcgacuaugucagcaauaaaggcguggacacugucucuguggguaacacgcuuuacuguguuaauaagcaagaggggcagucacuguaugugaaaggagagccuauuauaaacuuuuacgauccauugguauucccgagugacgaauuugaugcaagcaucucccaggucaacgagaagauuaaucagucucucgcuuucauccggaaaucggacgaacuguuacacaacgugaaugccggcaagagcacaaccaacaucaugauuacuaccauaaucauuguuaucauugugauccugcuaucccucauagcggucggccugcuuuuguauugcaaggcccgcucaacacccgugacccugaguaaagaucaacucucugggaucaauaacauugcauucagcaauugaggacuaguacuggcugcaucucccuuuccucuguccuccauccuucucccaggauggugaagggggaccugguacccagugauccccaccccaggauccuaaaucaugacuuaccugcuaauaaaaacucauuggaaaagugagaagaucuaaaaaaaaaaaaaaaaaaaaaaaaaaaaaaaaaaaaaaaaaaaaaaaaaaaaaaaaaaaaaaaaugcaucccccccccccccccccccccccccccccccaaaggcucuuuucagagccaccagaauu

SEQ ID NO: 3221 - RNA, 1983 nt, Artificial Sequence
  mRNA product Design c-3 comprising derived and/or modified sequence from HRSV(A2)__F_DSCav1_mut3 (opt4)
gggagaguccgcucagccagguugcagaagcggcuuagcguguguccuaaucuucucucugcguguagguaggccugugccgcaaacaagcuuaccauggagcugcugauccugaaggccaacgccaucaccaccauccugaccgccgugaccuucugcuucgccagcggccagaacaucaccgaggaguucuaccagagcaccugcagcgccgugagcaagggcuaccugggcgcccugagaaccggcugguacaccagcgugaucaccaucgagcugagcaacaucaaggagaucaagugcaacggcaccgacgccaaggugaagcugaucaagcaggagcuggacaaguacaagaacgccgugaccgaccugcagcugcugaugcagagcacccccgccaccggcagcggcagcgccaucugcagcggcguggccgugugcaaggugcugcaccuggagggcgaggugaacaagaucaagagcgcccugcugagcaccaacaaggccguggugagccugagcaacggcgugagcgugcugaccuucaaggugcuggaccugaagaacuacaucgacaagcagcugcugcccauccugaacaagcagagcugcagcauccccaacaucgagaccgugaucgaguuccagcagaagaacaacagacugcuggagaucaccagagaguucagcgugaacgccggcgugaccacccccgugagcaccuacaugcugaccaacagcgagcugcugagccugaucaacgacaugcccaucaccaacgaccagaagaagcugaugagcaacaacgugcagaucgugagacagcagagcuacagcaucaugugcaucaucaaggaggaggugcuggccuacguggugcagcugccccuguacggcgugaucgacacccccugcuggaagcugcacaccagcccccugugcaccaccaacaccaaggagggcagcaacaucugccugaccagaaccgacagaggcugguacugcgacaacgccggcagcgugagcuucuucccccaggccgagaccugcaaggugcagagcaacagaguguucugcgacaccaugaacagccugacccugcccagcgaggugaaccugugcaacguggacaucuucaaccccaaguacgacugcaagaucaugaccagcaagaccgacgugagcagcagcgugaucaccagccugggcgccaucgugagcugcuacggcaagaccaagugcaccgccagcaacaagaacagaggcaucaucaagaccuucagcaacggcugcgacuacgugagcaacaagggcguggacaccgugagcgugggcaacacccuguacugcgugaacaagcaggagggccagagccuguacgugaagggcgagcccaucaucaacuucuacgacccccugguguuccccagcgacgaguucgacgccagcaucagccaggugaacgagaagaucaaccagagccuggccuucaucagaaagagcgacgagcugcugcacaacgugaacgccggcaagagcaccaccaacaucaugaucaccaccaucaucaucgugaucaucgugauccugcugagccugaucgccgugggccugcugcuguacugcaaggccagaagcacccccgugacccugagcaaggaccagcugagcggcaucaacaacaucgccuucagcaacugaggacuaguacuggcugcaucucccuuuccucuguccuccauccuucucccaggauggugaagggggaccugguacccagugauccccaccccaggauccuaaaucaugacuuaccugcuaauaaaaacucauuggaaaagugagaagaucuaaaaaaaaaaaaaaaaaaaaaaaaaaaaaaaaaaaaaaaaaaaaaaaaaaaaaaaaaaaaaaaaugcaucccccccccccccccccccccccccccccccaaaggcucuuuucagagccaccagaauu

SEQ ID NO: 3222 - RNA, 1983 nt, Artificial Sequence
  mRNA product Design c-3 comprising derived and/or modified sequence from HRSV(A2)__F_DSCav1_mut3 (opt5)
gggagaguccgcucagccagguugcagaagcggcuuagcguguguccuaaucuucucucugcguguagguaggccugugccgcaaacaagcuuaccauggagcugcucauccugaaggccaacgcuauuaccacaauccuuacggccgugaccuucugcuuugcgagcggccagaauauuacagaagaguucuaccaauccaccuguucugcugucagcaaaggguaucugggagcccucagaacaggcugguacaccuccguuaucacaauugaacugucuaacaucaaggagaucaaaugcaaugggaccgacgccaaggugaaacuuauuaagcaggaacuggauaaguauaaaaacgcugugacggaccuccagcugcugaugcagagcacccccgccacaggauccggcucugcuaucuguagcggggucgccgugugcaagguucuccaccuggagggagaggugaauaaaauuaaguccgcgcuucugagcaccaacaaagccgucgugucucucuccaauggcguuagcgugcugacauuuaagguccuugaucugaagaacuacaucgacaaacaacuccugccuauucugaauaagcagucuuguuccaucccgaacauugaaaccgugaucgaguuccagcagaaaaauaaccggcuccuggaaaucacgcgcgaguuuagcgugaaugcuggcgucacaacccccguuucuacauauaugcuuaccaacuccgagcugcucagccugauuaaugauaugccuaucaccaacgaccaaaagaaacuuauguccaacaaugugcagauugugagacagcagucuuacagcaucaugugcauuaucaaggaagagguccuggccuaugugguucaacucccccuguacggggugaucgauacaccuuguuggaaacugcauacgagcccccucugcaccacaaacaccaaggaaggauccaauauuugucugacacggaccgaccgcggcugguacugcgauaacgcugggucugucuccuucuuuccucaggccgagacguguaaggugcagagcaauagaguuuucugcgacacaaugaacucucuuacccugccgagcgaagugaaucucugcaacgucgauaucuuuaaucccaaauaugacuguaagauuaugaccuccaaaacagaugugucuagcuccgucaucaccagccugggagcgauugugucuugcuacggcaagacaaaauguacggccuccaacaagaaucgggggaucaucaagaccuucagcaacggaugcgacuauguuucuaauaaaggcguggacacagucuccgugggcaacacccuuuacuguguuaauaagcaagaggggcagagccuguaugugaaaggagagccuauuaucaacuuuuacgauccccucgucuucccuuccgacgaauuugaugcuucuauuagccaggugaacgagaagaucaaucagucccuggccuucauucgcaaaucugacgaacugcuccacaacgugaaugcuggcaagagcacaaccaacaucaugauuacgaccaucaucauuguuaucauugucauccugcuuucccugauugccguggggcuccugcuguauugcaaggccagaagcacacccgugacccuuucuaaagaucaacucuccggaaucaauaacaucgcuuucagcaauugaggacuaguacuggcugcaucucccuuuccucuguccuccauccuucucccaggauggugaagggggaccugguacccagugauccccaccccaggauccuaaaucaugacuuaccugcuaauaaaaacucauuggaaaagugagaagaucuaaaaaaaaaaaaaaaaaaaaaaaaaaaaaaaaaaaaaaaaaaaaaaaaaaaaaaaaaaaaaaaaugcaucccccccccccccccccccccccccccccccaaaggcucuuuucagagccaccagaauu

SEQ ID NO: 3223 - RNA, 1983 nt, Artificial Sequence
  mRNA product Design c-3 comprising derived and/or modified sequence from HRSV(A2)__F_DSCav1_mut3 (opt6)
gggagaguccgcucagccagguugcagaagcggcuuagcguguguccuaaucuucucucugcguguagguaggccugugccgcaaacaagcuuaccauggaauuacucauacuaaaagccaaugccauaaccacuauucuaacagcaguaacauucuguuucgccucaggacaaaacauaacagaagaauuuuaucaauccaccuguuccgcagucucgaaaggcuaccuuggcgcacuaagaaccggaugguauacaucaguaauaaccauugaacuaucaaauaucaaagaaauaaaaugcaacggaacugacgcaaaagucaaacuaauaaaacaagaauuagacaaauacaaaaacgccguuacagacuuacaacuacuaaugcaaucaacuccagcaacaggaucaggaucugcuauaugcucaggugucgccguauguaaaguguuacaccucgaaggcgaaguaaacaaaauaaaaucagcacuacuauccacaaauaaagcaguaguaucacuauccaaugguguaucaguacucacauucaaaguacuagacuuaaaaaauuauauagauaaacaauuacuaccaauauuaaacaaacaaucaugcucaauaccaaacauagaaaccgucauugaauuucaacaaaaaaacaaucgacuucuugaaauaacacgagaauuuucaguaaaugccggaguaacaaccccagucucaacauacauguuaaccaacucugaacuccuaagccuaaucaacgacaugcccauaacuaacgaccaaaaaaaacuaauguccaauaauguccaaauaguaagacaacaauccuacucaauaaugugcauuauaaaagaagaaguccucgccuauguaguacaacuacccuuauacggaguaauugacacaccauguuggaaacuacauacaucaccacuaugcaccacuaacacaaaagaaggcuccaacauaugccuaacccgaacagaucgcggaugguauugcgacaacgcaggaaguguauccuucuuuccacaagcagaaacaugcaaaguacaauccaacagaguauucugugacaccaugaacucucuaacacuaccuuccgaaguaaauuuaugcaacguagacauauuuaaucccaaauacgacuguaaaauaaugaccucaaaaacugaugucucaucaucagucauuacaucacucggagcaauagucaguugcuauggaaaaaccaaaugcacagcuaguaacaaaaacagggguauaauaaaaacauuuucaaacggaugcgauuacguaucaaauaaaggaguagacaccguauccguaggaaauacucucuacugcguaaacaaacaagaaggacaaucccuauacguaaaaggcgaaccaaucauuaacuuuuacgacccacuuguauuuccaucagacgaauuugaugccucaauaucccaagucaaugaaaaaauaaaccaaagucuagcauucauccgaaaaucagaugaacuuuuacacaacguaaacgccggaaaaucaacaacaaacaucaugaucacaacaaucaucauaguaauaauaguuauacuacuuuccuuaauagcagucggccuacuacucuacugcaaagcacgauccacaccaguaaccuuaucuaaagaccaacucucaggcauaaacaacauagcauucucaaacuaaggacuaguacuggcugcaucucccuuuccucuguccuccauccuucucccaggauggugaagggggaccugguacccagugauccccaccccaggauccuaaaucaugacuuaccugcuaauaaaaacucauuggaaaagugagaagaucuaaaaaaaaaaaaaaaaaaaaaaaaaaaaaaaaaaaaaaaaaaaaaaaaaaaaaaaaaaaaaaaaugcaucccccccccccccccccccccccccccccccaaaggcucuuuucagagccaccagaauu

SEQ ID NO: 3224 - RNA, 1983 nt, Artificial Sequence
  mRNA product Design c-3 comprising derived and/or modified sequence from HRSV(A2)__F_DSCav1_mut3 (opt11)
gggagaguccgcucagccagguugcagaagcggcuuagcguguguccuaaucuucucucugcguguagguaggccugugccgcaaacaagcuuaccauggaacuccucauccuuaaagcaaacgccaucacaaccauccucacagcagucacuuucugcuucgcauccggacaaaacaucacagaagaguucuaucaauccacgugcuccgcaguuuccaaaggauaccuuggagccuuacgaaccggcugguacaccuccgucaucaccauagaacucagcaacaucaaagaaaucaaaugcaacggaaccgacgcaaaagucaaacucaucaaacaagaacuagacaaauacaaaaacgcagucaccgaccuccaacuacucaugcaaucaacccccgcaaccggcuccggcuccgccaucugcuccggaguagccguaugcaaaguccuccaccucgaaggcgaaguuaacaagaucaaguccgcacuccuaucaaccaacaaagcagucgucucccuauccaacggcgucuccguauuaacauucaaaguccucgaccucaaaaacuacauagacaaacagcuacuccccauccuaaacaaacaauccugcuccauccccaacaucgaaacugucaucgaguuccaacagaaaaacaaccgccuccuagaaaucacccgagaguucuccguaaacgccggcgucacuacccccgucucuaccuauaugcuaaccaacucugaacuccuaucccuaaucaacgauaugcccauaacuaacgaccaaaagaaacuuauguccaacaacguacaaauaguccggcaacaaucauacucuaucaugugcaucaucaaagaagaaguacuugccuacguuguccaacucccacuauacggcgucauagacacuccaugcuggaaacuucacaccucaccccucugcaccacuaacacuaaagaaggcucuaacaucugccuuacccgcaccgaccgcggaugguacugcgacaacgcaggcucaguuagcuucuucccacaagccgaaaccugcaaaguccagucaaaccgugucuucugcgauaccaugaacucgcucacccucccuuccgaagucaaccucugcaacgucgacaucuucaaccccaaauacgacugcaaaaucaugaccucaaaaaccgacguaucuucuuccgucaucaccucccucggcgccaucguauccugcuacggcaaaaccaaaugcacugcaucaaacaaaaaccgaggcaucaucaaaaccuucucgaacggaugcgacuacguauccaacaagggcgucgacacagucuccguugguaacacccucuacugcgucaacaaacaagaaggccaaucccuauacguaaaaggcgaacccaucaucaacuucuacgacccccucgucuuccccagugacgaauuugacgccuccaucucccaagucaacgaaaagaucaaccaaucccuugccuucauacgcaaauccgacgaacuccuacacaacguuaacgccggaaaaucaacaaccaacaucaugaucacaaccaucauaaucgucauaaucgucauacuccucucccucauagccgucggccugcuauuguacuguaaagcccgcuccacaccagucacacuuucaaaagaccaacucuccgggaucaacaacaucgccuucuccaacuaaggacuaguacuggcugcaucucccuuuccucuguccuccauccuucucccaggauggugaagggggaccugguacccagugauccccaccccaggauccuaaaucaugacuuaccugcuaauaaaaacucauuggaaaagugagaagaucuaaaaaaaaaaaaaaaaaaaaaaaaaaaaaaaaaaaaaaaaaaaaaaaaaaaaaaaaaaaaaaaaugcaucccccccccccccccccccccccccccccccaaaggcucuuuucagagccaccagaauu

SEQ ID NO: 3225 - RNA, 1979 nt, Artificial Sequence
  mRNA product Design c-4 comprising derived and/or modified sequence from HRSV(A2)__F_DSCav1_mut3 (opt1)
gggagaguccgcucagccagguugcagaagcggcuuagcguguguccuaaucuucucucugcguguagguaggccugugccgcaaacaagcuuaccauggagcugcucauccugaaggccaacgccaucaccaccauccugacggcggugaccuucugcuucgccagcggccagaacaucaccgaggaguucuaccaguccacgugcagcgccgucuccaagggguaccucggcgcccugcggaccggcugguacaccuccgugaucaccaucgagcugagcaacaucaaggagaucaagugcaacgggaccgacgccaaggugaagcucaucaagcaggagcuggacaaguacaagaacgcggucacggaccugcagcuccugaugcaguccaccccggcaaccggcuccggcuccgccaucugcagcggcgucgccgugugcaaggugcugcaccucgagggggaggucaacaagaucaagagcgcccugcuguccaccaacaaggccguggugagccucuccaacggcgucagcgugcugaccuucaaggugcuggaccucaagaacuacaucgacaagcagcugcugcccauccugaacaagcagagcugcuccauccccaacaucgagacggugaucgaguuccagcagaagaacaaccggcuccuggagaucacccgcgaguucagcgugaacgccggggucaccacccccguguccacguacaugcugaccaacagcgagcuccugucccugaucaacgacaugccgaucaccaacgaccagaagaagcucaugagcaacaacgugcagaucguccggcagcaguccuacagcaucaugugcaucaucaaggaggaggugcuggcguacgugguccagcugccccucuacggcgugaucgacacccccugcuggaagcugcacacgagcccccugugcaccaccaacaccaaggagggguccaacaucugccucacgcgcaccgaccggggcugguacugcgacaacgccggcagcgucuccuucuucccgcaggccgagaccugcaaggugcagagcaaccgcguguucugcgacaccaugaacucccugacgcugcccagcgagguaaaccucugcaacgucgacaucuucaaccccaaguacgacugcaagaucaugaccuccaagaccgacgugagcuccagcgugaucaccucccugggggccaucgucagcugcuacggcaagacgaagugcaccgccagcaacaagaaccgggggaucaucaagaccuucuccaacggcugcgacuacgugagcaacaagggcguggacaccguguccgucgggaacacccuguacugcgugaacaagcaggagggccagagccucuacgugaagggggagcccaucaucaacuucuacgacccgcuggucuuccccuccgacgaguucgacgcgagcaucucccaggugaacgagaagaucaaccagagccuggccuucauccgcaaguccgacgagcugcuccacaacgugaacgccggcaagagcacgaccaacaucaugaucaccaccaucaucaucgucaucaucgugauccugcugucccucaucgccguggggcugcugcucuacugcaaggcccggagcacgcccgucacccuguccaaggaccagcugagcggcaucaacaacaucgcguucuccaacugaggacuaguggaagcauuuuccuggcugauuaaaagaaauuacucagcuauggucaucuguuccuguuagaaggcuaugcagcauauuauauacuaugcgcauguuaugaaaugcauaauaaaaaauuuuaaaaaaucuaaaagaucuaaaaaaaaaaaaaaaaaaaaaaaaaaaaaaaaaaaaaaaaaaaaaaaaaaaaaaaaaaaaaaaaugcaucccccccccccccccccccccccccccccccaaaggcucuuuucagagccaccagaauu

SEQ ID NO: 3226 - RNA, 1979 nt, Artificial Sequence
  mRNA product Design c-4 comprising derived and/or modified sequence from HRSV(A2)__F_DSCav1_mut3 (opt1)
gggagaguccgcucagccagguugcagaagcggcuuagcguguguccuaaucuucucucugcguguagguaggccugugccgcaaacaagcuuaccauggagcugcucauccugaaggccaacgccaucaccaccauccugacggcggugaccuucugcuucgccagcggccagaacaucaccgaggaguucuaccaguccacgugcagcgccgucuccaagggguaccucggcgcccugcgcaccgggugguacaccagcgugaucaccaucgagcuguccaacaucaaggagaucaagugcaacggcaccgacgccaaggugaagcucaucaagcaggagcuggacaaguacaagaacgcggucacggaccugcagcuccugaugcagagcacccccgccaccggguccggcagcgccaucugcuccggcguggccgugugcaagguccugcaccucgagggggaggugaacaagaucaagagcgcgcugcuguccaccaacaaggccguggucagccucuccaacggcgugagcgugcugacguucaagguccuggaccucaagaacuacaucgacaagcagcugcugccgauccucaacaagcaguccugcagcauccccaacaucgagaccgugaucgaguuccagcagaagaacaaccggcugcuggagaucacccgcgaguucuccgugaacgccggggucaccacgcccgugagcaccuacaugcucaccaacuccgagcugcugagccucaucaacgacaugcccaucaccaacgaccagaagaagcugaugagcaacaacgugcagaucguccggcagcaguccuacagcaucaugugcaucaucaaggaggaggugcuggccuacgugguccagcucccgcuguacggcgugaucgacacgcccugcuggaagcugcacaccagcccccucugcaccaccaacacgaaggagggguccaacaucugccugacccgcaccgaccggggcugguacugcgacaacgccggcuccgugagcuucuucccccaggcggagaccugcaagguccaguccaaccgcguguucugcgacacgaugaacagccugacccucccguccgaggucaaccugugcaacguggacaucuucaaccccaaguacgacugcaagaucaugaccagcaagaccgacguguccagcuccgucaucacgagccugggggccaucguguccugcuacggcaagaccaagugcaccgccagcaacaagaaccgggggaucaucaagaccuucuccaacggcugcgacuacgugagcaacaagggcgucgacacgguguccguggggaacacccucuacugcgucaacaagcaggagggccagagccuguacgugaagggggagcccaucaucaacuucuacgacccccugguguucccgagcgacgaguucgacgccuccaucagccaggucaacgagaagaucaaccagucccucgccuucauccgcaagagcgacgagcugcugcacaacgugaacgcgggcaaguccaccaccaacaucaugaucaccacgaucaucaucgugaucaucgucauccuccugagccugaucgccguggggcuccugcuguacugcaaggcccgguccacccccgugacccugagcaaggaccagcucuccggcaucaacaacaucgccuucagcaacugaggacuaguggaagcauuuuccuggcugauuaaaagaaauuacucagcuauggucaucuguuccuguuagaaggcuaugcagcauauuauauacuaugcgcauguuaugaaaugcauaauaaaaaauuuuaaaaaaucuaaaagaucuaaaaaaaaaaaaaaaaaaaaaaaaaaaaaaaaaaaaaaaaaaaaaaaaaaaaaaaaaaaaaaaaugcaucccccccccccccccccccccccccccccccaaaggcucuuuucagagccaccagaauu

SEQ ID NO: 3227 - RNA, 1979 nt, Artificial Sequence
  mRNA product Design c-4 comprising derived and/or modified sequence from HRSV(A2)__F_DSCav1_mut3 (opt2)
gggagaguccgcucagccagguugcagaagcggcuuagcguguguccuaaucuucucucugcguguagguaggccugugccgcaaacaagcuuaccauggagcuccucauccucaaggccaacgccaucaccaccauccucaccgccgucaccuucugcuucgccuccggccagaacaucaccgaggaguucuaccaguccaccugcuccgccgucuccaagggcuaccucggcgcccuccgcaccggcugguacaccuccgucaucaccaucgagcucuccaacaucaaggagaucaagugcaacggcaccgacgccaaggucaagcucaucaagcaggagcucgacaaguacaagaacgccgucaccgaccuccagcuccucaugcaguccacccccgccaccggcuccggcuccgccaucugcuccggcgucgccgucugcaagguccuccaccucgagggcgaggucaacaagaucaaguccgcccuccucuccaccaacaaggccgucgucucccucuccaacggcgucuccguccucaccuucaagguccucgaccucaagaacuacaucgacaagcagcuccuccccauccucaacaagcaguccugcuccauccccaacaucgagaccgucaucgaguuccagcagaagaacaaccgccuccucgagaucacccgcgaguucuccgucaacgccggcgucaccacccccgucuccaccuacaugcucaccaacuccgagcuccucucccucaucaacgacaugcccaucaccaacgaccagaagaagcucauguccaacaacguccagaucguccgccagcaguccuacuccaucaugugcaucaucaaggaggagguccucgccuacgucguccagcucccccucuacggcgucaucgacacccccugcuggaagcuccacaccuccccccucugcaccaccaacaccaaggagggcuccaacaucugccucacccgcaccgaccgcggcugguacugcgacaacgccggcuccgucuccuucuucccccaggccgagaccugcaagguccaguccaaccgcgucuucugcgacaccaugaacucccucacccuccccuccgaggucaaccucugcaacgucgacaucuucaaccccaaguacgacugcaagaucaugaccuccaagaccgacgucuccuccuccgucaucaccucccucggcgccaucgucuccugcuacggcaagaccaagugcaccgccuccaacaagaaccgcggcaucaucaagaccuucuccaacggcugcgacuacgucuccaacaagggcgucgacaccgucuccgucggcaacacccucuacugcgucaacaagcaggagggccagucccucuacgucaagggcgagcccaucaucaacuucuacgacccccucgucuuccccuccgacgaguucgacgccuccaucucccaggucaacgagaagaucaaccagucccucgccuucauccgcaaguccgacgagcuccuccacaacgucaacgccggcaaguccaccaccaacaucaugaucaccaccaucaucaucgucaucaucgucauccuccucucccucaucgccgucggccuccuccucuacugcaaggcccgcuccacccccgucacccucuccaaggaccagcucuccggcaucaacaacaucgccuucuccaacugaggacuaguggaagcauuuuccuggcugauuaaaagaaauuacucagcuauggucaucuguuccuguuagaaggcuaugcagcauauuauauacuaugcgcauguuaugaaaugcauaauaaaaaauuuuaaaaaaucuaaaagaucuaaaaaaaaaaaaaaaaaaaaaaaaaaaaaaaaaaaaaaaaaaaaaaaaaaaaaaaaaaaaaaaaugcaucccccccccccccccccccccccccccccccaaaggcucuuuucagagccaccagaauu

SEQ ID NO: 3228 - RNA, 1979 nt, Artificial Sequence
  mRNA product Design c-4 comprising derived and/or modified sequence from HRSV(A2)__F_DSCav1_mut3 (opt3)
gggagaguccgcucagccagguugcagaagcggcuuagcguguguccuaaucuucucucugcguguagguaggccugugccgcaaacaagcuuaccauggagcugcucauccuuaaggccaacgcuauuaccacaauacugacugcagugacguucugcuuugccagcggccagaauaucaccgaagaguucuaccaauccacauguucugcggucucaaaaggguauuugggagcuuuaagaacugguugguacaccaguguuauuacaaucgaacugagcaacauuaaggagaucaaaugcaauggcaccgacgccaaggugaaacuaauaaagcaggaacucgauaaguauaaaaacgcaguaacugaccugcagcuucugaugcaguccacacccgccaccgggucuggaucggcuaucuguucaggcguggcagucugcaagguguugcaccucgagggugagguuaauaaaauuaagagcgcccugcugaguacgaacaaagcuguggucucccucucuaauggggugagcguauuaacuuuuaagguucuggaucuuaagaacuacaucgacaaacaauugcugccuauucuaaauaagcaguccuguucaaucccaaacauagaaaccgugauugaguuccagcagaaaaauaacaggcuccuggaaaucacacgggaguuuagugucaaugccggagugacuaccccggugagcacauauaugcuuaccaacucugagcuguugucccucauuaaugauaugcccaucacgaacgaccaaaagaaacugaugucaaacaauguccagaucguucgccagcagagcuacaguauuaugugcauaaucaaggaagagguguuagcguauguagugcaacugccucucuacggcgucauugauacuccauguuggaaacuucauacaucuccccugugcaccacuaacacaaaggaaggcuccaauaucuguuugacccgaacggaccgugggugguacugcgauaacgcaggaagcgugucguucuuuccucaggccgagaccuguaagguucagucuaauagaguguucugcgacacaaugaacucccuaacucugccaucagaagucaaucucugcaacguggauauauuuaaucccaaauaugacuguaagauuaugaccaguaaaacagauguaagcuccucuguuaucacuagccugggugcuaucgugucaugcuacggcaagaccaaauguacagccaguaacaagaauagggggauuaucaagaccuucuccaacggaugcgacuaugucagcaauaaaggcguggacacugucucuguggguaacacgcuuuacuguguuaauaagcaagaggggcagucacuguaugugaaaggagagccuauuauaaacuuuuacgauccauugguauucccgagugacgaauuugaugcaagcaucucccaggucaacgagaagauuaaucagucucucgcuuucauccggaaaucggacgaacuguuacacaacgugaaugccggcaagagcacaaccaacaucaugauuacuaccauaaucauuguuaucauugugauccugcuaucccucauagcggucggccugcuuuuguauugcaaggcccgcucaacacccgugacccugaguaaagaucaacucucugggaucaauaacauugcauucagcaauugaggacuaguggaagcauuuuccuggcugauuaaaagaaauuacucagcuauggucaucuguuccuguuagaaggcuaugcagcauauuauauacuaugcgcauguuaugaaaugcauaauaaaaaauuuuaaaaaaucuaaaagaucuaaaaaaaaaaaaaaaaaaaaaaaaaaaaaaaaaaaaaaaaaaaaaaaaaaaaaaaaaaaaaaaaugcaucccccccccccccccccccccccccccccccaaaggcucuuuucagagccaccagaauu

SEQ ID NO: 3229 - RNA, 1979 nt, Artificial Sequence
  mRNA product Design c-4 comprising derived and/or modified sequence from HRSV(A2)__F_DSCav1_mut3 (opt4)
gggagaguccgcucagccagguugcagaagcggcuuagcguguguccuaaucuucucucugcguguagguaggccugugccgcaaacaagcuuaccauggagcugcugauccugaaggccaacgccaucaccaccauccugaccgccgugaccuucugcuucgccagcggccagaacaucaccgaggaguucuaccagagcaccugcagcgccgugagcaagggcuaccugggcgcccugagaaccggcugguacaccagcgugaucaccaucgagcugagcaacaucaaggagaucaagugcaacggcaccgacgccaaggugaagcugaucaagcaggagcuggacaaguacaagaacgccgugaccgaccugcagcugcugaugcagagcacccccgccaccggcagcggcagcgccaucugcagcggcguggccgugugcaaggugcugcaccuggagggcgaggugaacaagaucaagagcgcccugcugagcaccaacaaggccguggugagccugagcaacggcgugagcgugcugaccuucaaggugcuggaccugaagaacuacaucgacaagcagcugcugcccauccugaacaagcagagcugcagcauccccaacaucgagaccgugaucgaguuccagcagaagaacaacagacugcuggagaucaccagagaguucagcgugaacgccggcgugaccacccccgugagcaccuacaugcugaccaacagcgagcugcugagccugaucaacgacaugcccaucaccaacgaccagaagaagcugaugagcaacaacgugcagaucgugagacagcagagcuacagcaucaugugcaucaucaaggaggaggugcuggccuacguggugcagcugccccuguacggcgugaucgacacccccugcuggaagcugcacaccagcccccugugcaccaccaacaccaaggagggcagcaacaucugccugaccagaaccgacagaggcugguacugcgacaacgccggcagcgugagcuucuucccccaggccgagaccugcaaggugcagagcaacagaguguucugcgacaccaugaacagccugacccugcccagcgaggugaaccugugcaacguggacaucuucaaccccaaguacgacugcaagaucaugaccagcaagaccgacgugagcagcagcgugaucaccagccugggcgccaucgugagcugcuacggcaagaccaagugcaccgccagcaacaagaacagaggcaucaucaagaccuucagcaacggcugcgacuacgugagcaacaagggcguggacaccgugagcgugggcaacacccuguacugcgugaacaagcaggagggccagagccuguacgugaagggcgagcccaucaucaacuucuacgacccccugguguuccccagcgacgaguucgacgccagcaucagccaggugaacgagaagaucaaccagagccuggccuucaucagaaagagcgacgagcugcugcacaacgugaacgccggcaagagcaccaccaacaucaugaucaccaccaucaucaucgugaucaucgugauccugcugagccugaucgccgugggccugcugcuguacugcaaggccagaagcacccccgugacccugagcaaggaccagcugagcggcaucaacaacaucgccuucagcaacugaggacuaguggaagcauuuuccuggcugauuaaaagaaauuacucagcuauggucaucuguuccuguuagaaggcuaugcagcauauuauauacuaugcgcauguuaugaaaugcauaauaaaaaauuuuaaaaaaucuaaaagaucuaaaaaaaaaaaaaaaaaaaaaaaaaaaaaaaaaaaaaaaaaaaaaaaaaaaaaaaaaaaaaaaaugcaucccccccccccccccccccccccccccccccaaaggcucuuuucagagccaccagaauu

SEQ ID NO: 3230 - RNA, 1979 nt, Artificial Sequence
  mRNA product Design c-4 comprising derived and/or modified sequence from HRSV(A2)__F_DSCav1_mut3 (opt5)
gggagaguccgcucagccagguugcagaagcggcuuagcguguguccuaaucuucucucugcguguagguaggccugugccgcaaacaagcuuaccauggagcugcucauccugaaggccaacgcuauuaccacaauccuuacggccgugaccuucugcuuugcgagcggccagaauauuacagaagaguucuaccaauccaccuguucugcugucagcaaaggguaucugggagcccucagaacaggcugguacaccuccguuaucacaauugaacugucuaacaucaaggagaucaaaugcaaugggaccgacgccaaggugaaacuuauuaagcaggaacuggauaaguauaaaaacgcugugacggaccuccagcugcugaugcagagcacccccgccacaggauccggcucugcuaucuguagcggggucgccgugugcaagguucuccaccuggagggagaggugaauaaaauuaaguccgcgcuucugagcaccaacaaagccgucgugucucucuccaauggcguuagcgugcugacauuuaagguccuugaucugaagaacuacaucgacaaacaacuccugccuauucugaauaagcagucuuguuccaucccgaacauugaaaccgugaucgaguuccagcagaaaaauaaccggcuccuggaaaucacgcgcgaguuuagcgugaaugcuggcgucacaacccccguuucuacauauaugcuuaccaacuccgagcugcucagccugauuaaugauaugccuaucaccaacgaccaaaagaaacuuauguccaacaaugugcagauugugagacagcagucuuacagcaucaugugcauuaucaaggaagagguccuggccuaugugguucaacucccccuguacggggugaucgauacaccuuguuggaaacugcauacgagcccccucugcaccacaaacaccaaggaaggauccaauauuugucugacacggaccgaccgcggcugguacugcgauaacgcugggucugucuccuucuuuccucaggccgagacguguaaggugcagagcaauagaguuuucugcgacacaaugaacucucuuacccugccgagcgaagugaaucucugcaacgucgauaucuuuaaucccaaauaugacuguaagauuaugaccuccaaaacagaugugucuagcuccgucaucaccagccugggagcgauugugucuugcuacggcaagacaaaauguacggccuccaacaagaaucgggggaucaucaagaccuucagcaacggaugcgacuauguuucuaauaaaggcguggacacagucuccgugggcaacacccuuuacuguguuaauaagcaagaggggcagagccuguaugugaaaggagagccuauuaucaacuuuuacgauccccucgucuucccuuccgacgaauuugaugcuucuauuagccaggugaacgagaagaucaaucagucccuggccuucauucgcaaaucugacgaacugcuccacaacgugaaugcuggcaagagcacaaccaacaucaugauuacgaccaucaucauuguuaucauugucauccugcuuucccugauugccguggggcuccugcuguauugcaaggccagaagcacacccgugacccuuucuaaagaucaacucuccggaaucaauaacaucgcuuucagcaauugaggacuaguggaagcauuuuccuggcugauuaaaagaaauuacucagcuauggucaucuguuccuguuagaaggcuaugcagcauauuauauacuaugcgcauguuaugaaaugcauaauaaaaaauuuuaaaaaaucuaaaagaucuaaaaaaaaaaaaaaaaaaaaaaaaaaaaaaaaaaaaaaaaaaaaaaaaaaaaaaaaaaaaaaaaugcaucccccccccccccccccccccccccccccccaaaggcucuuuucagagccaccagaauu

SEQ ID NO: 3231 - RNA, 1979 nt, Artificial Sequence
  mRNA product Design c-4 comprising derived and/or modified sequence from HRSV(A2)__F_DSCav1_mut3 (opt6)
gggagaguccgcucagccagguugcagaagcggcuuagcguguguccuaaucuucucucugcguguagguaggccugugccgcaaacaagcuuaccauggaauuacucauacuaaaagccaaugccauaaccacuauucuaacagcaguaacauucuguuucgccucaggacaaaacauaacagaagaauuuuaucaauccaccuguuccgcagucucgaaaggcuaccuuggcgcacuaagaaccggaugguauacaucaguaauaaccauugaacuaucaaauaucaaagaaauaaaaugcaacggaacugacgcaaaagucaaacuaauaaaacaagaauuagacaaauacaaaaacgccguuacagacuuacaacuacuaaugcaaucaacuccagcaacaggaucaggaucugcuauaugcucaggugucgccguauguaaaguguuacaccucgaaggcgaaguaaacaaaauaaaaucagcacuacuauccacaaauaaagcaguaguaucacuauccaaugguguaucaguacucacauucaaaguacuagacuuaaaaaauuauauagauaaacaauuacuaccaauauuaaacaaacaaucaugcucaauaccaaacauagaaaccgucauugaauuucaacaaaaaaacaaucgacuucuugaaauaacacgagaauuuucaguaaaugccggaguaacaaccccagucucaacauacauguuaaccaacucugaacuccuaagccuaaucaacgacaugcccauaacuaacgaccaaaaaaaacuaauguccaauaauguccaaauaguaagacaacaauccuacucaauaaugugcauuauaaaagaagaaguccucgccuauguaguacaacuacccuuauacggaguaauugacacaccauguuggaaacuacauacaucaccacuaugcaccacuaacacaaaagaaggcuccaacauaugccuaacccgaacagaucgcggaugguauugcgacaacgcaggaaguguauccuucuuuccacaagcagaaacaugcaaaguacaauccaacagaguauucugugacaccaugaacucucuaacacuaccuuccgaaguaaauuuaugcaacguagacauauuuaaucccaaauacgacuguaaaauaaugaccucaaaaacugaugucucaucaucagucauuacaucacucggagcaauagucaguugcuauggaaaaaccaaaugcacagcuaguaacaaaaacagggguauaauaaaaacauuuucaaacggaugcgauuacguaucaaauaaaggaguagacaccguauccguaggaaauacucucuacugcguaaacaaacaagaaggacaaucccuauacguaaaaggcgaaccaaucauuaacuuuuacgacccacuuguauuuccaucagacgaauuugaugccucaauaucccaagucaaugaaaaaauaaaccaaagucuagcauucauccgaaaaucagaugaacuuuuacacaacguaaacgccggaaaaucaacaacaaacaucaugaucacaacaaucaucauaguaauaauaguuauacuacuuuccuuaauagcagucggccuacuacucuacugcaaagcacgauccacaccaguaaccuuaucuaaagaccaacucucaggcauaaacaacauagcauucucaaacuaaggacuaguggaagcauuuuccuggcugauuaaaagaaauuacucagcuauggucaucuguuccuguuagaaggcuaugcagcauauuauauacuaugcgcauguuaugaaaugcauaauaaaaaauuuuaaaaaaucuaaaagaucuaaaaaaaaaaaaaaaaaaaaaaaaaaaaaaaaaaaaaaaaaaaaaaaaaaaaaaaaaaaaaaaaugcaucccccccccccccccccccccccccccccccaaaggcucuuuucagagccaccagaauu

SEQ ID NO: 3232 - RNA, 1979 nt, Artificial Sequence
  mRNA product Design c-4 comprising derived and/or modified sequence from HRSV(A2)__F_DSCav1_mut3 (opt11)
gggagaguccgcucagccagguugcagaagcggcuuagcguguguccuaaucuucucucugcguguagguaggccugugccgcaaacaagcuuaccauggaacuccucauccuuaaagcaaacgccaucacaaccauccucacagcagucacuuucugcuucgcauccggacaaaacaucacagaagaguucuaucaauccacgugcuccgcaguuuccaaaggauaccuuggagccuuacgaaccggcugguacaccuccgucaucaccauagaacucagcaacaucaaagaaaucaaaugcaacggaaccgacgcaaaagucaaacucaucaaacaagaacuagacaaauacaaaaacgcagucaccgaccuccaacuacucaugcaaucaacccccgcaaccggcuccggcuccgccaucugcuccggaguagccguaugcaaaguccuccaccucgaaggcgaaguuaacaagaucaaguccgcacuccuaucaaccaacaaagcagucgucucccuauccaacggcgucuccguauuaacauucaaaguccucgaccucaaaaacuacauagacaaacagcuacuccccauccuaaacaaacaauccugcuccauccccaacaucgaaacugucaucgaguuccaacagaaaaacaaccgccuccuagaaaucacccgagaguucuccguaaacgccggcgucacuacccccgucucuaccuauaugcuaaccaacucugaacuccuaucccuaaucaacgauaugcccauaacuaacgaccaaaagaaacuuauguccaacaacguacaaauaguccggcaacaaucauacucuaucaugugcaucaucaaagaagaaguacuugccuacguuguccaacucccacuauacggcgucauagacacuccaugcuggaaacuucacaccucaccccucugcaccacuaacacuaaagaaggcucuaacaucugccuuacccgcaccgaccgcggaugguacugcgacaacgcaggcucaguuagcuucuucccacaagccgaaaccugcaaaguccagucaaaccgugucuucugcgauaccaugaacucgcucacccucccuuccgaagucaaccucugcaacgucgacaucuucaaccccaaauacgacugcaaaaucaugaccucaaaaaccgacguaucuucuuccgucaucaccucccucggcgccaucguauccugcuacggcaaaaccaaaugcacugcaucaaacaaaaaccgaggcaucaucaaaaccuucucgaacggaugcgacuacguauccaacaagggcgucgacacagucuccguugguaacacccucuacugcgucaacaaacaagaaggccaaucccuauacguaaaaggcgaacccaucaucaacuucuacgacccccucgucuuccccagugacgaauuugacgccuccaucucccaagucaacgaaaagaucaaccaaucccuugccuucauacgcaaauccgacgaacuccuacacaacguuaacgccggaaaaucaacaaccaacaucaugaucacaaccaucauaaucgucauaaucgucauacuccucucccucauagccgucggccugcuauuguacuguaaagcccgcuccacaccagucacacuuucaaaagaccaacucuccgggaucaacaacaucgccuucuccaacuaaggacuaguggaagcauuuuccuggcugauuaaaagaaauuacucagcuauggucaucuguuccuguuagaaggcuaugcagcauauuauauacuaugcgcauguuaugaaaugcauaauaaaaaauuuuaaaaaaucuaaaagaucuaaaaaaaaaaaaaaaaaaaaaaaaaaaaaaaaaaaaaaaaaaaaaaaaaaaaaaaaaaaaaaaaugcaucccccccccccccccccccccccccccccccaaaggcucuuuucagagccaccagaauu

SEQ ID NO: 3233 - RNA, 1897 nt, Artificial Sequence
  mRNA product Design c-5 comprising derived and/or modified sequence from HRSV(A2)__F_DSCav1_mut3 (opt1)
gggagagcggcucggccauuuugucccagucaguccggaggcugcggcugcagaaguaccgccugcggaguaacugcaaagaagcuuaccauggagcugcucauccugaaggccaacgccaucaccaccauccugacggcggugaccuucugcuucgccagcggccagaacaucaccgaggaguucuaccaguccacgugcagcgccgucuccaagggguaccucggcgcccugcggaccggcugguacaccuccgugaucaccaucgagcugagcaacaucaaggagaucaagugcaacgggaccgacgccaaggugaagcucaucaagcaggagcuggacaaguacaagaacgcggucacggaccugcagcuccugaugcaguccaccccggcaaccggcuccggcuccgccaucugcagcggcgucgccgugugcaaggugcugcaccucgagggggaggucaacaagaucaagagcgcccugcuguccaccaacaaggccguggugagccucuccaacggcgucagcgugcugaccuucaaggugcuggaccucaagaacuacaucgacaagcagcugcugcccauccugaacaagcagagcugcuccauccccaacaucgagacggugaucgaguuccagcagaagaacaaccggcuccuggagaucacccgcgaguucagcgugaacgccggggucaccacccccguguccacguacaugcugaccaacagcgagcuccugucccugaucaacgacaugccgaucaccaacgaccagaagaagcucaugagcaacaacgugcagaucguccggcagcaguccuacagcaucaugugcaucaucaaggaggaggugcuggcguacgugguccagcugccccucuacggcgugaucgacacccccugcuggaagcugcacacgagcccccugugcaccaccaacaccaaggagggguccaacaucugccucacgcgcaccgaccggggcugguacugcgacaacgccggcagcgucuccuucuucccgcaggccgagaccugcaaggugcagagcaaccgcguguucugcgacaccaugaacucccugacgcugcccagcgagguaaaccucugcaacgucgacaucuucaaccccaaguacgacugcaagaucaugaccuccaagaccgacgugagcuccagcgugaucaccucccugggggccaucgucagcugcuacggcaagacgaagugcaccgccagcaacaagaaccgggggaucaucaagaccuucuccaacggcugcgacuacgugagcaacaagggcguggacaccguguccgucgggaacacccuguacugcgugaacaagcaggagggccagagccucuacgugaagggggagcccaucaucaacuucuacgacccgcuggucuuccccuccgacgaguucgacgcgagcaucucccaggugaacgagaagaucaaccagagccuggccuucauccgcaaguccgacgagcugcuccacaacgugaacgccggcaagagcacgaccaacaucaugaucaccaccaucaucaucgucaucaucgugauccugcugucccucaucgccguggggcugcugcucuacugcaaggcccggagcacgcccgucacccuguccaaggaccagcugagcggcaucaacaacaucgcguucuccaacugaggacuagucccuguucccagagcccacuuuuuuuucuuuuuuugaaauaaaauagccugucuuucagaucuaaaaaaaaaaaaaaaaaaaaaaaaaaaaaaaaaaaaaaaaaaaaaaaaaaaaaaaaaaaaaaaaugcaucccccccccccccccccccccccccccccccaaaggcucuuuucagagccaccagaauu

SEQ ID NO: 3234 - RNA, 1897 nt, Artificial Sequence
  mRNA product Design c-5 comprising derived and/or modified sequence from HRSV(A2)__F_DSCav1_mut3 (opt1)
gggagagcggcucggccauuuugucccagucaguccggaggcugcggcugcagaaguaccgccugcggaguaacugcaaagaagcuuaccauggagcugcucauccugaaggccaacgccaucaccaccauccugacggcggugaccuucugcuucgccagcggccagaacaucaccgaggaguucuaccaguccacgugcagcgccgucuccaagggguaccucggcgcccugcgcaccgggugguacaccagcgugaucaccaucgagcuguccaacaucaaggagaucaagugcaacggcaccgacgccaaggugaagcucaucaagcaggagcuggacaaguacaagaacgcggucacggaccugcagcuccugaugcagagcacccccgccaccggguccggcagcgccaucugcuccggcguggccgugugcaagguccugcaccucgagggggaggugaacaagaucaagagcgcgcugcuguccaccaacaaggccguggucagccucuccaacggcgugagcgugcugacguucaagguccuggaccucaagaacuacaucgacaagcagcugcugccgauccucaacaagcaguccugcagcauccccaacaucgagaccgugaucgaguuccagcagaagaacaaccggcugcuggagaucacccgcgaguucuccgugaacgccggggucaccacgcccgugagcaccuacaugcucaccaacuccgagcugcugagccucaucaacgacaugcccaucaccaacgaccagaagaagcugaugagcaacaacgugcagaucguccggcagcaguccuacagcaucaugugcaucaucaaggaggaggugcuggccuacgugguccagcucccgcuguacggcgugaucgacacgcccugcuggaagcugcacaccagcccccucugcaccaccaacacgaaggagggguccaacaucugccugacccgcaccgaccggggcugguacugcgacaacgccggcuccgugagcuucuucccccaggcggagaccugcaagguccaguccaaccgcguguucugcgacacgaugaacagccugacccucccguccgaggucaaccugugcaacguggacaucuucaaccccaaguacgacugcaagaucaugaccagcaagaccgacguguccagcuccgucaucacgagccugggggccaucguguccugcuacggcaagaccaagugcaccgccagcaacaagaaccgggggaucaucaagaccuucuccaacggcugcgacuacgugagcaacaagggcgucgacacgguguccguggggaacacccucuacugcgucaacaagcaggagggccagagccuguacgugaagggggagcccaucaucaacuucuacgacccccugguguucccgagcgacgaguucgacgccuccaucagccaggucaacgagaagaucaaccagucccucgccuucauccgcaagagcgacgagcugcugcacaacgugaacgcgggcaaguccaccaccaacaucaugaucaccacgaucaucaucgugaucaucgucauccuccugagccugaucgccguggggcuccugcuguacugcaaggcccgguccacccccgugacccugagcaaggaccagcucuccggcaucaacaacaucgccuucagcaacugaggacuagucccuguucccagagcccacuuuuuuuucuuuuuuugaaauaaaauagccugucuuucagaucuaaaaaaaaaaaaaaaaaaaaaaaaaaaaaaaaaaaaaaaaaaaaaaaaaaaaaaaaaaaaaaaaugcaucccccccccccccccccccccccccccccccaaaggcucuuuucagagccaccagaauu

SEQ ID NO: 3235 - RNA, 1897 nt, Artificial Sequence
  mRNA product Design c-5 comprising derived and/or modified sequence from HRSV(A2)__F_DSCav1_mut3 (opt2)
gggagagcggcucggccauuuugucccagucaguccggaggcugcggcugcagaaguaccgccugcggaguaacugcaaagaagcuuaccauggagcuccucauccucaaggccaacgccaucaccaccauccucaccgccgucaccuucugcuucgccuccggccagaacaucaccgaggaguucuaccaguccaccugcuccgccgucuccaagggcuaccucggcgcccuccgcaccggcugguacaccuccgucaucaccaucgagcucuccaacaucaaggagaucaagugcaacggcaccgacgccaaggucaagcucaucaagcaggagcucgacaaguacaagaacgccgucaccgaccuccagcuccucaugcaguccacccccgccaccggcuccggcuccgccaucugcuccggcgucgccgucugcaagguccuccaccucgagggcgaggucaacaagaucaaguccgcccuccucuccaccaacaaggccgucgucucccucuccaacggcgucuccguccucaccuucaagguccucgaccucaagaacuacaucgacaagcagcuccuccccauccucaacaagcaguccugcuccauccccaacaucgagaccgucaucgaguuccagcagaagaacaaccgccuccucgagaucacccgcgaguucuccgucaacgccggcgucaccacccccgucuccaccuacaugcucaccaacuccgagcuccucucccucaucaacgacaugcccaucaccaacgaccagaagaagcucauguccaacaacguccagaucguccgccagcaguccuacuccaucaugugcaucaucaaggaggagguccucgccuacgucguccagcucccccucuacggcgucaucgacacccccugcuggaagcuccacaccuccccccucugcaccaccaacaccaaggagggcuccaacaucugccucacccgcaccgaccgcggcugguacugcgacaacgccggcuccgucuccuucuucccccaggccgagaccugcaagguccaguccaaccgcgucuucugcgacaccaugaacucccucacccuccccuccgaggucaaccucugcaacgucgacaucuucaaccccaaguacgacugcaagaucaugaccuccaagaccgacgucuccuccuccgucaucaccucccucggcgccaucgucuccugcuacggcaagaccaagugcaccgccuccaacaagaaccgcggcaucaucaagaccuucuccaacggcugcgacuacgucuccaacaagggcgucgacaccgucuccgucggcaacacccucuacugcgucaacaagcaggagggccagucccucuacgucaagggcgagcccaucaucaacuucuacgacccccucgucuuccccuccgacgaguucgacgccuccaucucccaggucaacgagaagaucaaccagucccucgccuucauccgcaaguccgacgagcuccuccacaacgucaacgccggcaaguccaccaccaacaucaugaucaccaccaucaucaucgucaucaucgucauccuccucucccucaucgccgucggccuccuccucuacugcaaggcccgcuccacccccgucacccucuccaaggaccagcucuccggcaucaacaacaucgccuucuccaacugaggacuagucccuguucccagagcccacuuuuuuuucuuuuuuugaaauaaaauagccugucuuucagaucuaaaaaaaaaaaaaaaaaaaaaaaaaaaaaaaaaaaaaaaaaaaaaaaaaaaaaaaaaaaaaaaaugcaucccccccccccccccccccccccccccccccaaaggcucuuuucagagccaccagaauu

SEQ ID NO: 3236 - RNA, 1897 nt, Artificial Sequence
  mRNA product Design c-5 comprising derived and/or modified sequence from HRSV(A2)__F_DSCav1_mut3 (opt3)
gggagagcggcucggccauuuugucccagucaguccggaggcugcggcugcagaaguaccgccugcggaguaacugcaaagaagcuuaccauggagcugcucauccuuaaggccaacgcuauuaccacaauacugacugcagugacguucugcuuugccagcggccagaauaucaccgaagaguucuaccaauccacauguucugcggucucaaaaggguauuugggagcuuuaagaacugguugguacaccaguguuauuacaaucgaacugagcaacauuaaggagaucaaaugcaauggcaccgacgccaaggugaaacuaauaaagcaggaacucgauaaguauaaaaacgcaguaacugaccugcagcuucugaugcaguccacacccgccaccgggucuggaucggcuaucuguucaggcguggcagucugcaagguguugcaccucgagggugagguuaauaaaauuaagagcgcccugcugaguacgaacaaagcuguggucucccucucuaauggggugagcguauuaacuuuuaagguucuggaucuuaagaacuacaucgacaaacaauugcugccuauucuaaauaagcaguccuguucaaucccaaacauagaaaccgugauugaguuccagcagaaaaauaacaggcuccuggaaaucacacgggaguuuagugucaaugccggagugacuaccccggugagcacauauaugcuuaccaacucugagcuguugucccucauuaaugauaugcccaucacgaacgaccaaaagaaacugaugucaaacaauguccagaucguucgccagcagagcuacaguauuaugugcauaaucaaggaagagguguuagcguauguagugcaacugccucucuacggcgucauugauacuccauguuggaaacuucauacaucuccccugugcaccacuaacacaaaggaaggcuccaauaucuguuugacccgaacggaccgugggugguacugcgauaacgcaggaagcgugucguucuuuccucaggccgagaccuguaagguucagucuaauagaguguucugcgacacaaugaacucccuaacucugccaucagaagucaaucucugcaacguggauauauuuaaucccaaauaugacuguaagauuaugaccaguaaaacagauguaagcuccucuguuaucacuagccugggugcuaucgugucaugcuacggcaagaccaaauguacagccaguaacaagaauagggggauuaucaagaccuucuccaacggaugcgacuaugucagcaauaaaggcguggacacugucucuguggguaacacgcuuuacuguguuaauaagcaagaggggcagucacuguaugugaaaggagagccuauuauaaacuuuuacgauccauugguauucccgagugacgaauuugaugcaagcaucucccaggucaacgagaagauuaaucagucucucgcuuucauccggaaaucggacgaacuguuacacaacgugaaugccggcaagagcacaaccaacaucaugauuacuaccauaaucauuguuaucauugugauccugcuaucccucauagcggucggccugcuuuuguauugcaaggcccgcucaacacccgugacccugaguaaagaucaacucucugggaucaauaacauugcauucagcaauugaggacuagucccuguucccagagcccacuuuuuuuucuuuuuuugaaauaaaauagccugucuuucagaucuaaaaaaaaaaaaaaaaaaaaaaaaaaaaaaaaaaaaaaaaaaaaaaaaaaaaaaaaaaaaaaaaugcaucccccccccccccccccccccccccccccccaaaggcucuuuucagagccaccagaauu

SEQ ID NO: 3237 - RNA, 1897 nt, Artificial Sequence
  mRNA product Design c-5 comprising derived and/or modified sequence from HRSV(A2)__F_DSCav1_mut3 (opt4)
gggagagcggcucggccauuuugucccagucaguccggaggcugcggcugcagaaguaccgccugcggaguaacugcaaagaagcuuaccauggagcugcugauccugaaggccaacgccaucaccaccauccugaccgccgugaccuucugcuucgccagcggccagaacaucaccgaggaguucuaccagagcaccugcagcgccgugagcaagggcuaccugggcgcccugagaaccggcugguacaccagcgugaucaccaucgagcugagcaacaucaaggagaucaagugcaacggcaccgacgccaaggugaagcugaucaagcaggagcuggacaaguacaagaacgccgugaccgaccugcagcugcugaugcagagcacccccgccaccggcagcggcagcgccaucugcagcggcguggccgugugcaaggugcugcaccuggagggcgaggugaacaagaucaagagcgcccugcugagcaccaacaaggccguggugagccugagcaacggcgugagcgugcugaccuucaaggugcuggaccugaagaacuacaucgacaagcagcugcugcccauccugaacaagcagagcugcagcauccccaacaucgagaccgugaucgaguuccagcagaagaacaacagacugcuggagaucaccagagaguucagcgugaacgccggcgugaccacccccgugagcaccuacaugcugaccaacagcgagcugcugagccugaucaacgacaugcccaucaccaacgaccagaagaagcugaugagcaacaacgugcagaucgugagacagcagagcuacagcaucaugugcaucaucaaggaggaggugcuggccuacguggugcagcugccccuguacggcgugaucgacacccccugcuggaagcugcacaccagcccccugugcaccaccaacaccaaggagggcagcaacaucugccugaccagaaccgacagaggcugguacugcgacaacgccggcagcgugagcuucuucccccaggccgagaccugcaaggugcagagcaacagaguguucugcgacaccaugaacagccugacccugcccagcgaggugaaccugugcaacguggacaucuucaaccccaaguacgacugcaagaucaugaccagcaagaccgacgugagcagcagcgugaucaccagccugggcgccaucgugagcugcuacggcaagaccaagugcaccgccagcaacaagaacagaggcaucaucaagaccuucagcaacggcugcgacuacgugagcaacaagggcguggacaccgugagcgugggcaacacccuguacugcgugaacaagcaggagggccagagccuguacgugaagggcgagcccaucaucaacuucuacgacccccugguguuccccagcgacgaguucgacgccagcaucagccaggugaacgagaagaucaaccagagccuggccuucaucagaaagagcgacgagcugcugcacaacgugaacgccggcaagagcaccaccaacaucaugaucaccaccaucaucaucgugaucaucgugauccugcugagccugaucgccgugggccugcugcuguacugcaaggccagaagcacccccgugacccugagcaaggaccagcugagcggcaucaacaacaucgccuucagcaacugaggacuagucccuguucccagagcccacuuuuuuuucuuuuuuugaaauaaaauagccugucuuucagaucuaaaaaaaaaaaaaaaaaaaaaaaaaaaaaaaaaaaaaaaaaaaaaaaaaaaaaaaaaaaaaaaaugcaucccccccccccccccccccccccccccccccaaaggcucuuuucagagccaccagaauu

SEQ ID NO: 3238 - RNA, 1897 nt, Artificial Sequence
  mRNA product Design c-5 comprising derived and/or modified sequence from HRSV(A2)__F_DSCav1_mut3 (opt5)
gggagagcggcucggccauuuugucccagucaguccggaggcugcggcugcagaaguaccgccugcggaguaacugcaaagaagcuuaccauggagcugcucauccugaaggccaacgcuauuaccacaauccuuacggccgugaccuucugcuuugcgagcggccagaauauuacagaagaguucuaccaauccaccuguucugcugucagcaaaggguaucugggagcccucagaacaggcugguacaccuccguuaucacaauugaacugucuaacaucaaggagaucaaaugcaaugggaccgacgccaaggugaaacuuauuaagcaggaacuggauaaguauaaaaacgcugugacggaccuccagcugcugaugcagagcacccccgccacaggauccggcucugcuaucuguagcggggucgccgugugcaagguucuccaccuggagggagaggugaauaaaauuaaguccgcgcuucugagcaccaacaaagccgucgugucucucuccaauggcguuagcgugcugacauuuaagguccuugaucugaagaacuacaucgacaaacaacuccugccuauucugaauaagcagucuuguuccaucccgaacauugaaaccgugaucgaguuccagcagaaaaauaaccggcuccuggaaaucacgcgcgaguuuagcgugaaugcuggcgucacaacccccguuucuacauauaugcuuaccaacuccgagcugcucagccugauuaaugauaugccuaucaccaacgaccaaaagaaacuuauguccaacaaugugcagauugugagacagcagucuuacagcaucaugugcauuaucaaggaagagguccuggccuaugugguucaacucccccuguacggggugaucgauacaccuuguuggaaacugcauacgagcccccucugcaccacaaacaccaaggaaggauccaauauuugucugacacggaccgaccgcggcugguacugcgauaacgcugggucugucuccuucuuuccucaggccgagacguguaaggugcagagcaauagaguuuucugcgacacaaugaacucucuuacccugccgagcgaagugaaucucugcaacgucgauaucuuuaaucccaaauaugacuguaagauuaugaccuccaaaacagaugugucuagcuccgucaucaccagccugggagcgauugugucuugcuacggcaagacaaaauguacggccuccaacaagaaucgggggaucaucaagaccuucagcaacggaugcgacuauguuucuaauaaaggcguggacacagucuccgugggcaacacccuuuacuguguuaauaagcaagaggggcagagccuguaugugaaaggagagccuauuaucaacuuuuacgauccccucgucuucccuuccgacgaauuugaugcuucuauuagccaggugaacgagaagaucaaucagucccuggccuucauucgcaaaucugacgaacugcuccacaacgugaaugcuggcaagagcacaaccaacaucaugauuacgaccaucaucauuguuaucauugucauccugcuuucccugauugccguggggcuccugcuguauugcaaggccagaagcacacccgugacccuuucuaaagaucaacucuccggaaucaauaacaucgcuuucagcaauugaggacuagucccuguucccagagcccacuuuuuuuucuuuuuuugaaauaaaauagccugucuuucagaucuaaaaaaaaaaaaaaaaaaaaaaaaaaaaaaaaaaaaaaaaaaaaaaaaaaaaaaaaaaaaaaaaugcaucccccccccccccccccccccccccccccccaaaggcucuuuucagagccaccagaauu

SEQ ID NO: 3239 - RNA, 1897 nt, Artificial Sequence
  mRNA product Design c-5 comprising derived and/or modified sequence from HRSV(A2)__F_DSCav1_mut3 (opt6)
gggagagcggcucggccauuuugucccagucaguccggaggcugcggcugcagaaguaccgccugcggaguaacugcaaagaagcuuaccauggaauuacucauacuaaaagccaaugccauaaccacuauucuaacagcaguaacauucuguuucgccucaggacaaaacauaacagaagaauuuuaucaauccaccuguuccgcagucucgaaaggcuaccuuggcgcacuaagaaccggaugguauacaucaguaauaaccauugaacuaucaaauaucaaagaaauaaaaugcaacggaacugacgcaaaagucaaacuaauaaaacaagaauuagacaaauacaaaaacgccguuacagacuuacaacuacuaaugcaaucaacuccagcaacaggaucaggaucugcuauaugcucaggugucgccguauguaaaguguuacaccucgaaggcgaaguaaacaaaauaaaaucagcacuacuauccacaaauaaagcaguaguaucacuauccaaugguguaucaguacucacauucaaaguacuagacuuaaaaaauuauauagauaaacaauuacuaccaauauuaaacaaacaaucaugcucaauaccaaacauagaaaccgucauugaauuucaacaaaaaaacaaucgacuucuugaaauaacacgagaauuuucaguaaaugccggaguaacaaccccagucucaacauacauguuaaccaacucugaacuccuaagccuaaucaacgacaugcccauaacuaacgaccaaaaaaaacuaauguccaauaauguccaaauaguaagacaacaauccuacucaauaaugugcauuauaaaagaagaaguccucgccuauguaguacaacuacccuuauacggaguaauugacacaccauguuggaaacuacauacaucaccacuaugcaccacuaacacaaaagaaggcuccaacauaugccuaacccgaacagaucgcggaugguauugcgacaacgcaggaaguguauccuucuuuccacaagcagaaacaugcaaaguacaauccaacagaguauucugugacaccaugaacucucuaacacuaccuuccgaaguaaauuuaugcaacguagacauauuuaaucccaaauacgacuguaaaauaaugaccucaaaaacugaugucucaucaucagucauuacaucacucggagcaauagucaguugcuauggaaaaaccaaaugcacagcuaguaacaaaaacagggguauaauaaaaacauuuucaaacggaugcgauuacguaucaaauaaaggaguagacaccguauccguaggaaauacucucuacugcguaaacaaacaagaaggacaaucccuauacguaaaaggcgaaccaaucauuaacuuuuacgacccacuuguauuuccaucagacgaauuugaugccucaauaucccaagucaaugaaaaaauaaaccaaagucuagcauucauccgaaaaucagaugaacuuuuacacaacguaaacgccggaaaaucaacaacaaacaucaugaucacaacaaucaucauaguaauaauaguuauacuacuuuccuuaauagcagucggccuacuacucuacugcaaagcacgauccacaccaguaaccuuaucuaaagaccaacucucaggcauaaacaacauagcauucucaaacuaaggacuagucccuguucccagagcccacuuuuuuuucuuuuuuugaaauaaaauagccugucuuucagaucuaaaaaaaaaaaaaaaaaaaaaaaaaaaaaaaaaaaaaaaaaaaaaaaaaaaaaaaaaaaaaaaaugcaucccccccccccccccccccccccccccccccaaaggcucuuuucagagccaccagaauu

SEQ ID NO: 3240 - RNA, 1897 nt, Artificial Sequence
  mRNA product Design c-5 comprising derived and/or modified sequence from HRSV(A2)__F_DSCav1_mut3 (opt11)
gggagagcggcucggccauuuugucccagucaguccggaggcugcggcugcagaaguaccgccugcggaguaacugcaaagaagcuuaccauggaacuccucauccuuaaagcaaacgccaucacaaccauccucacagcagucacuuucugcuucgcauccggacaaaacaucacagaagaguucuaucaauccacgugcuccgcaguuuccaaaggauaccuuggagccuuacgaaccggcugguacaccuccgucaucaccauagaacucagcaacaucaaagaaaucaaaugcaacggaaccgacgcaaaagucaaacucaucaaacaagaacuagacaaauacaaaaacgcagucaccgaccuccaacuacucaugcaaucaacccccgcaaccggcuccggcuccgccaucugcuccggaguagccguaugcaaaguccuccaccucgaaggcgaaguuaacaagaucaaguccgcacuccuaucaaccaacaaagcagucgucucccuauccaacggcgucuccguauuaacauucaaaguccucgaccucaaaaacuacauagacaaacagcuacuccccauccuaaacaaacaauccugcuccauccccaacaucgaaacugucaucgaguuccaacagaaaaacaaccgccuccuagaaaucacccgagaguucuccguaaacgccggcgucacuacccccgucucuaccuauaugcuaaccaacucugaacuccuaucccuaaucaacgauaugcccauaacuaacgaccaaaagaaacuuauguccaacaacguacaaauaguccggcaacaaucauacucuaucaugugcaucaucaaagaagaaguacuugccuacguuguccaacucccacuauacggcgucauagacacuccaugcuggaaacuucacaccucaccccucugcaccacuaacacuaaagaaggcucuaacaucugccuuacccgcaccgaccgcggaugguacugcgacaacgcaggcucaguuagcuucuucccacaagccgaaaccugcaaaguccagucaaaccgugucuucugcgauaccaugaacucgcucacccucccuuccgaagucaaccucugcaacgucgacaucuucaaccccaaauacgacugcaaaaucaugaccucaaaaaccgacguaucuucuuccgucaucaccucccucggcgccaucguauccugcuacggcaaaaccaaaugcacugcaucaaacaaaaaccgaggcaucaucaaaaccuucucgaacggaugcgacuacguauccaacaagggcgucgacacagucuccguugguaacacccucuacugcgucaacaaacaagaaggccaaucccuauacguaaaaggcgaacccaucaucaacuucuacgacccccucgucuuccccagugacgaauuugacgccuccaucucccaagucaacgaaaagaucaaccaaucccuugccuucauacgcaaauccgacgaacuccuacacaacguuaacgccggaaaaucaacaaccaacaucaugaucacaaccaucauaaucgucauaaucgucauacuccucucccucauagccgucggccugcuauuguacuguaaagcccgcuccacaccagucacacuuucaaaagaccaacucuccgggaucaacaacaucgccuucuccaacuaaggacuagucccuguucccagagcccacuuuuuuuucuuuuuuugaaauaaaauagccugucuuucagaucuaaaaaaaaaaaaaaaaaaaaaaaaaaaaaaaaaaaaaaaaaaaaaaaaaaaaaaaaaaaaaaaaugcaucccccccccccccccccccccccccccccccaaaggcucuuuucagagccaccagaauu

SEQ ID NO: 3241 - RNA, 1906 nt, Artificial Sequence
  mRNA product Design d-1 comprising derived and/or modified sequence from HRSV(A2)__F_DSCav1_mut3 (opt1)
gggagacccgugacccggaaguuguacggcuacgcgacuuucccucccacaaacccucgcgcccuuccuuuccuacuugggcccggcagaaagcuuaccauggagcugcucauccugaaggccaacgccaucaccaccauccugacggcggugaccuucugcuucgccagcggccagaacaucaccgaggaguucuaccaguccacgugcagcgccgucuccaagggguaccucggcgcccugcggaccggcugguacaccuccgugaucaccaucgagcugagcaacaucaaggagaucaagugcaacgggaccgacgccaaggugaagcucaucaagcaggagcuggacaaguacaagaacgcggucacggaccugcagcuccugaugcaguccaccccggcaaccggcuccggcuccgccaucugcagcggcgucgccgugugcaaggugcugcaccucgagggggaggucaacaagaucaagagcgcccugcuguccaccaacaaggccguggugagccucuccaacggcgucagcgugcugaccuucaaggugcuggaccucaagaacuacaucgacaagcagcugcugcccauccugaacaagcagagcugcuccauccccaacaucgagacggugaucgaguuccagcagaagaacaaccggcuccuggagaucacccgcgaguucagcgugaacgccggggucaccacccccguguccacguacaugcugaccaacagcgagcuccugucccugaucaacgacaugccgaucaccaacgaccagaagaagcucaugagcaacaacgugcagaucguccggcagcaguccuacagcaucaugugcaucaucaaggaggaggugcuggcguacgugguccagcugccccucuacggcgugaucgacacccccugcuggaagcugcacacgagcccccugugcaccaccaacaccaaggagggguccaacaucugccucacgcgcaccgaccggggcugguacugcgacaacgccggcagcgucuccuucuucccgcaggccgagaccugcaaggugcagagcaaccgcguguucugcgacaccaugaacucccugacgcugcccagcgagguaaaccucugcaacgucgacaucuucaaccccaaguacgacugcaagaucaugaccuccaagaccgacgugagcuccagcgugaucaccucccugggggccaucgucagcugcuacggcaagacgaagugcaccgccagcaacaagaaccgggggaucaucaagaccuucuccaacggcugcgacuacgugagcaacaagggcguggacaccguguccgucgggaacacccuguacugcgugaacaagcaggagggccagagccucuacgugaagggggagcccaucaucaacuucuacgacccgcuggucuuccccuccgacgaguucgacgcgagcaucucccaggugaacgagaagaucaaccagagccuggccuucauccgcaaguccgacgagcugcuccacaacgugaacgccggcaagagcacgaccaacaucaugaucaccaccaucaucaucgucaucaucgugauccugcugucccucaucgccguggggcugcugcucuacugcaaggcccggagcacgcccgucacccuguccaaggaccagcugagcggcaucaacaacaucgcguucuccaacugaggacuagucccuguucccagagcccacuuuuuuuucuuuuuuugaaauaaaauagccugucuuucagaucuaaaaaaaaaaaaaaaaaaaaaaaaaaaaaaaaaaaaaaaaaaaaaaaaaaaaaaaaaaaaaaaaugcaucccccccccccccccccccccccccccccccaaaggcucuuuucagagccaccagaauu

SEQ ID NO: 3242 - RNA, 1906 nt, Artificial Sequence
  mRNA product Design d-1 comprising derived and/or modified sequence from HRSV(A2)__F_DSCav1_mut3 (opt1)
gggagacccgugacccggaaguuguacggcuacgcgacuuucccucccacaaacccucgcgcccuuccuuuccuacuugggcccggcagaaagcuuaccauggagcugcucauccugaaggccaacgccaucaccaccauccugacggcggugaccuucugcuucgccagcggccagaacaucaccgaggaguucuaccaguccacgugcagcgccgucuccaagggguaccucggcgcccugcgcaccgggugguacaccagcgugaucaccaucgagcuguccaacaucaaggagaucaagugcaacggcaccgacgccaaggugaagcucaucaagcaggagcuggacaaguacaagaacgcggucacggaccugcagcuccugaugcagagcacccccgccaccggguccggcagcgccaucugcuccggcguggccgugugcaagguccugcaccucgagggggaggugaacaagaucaagagcgcgcugcuguccaccaacaaggccguggucagccucuccaacggcgugagcgugcugacguucaagguccuggaccucaagaacuacaucgacaagcagcugcugccgauccucaacaagcaguccugcagcauccccaacaucgagaccgugaucgaguuccagcagaagaacaaccggcugcuggagaucacccgcgaguucuccgugaacgccggggucaccacgcccgugagcaccuacaugcucaccaacuccgagcugcugagccucaucaacgacaugcccaucaccaacgaccagaagaagcugaugagcaacaacgugcagaucguccggcagcaguccuacagcaucaugugcaucaucaaggaggaggugcuggccuacgugguccagcucccgcuguacggcgugaucgacacgcccugcuggaagcugcacaccagcccccucugcaccaccaacacgaaggagggguccaacaucugccugacccgcaccgaccggggcugguacugcgacaacgccggcuccgugagcuucuucccccaggcggagaccugcaagguccaguccaaccgcguguucugcgacacgaugaacagccugacccucccguccgaggucaaccugugcaacguggacaucuucaaccccaaguacgacugcaagaucaugaccagcaagaccgacguguccagcuccgucaucacgagccugggggccaucguguccugcuacggcaagaccaagugcaccgccagcaacaagaaccgggggaucaucaagaccuucuccaacggcugcgacuacgugagcaacaagggcgucgacacgguguccguggggaacacccucuacugcgucaacaagcaggagggccagagccuguacgugaagggggagcccaucaucaacuucuacgacccccugguguucccgagcgacgaguucgacgccuccaucagccaggucaacgagaagaucaaccagucccucgccuucauccgcaagagcgacgagcugcugcacaacgugaacgcgggcaaguccaccaccaacaucaugaucaccacgaucaucaucgugaucaucgucauccuccugagccugaucgccguggggcuccugcuguacugcaaggcccgguccacccccgugacccugagcaaggaccagcucuccggcaucaacaacaucgccuucagcaacugaggacuagucccuguucccagagcccacuuuuuuuucuuuuuuugaaauaaaauagccugucuuucagaucuaaaaaaaaaaaaaaaaaaaaaaaaaaaaaaaaaaaaaaaaaaaaaaaaaaaaaaaaaaaaaaaaugcaucccccccccccccccccccccccccccccccaaaggcucuuuucagagccaccagaauu

SEQ ID NO: 3243 - RNA, 1906 nt, Artificial Sequence
  mRNA product Design d-1 comprising derived and/or modified sequence from HRSV(A2)__F_DSCav1_mut3 (opt2)
gggagacccgugacccggaaguuguacggcuacgcgacuuucccucccacaaacccucgcgcccuuccuuuccuacuugggcccggcagaaagcuuaccauggagcuccucauccucaaggccaacgccaucaccaccauccucaccgccgucaccuucugcuucgccuccggccagaacaucaccgaggaguucuaccaguccaccugcuccgccgucuccaagggcuaccucggcgcccuccgcaccggcugguacaccuccgucaucaccaucgagcucuccaacaucaaggagaucaagugcaacggcaccgacgccaaggucaagcucaucaagcaggagcucgacaaguacaagaacgccgucaccgaccuccagcuccucaugcaguccacccccgccaccggcuccggcuccgccaucugcuccggcgucgccgucugcaagguccuccaccucgagggcgaggucaacaagaucaaguccgcccuccucuccaccaacaaggccgucgucucccucuccaacggcgucuccguccucaccuucaagguccucgaccucaagaacuacaucgacaagcagcuccuccccauccucaacaagcaguccugcuccauccccaacaucgagaccgucaucgaguuccagcagaagaacaaccgccuccucgagaucacccgcgaguucuccgucaacgccggcgucaccacccccgucuccaccuacaugcucaccaacuccgagcuccucucccucaucaacgacaugcccaucaccaacgaccagaagaagcucauguccaacaacguccagaucguccgccagcaguccuacuccaucaugugcaucaucaaggaggagguccucgccuacgucguccagcucccccucuacggcgucaucgacacccccugcuggaagcuccacaccuccccccucugcaccaccaacaccaaggagggcuccaacaucugccucacccgcaccgaccgcggcugguacugcgacaacgccggcuccgucuccuucuucccccaggccgagaccugcaagguccaguccaaccgcgucuucugcgacaccaugaacucccucacccuccccuccgaggucaaccucugcaacgucgacaucuucaaccccaaguacgacugcaagaucaugaccuccaagaccgacgucuccuccuccgucaucaccucccucggcgccaucgucuccugcuacggcaagaccaagugcaccgccuccaacaagaaccgcggcaucaucaagaccuucuccaacggcugcgacuacgucuccaacaagggcgucgacaccgucuccgucggcaacacccucuacugcgucaacaagcaggagggccagucccucuacgucaagggcgagcccaucaucaacuucuacgacccccucgucuuccccuccgacgaguucgacgccuccaucucccaggucaacgagaagaucaaccagucccucgccuucauccgcaaguccgacgagcuccuccacaacgucaacgccggcaaguccaccaccaacaucaugaucaccaccaucaucaucgucaucaucgucauccuccucucccucaucgccgucggccuccuccucuacugcaaggcccgcuccacccccgucacccucuccaaggaccagcucuccggcaucaacaacaucgccuucuccaacugaggacuagucccuguucccagagcccacuuuuuuuucuuuuuuugaaauaaaauagccugucuuucagaucuaaaaaaaaaaaaaaaaaaaaaaaaaaaaaaaaaaaaaaaaaaaaaaaaaaaaaaaaaaaaaaaaugcaucccccccccccccccccccccccccccccccaaaggcucuuuucagagccaccagaauu

SEQ ID NO: 3244 - RNA, 1906 nt, Artificial Sequence
  mRNA product Design d-1 comprising derived and/or modified sequence from HRSV(A2)__F_DSCav1_mut3 (opt3)
gggagacccgugacccggaaguuguacggcuacgcgacuuucccucccacaaacccucgcgcccuuccuuuccuacuugggcccggcagaaagcuuaccauggagcugcucauccuuaaggccaacgcuauuaccacaauacugacugcagugacguucugcuuugccagcggccagaauaucaccgaagaguucuaccaauccacauguucugcggucucaaaaggguauuugggagcuuuaagaacugguugguacaccaguguuauuacaaucgaacugagcaacauuaaggagaucaaaugcaauggcaccgacgccaaggugaaacuaauaaagcaggaacucgauaaguauaaaaacgcaguaacugaccugcagcuucugaugcaguccacacccgccaccgggucuggaucggcuaucuguucaggcguggcagucugcaagguguugcaccucgagggugagguuaauaaaauuaagagcgcccugcugaguacgaacaaagcuguggucucccucucuaauggggugagcguauuaacuuuuaagguucuggaucuuaagaacuacaucgacaaacaauugcugccuauucuaaauaagcaguccuguucaaucccaaacauagaaaccgugauugaguuccagcagaaaaauaacaggcuccuggaaaucacacgggaguuuagugucaaugccggagugacuaccccggugagcacauauaugcuuaccaacucugagcuguugucccucauuaaugauaugcccaucacgaacgaccaaaagaaacugaugucaaacaauguccagaucguucgccagcagagcuacaguauuaugugcauaaucaaggaagagguguuagcguauguagugcaacugccucucuacggcgucauugauacuccauguuggaaacuucauacaucuccccugugcaccacuaacacaaaggaaggcuccaauaucuguuugacccgaacggaccgugggugguacugcgauaacgcaggaagcgugucguucuuuccucaggccgagaccuguaagguucagucuaauagaguguucugcgacacaaugaacucccuaacucugccaucagaagucaaucucugcaacguggauauauuuaaucccaaauaugacuguaagauuaugaccaguaaaacagauguaagcuccucuguuaucacuagccugggugcuaucgugucaugcuacggcaagaccaaauguacagccaguaacaagaauagggggauuaucaagaccuucuccaacggaugcgacuaugucagcaauaaaggcguggacacugucucuguggguaacacgcuuuacuguguuaauaagcaagaggggcagucacuguaugugaaaggagagccuauuauaaacuuuuacgauccauugguauucccgagugacgaauuugaugcaagcaucucccaggucaacgagaagauuaaucagucucucgcuuucauccggaaaucggacgaacuguuacacaacgugaaugccggcaagagcacaaccaacaucaugauuacuaccauaaucauuguuaucauugugauccugcuaucccucauagcggucggccugcuuuuguauugcaaggcccgcucaacacccgugacccugaguaaagaucaacucucugggaucaauaacauugcauucagcaauugaggacuagucccuguucccagagcccacuuuuuuuucuuuuuuugaaauaaaauagccugucuuucagaucuaaaaaaaaaaaaaaaaaaaaaaaaaaaaaaaaaaaaaaaaaaaaaaaaaaaaaaaaaaaaaaaaugcaucccccccccccccccccccccccccccccccaaaggcucuuuucagagccaccagaauu

SEQ ID NO: 3245 - RNA, 1906 nt, Artificial Sequence
  mRNA product Design d-1 comprising derived and/or modified sequence from HRSV(A2)__F_DSCav1_mut3 (opt4)
gggagacccgugacccggaaguuguacggcuacgcgacuuucccucccacaaacccucgcgcccuuccuuuccuacuugggcccggcagaaagcuuaccauggagcugcugauccugaaggccaacgccaucaccaccauccugaccgccgugaccuucugcuucgccagcggccagaacaucaccgaggaguucuaccagagcaccugcagcgccgugagcaagggcuaccugggcgcccugagaaccggcugguacaccagcgugaucaccaucgagcugagcaacaucaaggagaucaagugcaacggcaccgacgccaaggugaagcugaucaagcaggagcuggacaaguacaagaacgccgugaccgaccugcagcugcugaugcagagcacccccgccaccggcagcggcagcgccaucugcagcggcguggccgugugcaaggugcugcaccuggagggcgaggugaacaagaucaagagcgcccugcugagcaccaacaaggccguggugagccugagcaacggcgugagcgugcugaccuucaaggugcuggaccugaagaacuacaucgacaagcagcugcugcccauccugaacaagcagagcugcagcauccccaacaucgagaccgugaucgaguuccagcagaagaacaacagacugcuggagaucaccagagaguucagcgugaacgccggcgugaccacccccgugagcaccuacaugcugaccaacagcgagcugcugagccugaucaacgacaugcccaucaccaacgaccagaagaagcugaugagcaacaacgugcagaucgugagacagcagagcuacagcaucaugugcaucaucaaggaggaggugcuggccuacguggugcagcugccccuguacggcgugaucgacacccccugcuggaagcugcacaccagcccccugugcaccaccaacaccaaggagggcagcaacaucugccugaccagaaccgacagaggcugguacugcgacaacgccggcagcgugagcuucuucccccaggccgagaccugcaaggugcagagcaacagaguguucugcgacaccaugaacagccugacccugcccagcgaggugaaccugugcaacguggacaucuucaaccccaaguacgacugcaagaucaugaccagcaagaccgacgugagcagcagcgugaucaccagccugggcgccaucgugagcugcuacggcaagaccaagugcaccgccagcaacaagaacagaggcaucaucaagaccuucagcaacggcugcgacuacgugagcaacaagggcguggacaccgugagcgugggcaacacccuguacugcgugaacaagcaggagggccagagccuguacgugaagggcgagcccaucaucaacuucuacgacccccugguguuccccagcgacgaguucgacgccagcaucagccaggugaacgagaagaucaaccagagccuggccuucaucagaaagagcgacgagcugcugcacaacgugaacgccggcaagagcaccaccaacaucaugaucaccaccaucaucaucgugaucaucgugauccugcugagccugaucgccgugggccugcugcuguacugcaaggccagaagcacccccgugacccugagcaaggaccagcugagcggcaucaacaacaucgccuucagcaacugaggacuagucccuguucccagagcccacuuuuuuuucuuuuuuugaaauaaaauagccugucuuucagaucuaaaaaaaaaaaaaaaaaaaaaaaaaaaaaaaaaaaaaaaaaaaaaaaaaaaaaaaaaaaaaaaaugcaucccccccccccccccccccccccccccccccaaaggcucuuuucagagccaccagaauu

SEQ ID NO: 3246 - RNA, 1906 nt, Artificial Sequence
  mRNA product Design d-1 comprising derived and/or modified sequence from HRSV(A2)__F_DSCav1_mut3 (opt5)
gggagacccgugacccggaaguuguacggcuacgcgacuuucccucccacaaacccucgcgcccuuccuuuccuacuugggcccggcagaaagcuuaccauggagcugcucauccugaaggccaacgcuauuaccacaauccuuacggccgugaccuucugcuuugcgagcggccagaauauuacagaagaguucuaccaauccaccuguucugcugucagcaaaggguaucugggagcccucagaacaggcugguacaccuccguuaucacaauugaacugucuaacaucaaggagaucaaaugcaaugggaccgacgccaaggugaaacuuauuaagcaggaacuggauaaguauaaaaacgcugugacggaccuccagcugcugaugcagagcacccccgccacaggauccggcucugcuaucuguagcggggucgccgugugcaagguucuccaccuggagggagaggugaauaaaauuaaguccgcgcuucugagcaccaacaaagccgucgugucucucuccaauggcguuagcgugcugacauuuaagguccuugaucugaagaacuacaucgacaaacaacuccugccuauucugaauaagcagucuuguuccaucccgaacauugaaaccgugaucgaguuccagcagaaaaauaaccggcuccuggaaaucacgcgcgaguuuagcgugaaugcuggcgucacaacccccguuucuacauauaugcuuaccaacuccgagcugcucagccugauuaaugauaugccuaucaccaacgaccaaaagaaacuuauguccaacaaugugcagauugugagacagcagucuuacagcaucaugugcauuaucaaggaagagguccuggccuaugugguucaacucccccuguacggggugaucgauacaccuuguuggaaacugcauacgagcccccucugcaccacaaacaccaaggaaggauccaauauuugucugacacggaccgaccgcggcugguacugcgauaacgcugggucugucuccuucuuuccucaggccgagacguguaaggugcagagcaauagaguuuucugcgacacaaugaacucucuuacccugccgagcgaagugaaucucugcaacgucgauaucuuuaaucccaaauaugacuguaagauuaugaccuccaaaacagaugugucuagcuccgucaucaccagccugggagcgauugugucuugcuacggcaagacaaaauguacggccuccaacaagaaucgggggaucaucaagaccuucagcaacggaugcgacuauguuucuaauaaaggcguggacacagucuccgugggcaacacccuuuacuguguuaauaagcaagaggggcagagccuguaugugaaaggagagccuauuaucaacuuuuacgauccccucgucuucccuuccgacgaauuugaugcuucuauuagccaggugaacgagaagaucaaucagucccuggccuucauucgcaaaucugacgaacugcuccacaacgugaaugcuggcaagagcacaaccaacaucaugauuacgaccaucaucauuguuaucauugucauccugcuuucccugauugccguggggcuccugcuguauugcaaggccagaagcacacccgugacccuuucuaaagaucaacucuccggaaucaauaacaucgcuuucagcaauugaggacuagucccuguucccagagcccacuuuuuuuucuuuuuuugaaauaaaauagccugucuuucagaucuaaaaaaaaaaaaaaaaaaaaaaaaaaaaaaaaaaaaaaaaaaaaaaaaaaaaaaaaaaaaaaaaugcaucccccccccccccccccccccccccccccccaaaggcucuuuucagagccaccagaauu

SEQ ID NO: 3247 - RNA, 1906 nt, Artificial Sequence
  mRNA product Design d-1 comprising derived and/or modified sequence from HRSV(A2)__F_DSCav1_mut3 (opt6)
gggagacccgugacccggaaguuguacggcuacgcgacuuucccucccacaaacccucgcgcccuuccuuuccuacuugggcccggcagaaagcuuaccauggaauuacucauacuaaaagccaaugccauaaccacuauucuaacagcaguaacauucuguuucgccucaggacaaaacauaacagaagaauuuuaucaauccaccuguuccgcagucucgaaaggcuaccuuggcgcacuaagaaccggaugguauacaucaguaauaaccauugaacuaucaaauaucaaagaaauaaaaugcaacggaacugacgcaaaagucaaacuaauaaaacaagaauuagacaaauacaaaaacgccguuacagacuuacaacuacuaaugcaaucaacuccagcaacaggaucaggaucugcuauaugcucaggugucgccguauguaaaguguuacaccucgaaggcgaaguaaacaaaauaaaaucagcacuacuauccacaaauaaagcaguaguaucacuauccaaugguguaucaguacucacauucaaaguacuagacuuaaaaaauuauauagauaaacaauuacuaccaauauuaaacaaacaaucaugcucaauaccaaacauagaaaccgucauugaauuucaacaaaaaaacaaucgacuucuugaaauaacacgagaauuuucaguaaaugccggaguaacaaccccagucucaacauacauguuaaccaacucugaacuccuaagccuaaucaacgacaugcccauaacuaacgaccaaaaaaaacuaauguccaauaauguccaaauaguaagacaacaauccuacucaauaaugugcauuauaaaagaagaaguccucgccuauguaguacaacuacccuuauacggaguaauugacacaccauguuggaaacuacauacaucaccacuaugcaccacuaacacaaaagaaggcuccaacauaugccuaacccgaacagaucgcggaugguauugcgacaacgcaggaaguguauccuucuuuccacaagcagaaacaugcaaaguacaauccaacagaguauucugugacaccaugaacucucuaacacuaccuuccgaaguaaauuuaugcaacguagacauauuuaaucccaaauacgacuguaaaauaaugaccucaaaaacugaugucucaucaucagucauuacaucacucggagcaauagucaguugcuauggaaaaaccaaaugcacagcuaguaacaaaaacagggguauaauaaaaacauuuucaaacggaugcgauuacguaucaaauaaaggaguagacaccguauccguaggaaauacucucuacugcguaaacaaacaagaaggacaaucccuauacguaaaaggcgaaccaaucauuaacuuuuacgacccacuuguauuuccaucagacgaauuugaugccucaauaucccaagucaaugaaaaaauaaaccaaagucuagcauucauccgaaaaucagaugaacuuuuacacaacguaaacgccggaaaaucaacaacaaacaucaugaucacaacaaucaucauaguaauaauaguuauacuacuuuccuuaauagcagucggccuacuacucuacugcaaagcacgauccacaccaguaaccuuaucuaaagaccaacucucaggcauaaacaacauagcauucucaaacuaaggacuagucccuguucccagagcccacuuuuuuuucuuuuuuugaaauaaaauagccugucuuucagaucuaaaaaaaaaaaaaaaaaaaaaaaaaaaaaaaaaaaaaaaaaaaaaaaaaaaaaaaaaaaaaaaaugcaucccccccccccccccccccccccccccccccaaaggcucuuuucagagccaccagaauu

SEQ ID NO: 3248 - RNA, 1906 nt, Artificial Sequence
  mRNA product Design d-1 comprising derived and/or modified sequence from HRSV(A2)__F_DSCav1_mut3 (opt11)
gggagacccgugacccggaaguuguacggcuacgcgacuuucccucccacaaacccucgcgcccuuccuuuccuacuugggcccggcagaaagcuuaccauggaacuccucauccuuaaagcaaacgccaucacaaccauccucacagcagucacuuucugcuucgcauccggacaaaacaucacagaagaguucuaucaauccacgugcuccgcaguuuccaaaggauaccuuggagccuuacgaaccggcugguacaccuccgucaucaccauagaacucagcaacaucaaagaaaucaaaugcaacggaaccgacgcaaaagucaaacucaucaaacaagaacuagacaaauacaaaaacgcagucaccgaccuccaacuacucaugcaaucaacccccgcaaccggcuccggcuccgccaucugcuccggaguagccguaugcaaaguccuccaccucgaaggcgaaguuaacaagaucaaguccgcacuccuaucaaccaacaaagcagucgucucccuauccaacggcgucuccguauuaacauucaaaguccucgaccucaaaaacuacauagacaaacagcuacuccccauccuaaacaaacaauccugcuccauccccaacaucgaaacugucaucgaguuccaacagaaaaacaaccgccuccuagaaaucacccgagaguucuccguaaacgccggcgucacuacccccgucucuaccuauaugcuaaccaacucugaacuccuaucccuaaucaacgauaugcccauaacuaacgaccaaaagaaacuuauguccaacaacguacaaauaguccggcaacaaucauacucuaucaugugcaucaucaaagaagaaguacuugccuacguuguccaacucccacuauacggcgucauagacacuccaugcuggaaacuucacaccucaccccucugcaccacuaacacuaaagaaggcucuaacaucugccuuacccgcaccgaccgcggaugguacugcgacaacgcaggcucaguuagcuucuucccacaagccgaaaccugcaaaguccagucaaaccgugucuucugcgauaccaugaacucgcucacccucccuuccgaagucaaccucugcaacgucgacaucuucaaccccaaauacgacugcaaaaucaugaccucaaaaaccgacguaucuucuuccgucaucaccucccucggcgccaucguauccugcuacggcaaaaccaaaugcacugcaucaaacaaaaaccgaggcaucaucaaaaccuucucgaacggaugcgacuacguauccaacaagggcgucgacacagucuccguugguaacacccucuacugcgucaacaaacaagaaggccaaucccuauacguaaaaggcgaacccaucaucaacuucuacgacccccucgucuuccccagugacgaauuugacgccuccaucucccaagucaacgaaaagaucaaccaaucccuugccuucauacgcaaauccgacgaacuccuacacaacguuaacgccggaaaaucaacaaccaacaucaugaucacaaccaucauaaucgucauaaucgucauacuccucucccucauagccgucggccugcuauuguacuguaaagcccgcuccacaccagucacacuuucaaaagaccaacucuccgggaucaacaacaucgccuucuccaacuaaggacuagucccuguucccagagcccacuuuuuuuucuuuuuuugaaauaaaauagccugucuuucagaucuaaaaaaaaaaaaaaaaaaaaaaaaaaaaaaaaaaaaaaaaaaaaaaaaaaaaaaaaaaaaaaaaugcaucccccccccccccccccccccccccccccccaaaggcucuuuucagagccaccagaauu

SEQ ID NO: 3249 - RNA, 1961 nt, Artificial Sequence
  mRNA product Design d-2 comprising derived and/or modified sequence from HRSV(A2)__F_DSCav1_mut3 (opt1)
gggagagcggcucggccauuuugucccagucaguccggaggcugcggcugcagaaguaccgccugcggaguaacugcaaagaagcuuaccauggagcugcucauccugaaggccaacgccaucaccaccauccugacggcggugaccuucugcuucgccagcggccagaacaucaccgaggaguucuaccaguccacgugcagcgccgucuccaagggguaccucggcgcccugcggaccggcugguacaccuccgugaucaccaucgagcugagcaacaucaaggagaucaagugcaacgggaccgacgccaaggugaagcucaucaagcaggagcuggacaaguacaagaacgcggucacggaccugcagcuccugaugcaguccaccccggcaaccggcuccggcuccgccaucugcagcggcgucgccgugugcaaggugcugcaccucgagggggaggucaacaagaucaagagcgcccugcuguccaccaacaaggccguggugagccucuccaacggcgucagcgugcugaccuucaaggugcuggaccucaagaacuacaucgacaagcagcugcugcccauccugaacaagcagagcugcuccauccccaacaucgagacggugaucgaguuccagcagaagaacaaccggcuccuggagaucacccgcgaguucagcgugaacgccggggucaccacccccguguccacguacaugcugaccaacagcgagcuccugucccugaucaacgacaugccgaucaccaacgaccagaagaagcucaugagcaacaacgugcagaucguccggcagcaguccuacagcaucaugugcaucaucaaggaggaggugcuggcguacgugguccagcugccccucuacggcgugaucgacacccccugcuggaagcugcacacgagcccccugugcaccaccaacaccaaggagggguccaacaucugccucacgcgcaccgaccggggcugguacugcgacaacgccggcagcgucuccuucuucccgcaggccgagaccugcaaggugcagagcaaccgcguguucugcgacaccaugaacucccugacgcugcccagcgagguaaaccucugcaacgucgacaucuucaaccccaaguacgacugcaagaucaugaccuccaagaccgacgugagcuccagcgugaucaccucccugggggccaucgucagcugcuacggcaagacgaagugcaccgccagcaacaagaaccgggggaucaucaagaccuucuccaacggcugcgacuacgugagcaacaagggcguggacaccguguccgucgggaacacccuguacugcgugaacaagcaggagggccagagccucuacgugaagggggagcccaucaucaacuucuacgacccgcuggucuuccccuccgacgaguucgacgcgagcaucucccaggugaacgagaagaucaaccagagccuggccuucauccgcaaguccgacgagcugcuccacaacgugaacgccggcaagagcacgaccaacaucaugaucaccaccaucaucaucgucaucaucgugauccugcugucccucaucgccguggggcugcugcucuacugcaaggcccggagcacgcccgucacccuguccaaggaccagcugagcggcaucaacaacaucgcguucuccaacugaggacuaguaauaaggaaacuguaugaaugucugugggcaggaagugaagagauccuucuguaaagguuuuuggaauuaugucugcugaauaauaaacuuuuuugaaauaauaaaucugguagaaaaaugagaucuaaaaaaaaaaaaaaaaaaaaaaaaaaaaaaaaaaaaaaaaaaaaaaaaaaaaaaaaaaaaaaaaugcaucccccccccccccccccccccccccccccccaaaggcucuuuucagagccaccagaauu

SEQ ID NO: 3250 - RNA, 1961 nt, Artificial Sequence
  mRNA product Design d-2 comprising derived and/or modified sequence from HRSV(A2)__F_DSCav1_mut3 (opt1)
gggagagcggcucggccauuuugucccagucaguccggaggcugcggcugcagaaguaccgccugcggaguaacugcaaagaagcuuaccauggagcugcucauccugaaggccaacgccaucaccaccauccugacggcggugaccuucugcuucgccagcggccagaacaucaccgaggaguucuaccaguccacgugcagcgccgucuccaagggguaccucggcgcccugcgcaccgggugguacaccagcgugaucaccaucgagcuguccaacaucaaggagaucaagugcaacggcaccgacgccaaggugaagcucaucaagcaggagcuggacaaguacaagaacgcggucacggaccugcagcuccugaugcagagcacccccgccaccggguccggcagcgccaucugcuccggcguggccgugugcaagguccugcaccucgagggggaggugaacaagaucaagagcgcgcugcuguccaccaacaaggccguggucagccucuccaacggcgugagcgugcugacguucaagguccuggaccucaagaacuacaucgacaagcagcugcugccgauccucaacaagcaguccugcagcauccccaacaucgagaccgugaucgaguuccagcagaagaacaaccggcugcuggagaucacccgcgaguucuccgugaacgccggggucaccacgcccgugagcaccuacaugcucaccaacuccgagcugcugagccucaucaacgacaugcccaucaccaacgaccagaagaagcugaugagcaacaacgugcagaucguccggcagcaguccuacagcaucaugugcaucaucaaggaggaggugcuggccuacgugguccagcucccgcuguacggcgugaucgacacgcccugcuggaagcugcacaccagcccccucugcaccaccaacacgaaggagggguccaacaucugccugacccgcaccgaccggggcugguacugcgacaacgccggcuccgugagcuucuucccccaggcggagaccugcaagguccaguccaaccgcguguucugcgacacgaugaacagccugacccucccguccgaggucaaccugugcaacguggacaucuucaaccccaaguacgacugcaagaucaugaccagcaagaccgacguguccagcuccgucaucacgagccugggggccaucguguccugcuacggcaagaccaagugcaccgccagcaacaagaaccgggggaucaucaagaccuucuccaacggcugcgacuacgugagcaacaagggcgucgacacgguguccguggggaacacccucuacugcgucaacaagcaggagggccagagccuguacgugaagggggagcccaucaucaacuucuacgacccccugguguucccgagcgacgaguucgacgccuccaucagccaggucaacgagaagaucaaccagucccucgccuucauccgcaagagcgacgagcugcugcacaacgugaacgcgggcaaguccaccaccaacaucaugaucaccacgaucaucaucgugaucaucgucauccuccugagccugaucgccguggggcuccugcuguacugcaaggcccgguccacccccgugacccugagcaaggaccagcucuccggcaucaacaacaucgccuucagcaacugaggacuaguaauaaggaaacuguaugaaugucugugggcaggaagugaagagauccuucuguaaagguuuuuggaauuaugucugcugaauaauaaacuuuuuugaaauaauaaaucugguagaaaaaugagaucuaaaaaaaaaaaaaaaaaaaaaaaaaaaaaaaaaaaaaaaaaaaaaaaaaaaaaaaaaaaaaaaaugcaucccccccccccccccccccccccccccccccaaaggcucuuuucagagccaccagaauu

SEQ ID NO: 3251 - RNA, 1961 nt, Artificial Sequence
  mRNA product Design d-2 comprising derived and/or modified sequence from HRSV(A2)__F_DSCav1_mut3 (opt2)
gggagagcggcucggccauuuugucccagucaguccggaggcugcggcugcagaaguaccgccugcggaguaacugcaaagaagcuuaccauggagcuccucauccucaaggccaacgccaucaccaccauccucaccgccgucaccuucugcuucgccuccggccagaacaucaccgaggaguucuaccaguccaccugcuccgccgucuccaagggcuaccucggcgcccuccgcaccggcugguacaccuccgucaucaccaucgagcucuccaacaucaaggagaucaagugcaacggcaccgacgccaaggucaagcucaucaagcaggagcucgacaaguacaagaacgccgucaccgaccuccagcuccucaugcaguccacccccgccaccggcuccggcuccgccaucugcuccggcgucgccgucugcaagguccuccaccucgagggcgaggucaacaagaucaaguccgcccuccucuccaccaacaaggccgucgucucccucuccaacggcgucuccguccucaccuucaagguccucgaccucaagaacuacaucgacaagcagcuccuccccauccucaacaagcaguccugcuccauccccaacaucgagaccgucaucgaguuccagcagaagaacaaccgccuccucgagaucacccgcgaguucuccgucaacgccggcgucaccacccccgucuccaccuacaugcucaccaacuccgagcuccucucccucaucaacgacaugcccaucaccaacgaccagaagaagcucauguccaacaacguccagaucguccgccagcaguccuacuccaucaugugcaucaucaaggaggagguccucgccuacgucguccagcucccccucuacggcgucaucgacacccccugcuggaagcuccacaccuccccccucugcaccaccaacaccaaggagggcuccaacaucugccucacccgcaccgaccgcggcugguacugcgacaacgccggcuccgucuccuucuucccccaggccgagaccugcaagguccaguccaaccgcgucuucugcgacaccaugaacucccucacccuccccuccgaggucaaccucugcaacgucgacaucuucaaccccaaguacgacugcaagaucaugaccuccaagaccgacgucuccuccuccgucaucaccucccucggcgccaucgucuccugcuacggcaagaccaagugcaccgccuccaacaagaaccgcggcaucaucaagaccuucuccaacggcugcgacuacgucuccaacaagggcgucgacaccgucuccgucggcaacacccucuacugcgucaacaagcaggagggccagucccucuacgucaagggcgagcccaucaucaacuucuacgacccccucgucuuccccuccgacgaguucgacgccuccaucucccaggucaacgagaagaucaaccagucccucgccuucauccgcaaguccgacgagcuccuccacaacgucaacgccggcaaguccaccaccaacaucaugaucaccaccaucaucaucgucaucaucgucauccuccucucccucaucgccgucggccuccuccucuacugcaaggcccgcuccacccccgucacccucuccaaggaccagcucuccggcaucaacaacaucgccuucuccaacugaggacuaguaauaaggaaacuguaugaaugucugugggcaggaagugaagagauccuucuguaaagguuuuuggaauuaugucugcugaauaauaaacuuuuuugaaauaauaaaucugguagaaaaaugagaucuaaaaaaaaaaaaaaaaaaaaaaaaaaaaaaaaaaaaaaaaaaaaaaaaaaaaaaaaaaaaaaaaugcaucccccccccccccccccccccccccccccccaaaggcucuuuucagagccaccagaauu

SEQ ID NO: 3252 - RNA, 1961 nt, Artificial Sequence
  mRNA product Design d-2 comprising derived and/or modified sequence from HRSV(A2)__F_DSCav1_mut3 (opt3)
gggagagcggcucggccauuuugucccagucaguccggaggcugcggcugcagaaguaccgccugcggaguaacugcaaagaagcuuaccauggagcugcucauccuuaaggccaacgcuauuaccacaauacugacugcagugacguucugcuuugccagcggccagaauaucaccgaagaguucuaccaauccacauguucugcggucucaaaaggguauuugggagcuuuaagaacugguugguacaccaguguuauuacaaucgaacugagcaacauuaaggagaucaaaugcaauggcaccgacgccaaggugaaacuaauaaagcaggaacucgauaaguauaaaaacgcaguaacugaccugcagcuucugaugcaguccacacccgccaccgggucuggaucggcuaucuguucaggcguggcagucugcaagguguugcaccucgagggugagguuaauaaaauuaagagcgcccugcugaguacgaacaaagcuguggucucccucucuaauggggugagcguauuaacuuuuaagguucuggaucuuaagaacuacaucgacaaacaauugcugccuauucuaaauaagcaguccuguucaaucccaaacauagaaaccgugauugaguuccagcagaaaaauaacaggcuccuggaaaucacacgggaguuuagugucaaugccggagugacuaccccggugagcacauauaugcuuaccaacucugagcuguugucccucauuaaugauaugcccaucacgaacgaccaaaagaaacugaugucaaacaauguccagaucguucgccagcagagcuacaguauuaugugcauaaucaaggaagagguguuagcguauguagugcaacugccucucuacggcgucauugauacuccauguuggaaacuucauacaucuccccugugcaccacuaacacaaaggaaggcuccaauaucuguuugacccgaacggaccgugggugguacugcgauaacgcaggaagcgugucguucuuuccucaggccgagaccuguaagguucagucuaauagaguguucugcgacacaaugaacucccuaacucugccaucagaagucaaucucugcaacguggauauauuuaaucccaaauaugacuguaagauuaugaccaguaaaacagauguaagcuccucuguuaucacuagccugggugcuaucgugucaugcuacggcaagaccaaauguacagccaguaacaagaauagggggauuaucaagaccuucuccaacggaugcgacuaugucagcaauaaaggcguggacacugucucuguggguaacacgcuuuacuguguuaauaagcaagaggggcagucacuguaugugaaaggagagccuauuauaaacuuuuacgauccauugguauucccgagugacgaauuugaugcaagcaucucccaggucaacgagaagauuaaucagucucucgcuuucauccggaaaucggacgaacuguuacacaacgugaaugccggcaagagcacaaccaacaucaugauuacuaccauaaucauuguuaucauugugauccugcuaucccucauagcggucggccugcuuuuguauugcaaggcccgcucaacacccgugacccugaguaaagaucaacucucugggaucaauaacauugcauucagcaauugaggacuaguaauaaggaaacuguaugaaugucugugggcaggaagugaagagauccuucuguaaagguuuuuggaauuaugucugcugaauaauaaacuuuuuugaaauaauaaaucugguagaaaaaugagaucuaaaaaaaaaaaaaaaaaaaaaaaaaaaaaaaaaaaaaaaaaaaaaaaaaaaaaaaaaaaaaaaaugcaucccccccccccccccccccccccccccccccaaaggcucuuuucagagccaccagaauu

SEQ ID NO: 3253 - RNA, 1961 nt, Artificial Sequence
  mRNA product Design d-2 comprising derived and/or modified sequence from HRSV(A2)__F_DSCav1_mut3 (opt4)
gggagagcggcucggccauuuugucccagucaguccggaggcugcggcugcagaaguaccgccugcggaguaacugcaaagaagcuuaccauggagcugcugauccugaaggccaacgccaucaccaccauccugaccgccgugaccuucugcuucgccagcggccagaacaucaccgaggaguucuaccagagcaccugcagcgccgugagcaagggcuaccugggcgcccugagaaccggcugguacaccagcgugaucaccaucgagcugagcaacaucaaggagaucaagugcaacggcaccgacgccaaggugaagcugaucaagcaggagcuggacaaguacaagaacgccgugaccgaccugcagcugcugaugcagagcacccccgccaccggcagcggcagcgccaucugcagcggcguggccgugugcaaggugcugcaccuggagggcgaggugaacaagaucaagagcgcccugcugagcaccaacaaggccguggugagccugagcaacggcgugagcgugcugaccuucaaggugcuggaccugaagaacuacaucgacaagcagcugcugcccauccugaacaagcagagcugcagcauccccaacaucgagaccgugaucgaguuccagcagaagaacaacagacugcuggagaucaccagagaguucagcgugaacgccggcgugaccacccccgugagcaccuacaugcugaccaacagcgagcugcugagccugaucaacgacaugcccaucaccaacgaccagaagaagcugaugagcaacaacgugcagaucgugagacagcagagcuacagcaucaugugcaucaucaaggaggaggugcuggccuacguggugcagcugccccuguacggcgugaucgacacccccugcuggaagcugcacaccagcccccugugcaccaccaacaccaaggagggcagcaacaucugccugaccagaaccgacagaggcugguacugcgacaacgccggcagcgugagcuucuucccccaggccgagaccugcaaggugcagagcaacagaguguucugcgacaccaugaacagccugacccugcccagcgaggugaaccugugcaacguggacaucuucaaccccaaguacgacugcaagaucaugaccagcaagaccgacgugagcagcagcgugaucaccagccugggcgccaucgugagcugcuacggcaagaccaagugcaccgccagcaacaagaacagaggcaucaucaagaccuucagcaacggcugcgacuacgugagcaacaagggcguggacaccgugagcgugggcaacacccuguacugcgugaacaagcaggagggccagagccuguacgugaagggcgagcccaucaucaacuucuacgacccccugguguuccccagcgacgaguucgacgccagcaucagccaggugaacgagaagaucaaccagagccuggccuucaucagaaagagcgacgagcugcugcacaacgugaacgccggcaagagcaccaccaacaucaugaucaccaccaucaucaucgugaucaucgugauccugcugagccugaucgccgugggccugcugcuguacugcaaggccagaagcacccccgugacccugagcaaggaccagcugagcggcaucaacaacaucgccuucagcaacugaggacuaguaauaaggaaacuguaugaaugucugugggcaggaagugaagagauccuucuguaaagguuuuuggaauuaugucugcugaauaauaaacuuuuuugaaauaauaaaucugguagaaaaaugagaucuaaaaaaaaaaaaaaaaaaaaaaaaaaaaaaaaaaaaaaaaaaaaaaaaaaaaaaaaaaaaaaaaugcaucccccccccccccccccccccccccccccccaaaggcucuuuucagagccaccagaauu

SEQ ID NO: 3254 - RNA, 1961 nt, Artificial Sequence
  mRNA product Design d-2 comprising derived and/or modified sequence from HRSV(A2)__F_DSCav1_mut3 (opt5)
gggagagcggcucggccauuuugucccagucaguccggaggcugcggcugcagaaguaccgccugcggaguaacugcaaagaagcuuaccauggagcugcucauccugaaggccaacgcuauuaccacaauccuuacggccgugaccuucugcuuugcgagcggccagaauauuacagaagaguucuaccaauccaccuguucugcugucagcaaaggguaucugggagcccucagaacaggcugguacaccuccguuaucacaauugaacugucuaacaucaaggagaucaaaugcaaugggaccgacgccaaggugaaacuuauuaagcaggaacuggauaaguauaaaaacgcugugacggaccuccagcugcugaugcagagcacccccgccacaggauccggcucugcuaucuguagcggggucgccgugugcaagguucuccaccuggagggagaggugaauaaaauuaaguccgcgcuucugagcaccaacaaagccgucgugucucucuccaauggcguuagcgugcugacauuuaagguccuugaucugaagaacuacaucgacaaacaacuccugccuauucugaauaagcagucuuguuccaucccgaacauugaaaccgugaucgaguuccagcagaaaaauaaccggcuccuggaaaucacgcgcgaguuuagcgugaaugcuggcgucacaacccccguuucuacauauaugcuuaccaacuccgagcugcucagccugauuaaugauaugccuaucaccaacgaccaaaagaaacuuauguccaacaaugugcagauugugagacagcagucuuacagcaucaugugcauuaucaaggaagagguccuggccuaugugguucaacucccccuguacggggugaucgauacaccuuguuggaaacugcauacgagcccccucugcaccacaaacaccaaggaaggauccaauauuugucugacacggaccgaccgcggcugguacugcgauaacgcugggucugucuccuucuuuccucaggccgagacguguaaggugcagagcaauagaguuuucugcgacacaaugaacucucuuacccugccgagcgaagugaaucucugcaacgucgauaucuuuaaucccaaauaugacuguaagauuaugaccuccaaaacagaugugucuagcuccgucaucaccagccugggagcgauugugucuugcuacggcaagacaaaauguacggccuccaacaagaaucgggggaucaucaagaccuucagcaacggaugcgacuauguuucuaauaaaggcguggacacagucuccgugggcaacacccuuuacuguguuaauaagcaagaggggcagagccuguaugugaaaggagagccuauuaucaacuuuuacgauccccucgucuucccuuccgacgaauuugaugcuucuauuagccaggugaacgagaagaucaaucagucccuggccuucauucgcaaaucugacgaacugcuccacaacgugaaugcuggcaagagcacaaccaacaucaugauuacgaccaucaucauuguuaucauugucauccugcuuucccugauugccguggggcuccugcuguauugcaaggccagaagcacacccgugacccuuucuaaagaucaacucuccggaaucaauaacaucgcuuucagcaauugaggacuaguaauaaggaaacuguaugaaugucugugggcaggaagugaagagauccuucuguaaagguuuuuggaauuaugucugcugaauaauaaacuuuuuugaaauaauaaaucugguagaaaaaugagaucuaaaaaaaaaaaaaaaaaaaaaaaaaaaaaaaaaaaaaaaaaaaaaaaaaaaaaaaaaaaaaaaaugcaucccccccccccccccccccccccccccccccaaaggcucuuuucagagccaccagaauu

SEQ ID NO: 3255 - RNA, 1961 nt, Artificial Sequence
  mRNA product Design d-2 comprising derived and/or modified sequence from HRSV(A2)__F_DSCav1_mut3 (opt6)
gggagagcggcucggccauuuugucccagucaguccggaggcugcggcugcagaaguaccgccugcggaguaacugcaaagaagcuuaccauggaauuacucauacuaaaagccaaugccauaaccacuauucuaacagcaguaacauucuguuucgccucaggacaaaacauaacagaagaauuuuaucaauccaccuguuccgcagucucgaaaggcuaccuuggcgcacuaagaaccggaugguauacaucaguaauaaccauugaacuaucaaauaucaaagaaauaaaaugcaacggaacugacgcaaaagucaaacuaauaaaacaagaauuagacaaauacaaaaacgccguuacagacuuacaacuacuaaugcaaucaacuccagcaacaggaucaggaucugcuauaugcucaggugucgccguauguaaaguguuacaccucgaaggcgaaguaaacaaaauaaaaucagcacuacuauccacaaauaaagcaguaguaucacuauccaaugguguaucaguacucacauucaaaguacuagacuuaaaaaauuauauagauaaacaauuacuaccaauauuaaacaaacaaucaugcucaauaccaaacauagaaaccgucauugaauuucaacaaaaaaacaaucgacuucuugaaauaacacgagaauuuucaguaaaugccggaguaacaaccccagucucaacauacauguuaaccaacucugaacuccuaagccuaaucaacgacaugcccauaacuaacgaccaaaaaaaacuaauguccaauaauguccaaauaguaagacaacaauccuacucaauaaugugcauuauaaaagaagaaguccucgccuauguaguacaacuacccuuauacggaguaauugacacaccauguuggaaacuacauacaucaccacuaugcaccacuaacacaaaagaaggcuccaacauaugccuaacccgaacagaucgcggaugguauugcgacaacgcaggaaguguauccuucuuuccacaagcagaaacaugcaaaguacaauccaacagaguauucugugacaccaugaacucucuaacacuaccuuccgaaguaaauuuaugcaacguagacauauuuaaucccaaauacgacuguaaaauaaugaccucaaaaacugaugucucaucaucagucauuacaucacucggagcaauagucaguugcuauggaaaaaccaaaugcacagcuaguaacaaaaacagggguauaauaaaaacauuuucaaacggaugcgauuacguaucaaauaaaggaguagacaccguauccguaggaaauacucucuacugcguaaacaaacaagaaggacaaucccuauacguaaaaggcgaaccaaucauuaacuuuuacgacccacuuguauuuccaucagacgaauuugaugccucaauaucccaagucaaugaaaaaauaaaccaaagucuagcauucauccgaaaaucagaugaacuuuuacacaacguaaacgccggaaaaucaacaacaaacaucaugaucacaacaaucaucauaguaauaauaguuauacuacuuuccuuaauagcagucggccuacuacucuacugcaaagcacgauccacaccaguaaccuuaucuaaagaccaacucucaggcauaaacaacauagcauucucaaacuaaggacuaguaauaaggaaacuguaugaaugucugugggcaggaagugaagagauccuucuguaaagguuuuuggaauuaugucugcugaauaauaaacuuuuuugaaauaauaaaucugguagaaaaaugagaucuaaaaaaaaaaaaaaaaaaaaaaaaaaaaaaaaaaaaaaaaaaaaaaaaaaaaaaaaaaaaaaaaugcaucccccccccccccccccccccccccccccccaaaggcucuuuucagagccaccagaauu

SEQ ID NO: 3256 - RNA, 1961 nt, Artificial Sequence
  mRNA product Design d-2 comprising derived and/or modified sequence from HRSV(A2)__F_DSCav1_mut3 (opt11)
gggagagcggcucggccauuuugucccagucaguccggaggcugcggcugcagaaguaccgccugcggaguaacugcaaagaagcuuaccauggaacuccucauccuuaaagcaaacgccaucacaaccauccucacagcagucacuuucugcuucgcauccggacaaaacaucacagaagaguucuaucaauccacgugcuccgcaguuuccaaaggauaccuuggagccuuacgaaccggcugguacaccuccgucaucaccauagaacucagcaacaucaaagaaaucaaaugcaacggaaccgacgcaaaagucaaacucaucaaacaagaacuagacaaauacaaaaacgcagucaccgaccuccaacuacucaugcaaucaacccccgcaaccggcuccggcuccgccaucugcuccggaguagccguaugcaaaguccuccaccucgaaggcgaaguuaacaagaucaaguccgcacuccuaucaaccaacaaagcagucgucucccuauccaacggcgucuccguauuaacauucaaaguccucgaccucaaaaacuacauagacaaacagcuacuccccauccuaaacaaacaauccugcuccauccccaacaucgaaacugucaucgaguuccaacagaaaaacaaccgccuccuagaaaucacccgagaguucuccguaaacgccggcgucacuacccccgucucuaccuauaugcuaaccaacucugaacuccuaucccuaaucaacgauaugcccauaacuaacgaccaaaagaaacuuauguccaacaacguacaaauaguccggcaacaaucauacucuaucaugugcaucaucaaagaagaaguacuugccuacguuguccaacucccacuauacggcgucauagacacuccaugcuggaaacuucacaccucaccccucugcaccacuaacacuaaagaaggcucuaacaucugccuuacccgcaccgaccgcggaugguacugcgacaacgcaggcucaguuagcuucuucccacaagccgaaaccugcaaaguccagucaaaccgugucuucugcgauaccaugaacucgcucacccucccuuccgaagucaaccucugcaacgucgacaucuucaaccccaaauacgacugcaaaaucaugaccucaaaaaccgacguaucuucuuccgucaucaccucccucggcgccaucguauccugcuacggcaaaaccaaaugcacugcaucaaacaaaaaccgaggcaucaucaaaaccuucucgaacggaugcgacuacguauccaacaagggcgucgacacagucuccguugguaacacccucuacugcgucaacaaacaagaaggccaaucccuauacguaaaaggcgaacccaucaucaacuucuacgacccccucgucuuccccagugacgaauuugacgccuccaucucccaagucaacgaaaagaucaaccaaucccuugccuucauacgcaaauccgacgaacuccuacacaacguuaacgccggaaaaucaacaaccaacaucaugaucacaaccaucauaaucgucauaaucgucauacuccucucccucauagccgucggccugcuauuguacuguaaagcccgcuccacaccagucacacuuucaaaagaccaacucuccgggaucaacaacaucgccuucuccaacuaaggacuaguaauaaggaaacuguaugaaugucugugggcaggaagugaagagauccuucuguaaagguuuuuggaauuaugucugcugaauaauaaacuuuuuugaaauaauaaaucugguagaaaaaugagaucuaaaaaaaaaaaaaaaaaaaaaaaaaaaaaaaaaaaaaaaaaaaaaaaaaaaaaaaaaaaaaaaaugcaucccccccccccccccccccccccccccccccaaaggcucuuuucagagccaccagaauu

SEQ ID NO: 3257 - RNA, 2277 nt, Artificial Sequence
  mRNA product Design d-3 comprising derived and/or modified sequence from HRSV(A2)__F_DSCav1_mut3 (opt1)
gggagagggcgcuuggcuugcaaggacccugagcugcggcauugaagcacacccaacccaacucgacugaagucagccucacugaaccggaucugagaaucuucucucucugggcuugccagggcucuccgaaccuagcuagcauccucuucaauuccaacuagaaagcuuaccauggagcugcucauccugaaggccaacgccaucaccaccauccugacggcggugaccuucugcuucgccagcggccagaacaucaccgaggaguucuaccaguccacgugcagcgccgucuccaagggguaccucggcgcccugcggaccggcugguacaccuccgugaucaccaucgagcugagcaacaucaaggagaucaagugcaacgggaccgacgccaaggugaagcucaucaagcaggagcuggacaaguacaagaacgcggucacggaccugcagcuccugaugcaguccaccccggcaaccggcuccggcuccgccaucugcagcggcgucgccgugugcaaggugcugcaccucgagggggaggucaacaagaucaagagcgcccugcuguccaccaacaaggccguggugagccucuccaacggcgucagcgugcugaccuucaaggugcuggaccucaagaacuacaucgacaagcagcugcugcccauccugaacaagcagagcugcuccauccccaacaucgagacggugaucgaguuccagcagaagaacaaccggcuccuggagaucacccgcgaguucagcgugaacgccggggucaccacccccguguccacguacaugcugaccaacagcgagcuccugucccugaucaacgacaugccgaucaccaacgaccagaagaagcucaugagcaacaacgugcagaucguccggcagcaguccuacagcaucaugugcaucaucaaggaggaggugcuggcguacgugguccagcugccccucuacggcgugaucgacacccccugcuggaagcugcacacgagcccccugugcaccaccaacaccaaggagggguccaacaucugccucacgcgcaccgaccggggcugguacugcgacaacgccggcagcgucuccuucuucccgcaggccgagaccugcaaggugcagagcaaccgcguguucugcgacaccaugaacucccugacgcugcccagcgagguaaaccucugcaacgucgacaucuucaaccccaaguacgacugcaagaucaugaccuccaagaccgacgugagcuccagcgugaucaccucccugggggccaucgucagcugcuacggcaagacgaagugcaccgccagcaacaagaaccgggggaucaucaagaccuucuccaacggcugcgacuacgugagcaacaagggcguggacaccguguccgucgggaacacccuguacugcgugaacaagcaggagggccagagccucuacgugaagggggagcccaucaucaacuucuacgacccgcuggucuuccccuccgacgaguucgacgcgagcaucucccaggugaacgagaagaucaaccagagccuggccuucauccgcaaguccgacgagcugcuccacaacgugaacgccggcaagagcacgaccaacaucaugaucaccaccaucaucaucgucaucaucgugauccugcugucccucaucgccguggggcugcugcucuacugcaaggcccggagcacgcccgucacccuguccaaggaccagcugagcggcaucaacaacaucgcguucuccaacugaggacuagugaagggaacacccaaauuuaauucagccuuaagcacaauuaauuaagagugaaacguaauuguacaagcaguuggucacccaccauagggcaugaucaacaccgcaaccuuuccuuuuucccccagugauucugaaaaaccccucuucccuucagcuugcuuagauguuccaaauuuaguaagcuuaaggcggccuacagaagaaaaagaaaaaaaaggccacaaaaguucccucucacuuucaguaaauaaaauaaaagcagcaacagaaauaaagaaauaaaugaaauucaaaaugaaauaaauauuguguugugcagcauuaaaaaaucaauaaaaauuaaaaaugagcaagaucuaaaaaaaaaaaaaaaaaaaaaaaaaaaaaaaaaaaaaaaaaaaaaaaaaaaaaaaaaaaaaaaaugcaucccccccccccccccccccccccccccccccaaaggcucuuuucagagccaccagaauu

SEQ ID NO: 3258 - RNA, 2277 nt, Artificial Sequence
  mRNA product Design d-3 comprising derived and/or modified sequence from HRSV(A2)__F_DSCav1_mut3 (opt1)
gggagagggcgcuuggcuugcaaggacccugagcugcggcauugaagcacacccaacccaacucgacugaagucagccucacugaaccggaucugagaaucuucucucucugggcuugccagggcucuccgaaccuagcuagcauccucuucaauuccaacuagaaagcuuaccauggagcugcucauccugaaggccaacgccaucaccaccauccugacggcggugaccuucugcuucgccagcggccagaacaucaccgaggaguucuaccaguccacgugcagcgccgucuccaagggguaccucggcgcccugcgcaccgggugguacaccagcgugaucaccaucgagcuguccaacaucaaggagaucaagugcaacggcaccgacgccaaggugaagcucaucaagcaggagcuggacaaguacaagaacgcggucacggaccugcagcuccugaugcagagcacccccgccaccggguccggcagcgccaucugcuccggcguggccgugugcaagguccugcaccucgagggggaggugaacaagaucaagagcgcgcugcuguccaccaacaaggccguggucagccucuccaacggcgugagcgugcugacguucaagguccuggaccucaagaacuacaucgacaagcagcugcugccgauccucaacaagcaguccugcagcauccccaacaucgagaccgugaucgaguuccagcagaagaacaaccggcugcuggagaucacccgcgaguucuccgugaacgccggggucaccacgcccgugagcaccuacaugcucaccaacuccgagcugcugagccucaucaacgacaugcccaucaccaacgaccagaagaagcugaugagcaacaacgugcagaucguccggcagcaguccuacagcaucaugugcaucaucaaggaggaggugcuggccuacgugguccagcucccgcuguacggcgugaucgacacgcccugcuggaagcugcacaccagcccccucugcaccaccaacacgaaggagggguccaacaucugccugacccgcaccgaccggggcugguacugcgacaacgccggcuccgugagcuucuucccccaggcggagaccugcaagguccaguccaaccgcguguucugcgacacgaugaacagccugacccucccguccgaggucaaccugugcaacguggacaucuucaaccccaaguacgacugcaagaucaugaccagcaagaccgacguguccagcuccgucaucacgagccugggggccaucguguccugcuacggcaagaccaagugcaccgccagcaacaagaaccgggggaucaucaagaccuucuccaacggcugcgacuacgugagcaacaagggcgucgacacgguguccguggggaacacccucuacugcgucaacaagcaggagggccagagccuguacgugaagggggagcccaucaucaacuucuacgacccccugguguucccgagcgacgaguucgacgccuccaucagccaggucaacgagaagaucaaccagucccucgccuucauccgcaagagcgacgagcugcugcacaacgugaacgcgggcaaguccaccaccaacaucaugaucaccacgaucaucaucgugaucaucgucauccuccugagccugaucgccguggggcuccugcuguacugcaaggcccgguccacccccgugacccugagcaaggaccagcucuccggcaucaacaacaucgccuucagcaacugaggacuagugaagggaacacccaaauuuaauucagccuuaagcacaauuaauuaagagugaaacguaauuguacaagcaguuggucacccaccauagggcaugaucaacaccgcaaccuuuccuuuuucccccagugauucugaaaaaccccucuucccuucagcuugcuuagauguuccaaauuuaguaagcuuaaggcggccuacagaagaaaaagaaaaaaaaggccacaaaaguucccucucacuuucaguaaauaaaauaaaagcagcaacagaaauaaagaaauaaaugaaauucaaaaugaaauaaauauuguguugugcagcauuaaaaaaucaauaaaaauuaaaaaugagcaagaucuaaaaaaaaaaaaaaaaaaaaaaaaaaaaaaaaaaaaaaaaaaaaaaaaaaaaaaaaaaaaaaaaugcaucccccccccccccccccccccccccccccccaaaggcucuuuucagagccaccagaauu

SEQ ID NO: 3259 - RNA, 2277 nt, Artificial Sequence
  mRNA product Design d-3 comprising derived and/or modified sequence from HRSV(A2)__F_DSCav1_mut3 (opt2)
gggagagggcgcuuggcuugcaaggacccugagcugcggcauugaagcacacccaacccaacucgacugaagucagccucacugaaccggaucugagaaucuucucucucugggcuugccagggcucuccgaaccuagcuagcauccucuucaauuccaacuagaaagcuuaccauggagcuccucauccucaaggccaacgccaucaccaccauccucaccgccgucaccuucugcuucgccuccggccagaacaucaccgaggaguucuaccaguccaccugcuccgccgucuccaagggcuaccucggcgcccuccgcaccggcugguacaccuccgucaucaccaucgagcucuccaacaucaaggagaucaagugcaacggcaccgacgccaaggucaagcucaucaagcaggagcucgacaaguacaagaacgccgucaccgaccuccagcuccucaugcaguccacccccgccaccggcuccggcuccgccaucugcuccggcgucgccgucugcaagguccuccaccucgagggcgaggucaacaagaucaaguccgcccuccucuccaccaacaaggccgucgucucccucuccaacggcgucuccguccucaccuucaagguccucgaccucaagaacuacaucgacaagcagcuccuccccauccucaacaagcaguccugcuccauccccaacaucgagaccgucaucgaguuccagcagaagaacaaccgccuccucgagaucacccgcgaguucuccgucaacgccggcgucaccacccccgucuccaccuacaugcucaccaacuccgagcuccucucccucaucaacgacaugcccaucaccaacgaccagaagaagcucauguccaacaacguccagaucguccgccagcaguccuacuccaucaugugcaucaucaaggaggagguccucgccuacgucguccagcucccccucuacggcgucaucgacacccccugcuggaagcuccacaccuccccccucugcaccaccaacaccaaggagggcuccaacaucugccucacccgcaccgaccgcggcugguacugcgacaacgccggcuccgucuccuucuucccccaggccgagaccugcaagguccaguccaaccgcgucuucugcgacaccaugaacucccucacccuccccuccgaggucaaccucugcaacgucgacaucuucaaccccaaguacgacugcaagaucaugaccuccaagaccgacgucuccuccuccgucaucaccucccucggcgccaucgucuccugcuacggcaagaccaagugcaccgccuccaacaagaaccgcggcaucaucaagaccuucuccaacggcugcgacuacgucuccaacaagggcgucgacaccgucuccgucggcaacacccucuacugcgucaacaagcaggagggccagucccucuacgucaagggcgagcccaucaucaacuucuacgacccccucgucuuccccuccgacgaguucgacgccuccaucucccaggucaacgagaagaucaaccagucccucgccuucauccgcaaguccgacgagcuccuccacaacgucaacgccggcaaguccaccaccaacaucaugaucaccaccaucaucaucgucaucaucgucauccuccucucccucaucgccgucggccuccuccucuacugcaaggcccgcuccacccccgucacccucuccaaggaccagcucuccggcaucaacaacaucgccuucuccaacugaggacuagugaagggaacacccaaauuuaauucagccuuaagcacaauuaauuaagagugaaacguaauuguacaagcaguuggucacccaccauagggcaugaucaacaccgcaaccuuuccuuuuucccccagugauucugaaaaaccccucuucccuucagcuugcuuagauguuccaaauuuaguaagcuuaaggcggccuacagaagaaaaagaaaaaaaaggccacaaaaguucccucucacuuucaguaaauaaaauaaaagcagcaacagaaauaaagaaauaaaugaaauucaaaaugaaauaaauauuguguugugcagcauuaaaaaaucaauaaaaauuaaaaaugagcaagaucuaaaaaaaaaaaaaaaaaaaaaaaaaaaaaaaaaaaaaaaaaaaaaaaaaaaaaaaaaaaaaaaaugcaucccccccccccccccccccccccccccccccaaaggcucuuuucagagccaccagaauu

SEQ ID NO: 3260 - RNA, 2277 nt, Artificial Sequence
  mRNA product Design d-3 comprising derived and/or modified sequence from HRSV(A2)__F_DSCav1_mut3 (opt3)
gggagagggcgcuuggcuugcaaggacccugagcugcggcauugaagcacacccaacccaacucgacugaagucagccucacugaaccggaucugagaaucuucucucucugggcuugccagggcucuccgaaccuagcuagcauccucuucaauuccaacuagaaagcuuaccauggagcugcucauccuuaaggccaacgcuauuaccacaauacugacugcagugacguucugcuuugccagcggccagaauaucaccgaagaguucuaccaauccacauguucugcggucucaaaaggguauuugggagcuuuaagaacugguugguacaccaguguuauuacaaucgaacugagcaacauuaaggagaucaaaugcaauggcaccgacgccaaggugaaacuaauaaagcaggaacucgauaaguauaaaaacgcaguaacugaccugcagcuucugaugcaguccacacccgccaccgggucuggaucggcuaucuguucaggcguggcagucugcaagguguugcaccucgagggugagguuaauaaaauuaagagcgcccugcugaguacgaacaaagcuguggucucccucucuaauggggugagcguauuaacuuuuaagguucuggaucuuaagaacuacaucgacaaacaauugcugccuauucuaaauaagcaguccuguucaaucccaaacauagaaaccgugauugaguuccagcagaaaaauaacaggcuccuggaaaucacacgggaguuuagugucaaugccggagugacuaccccggugagcacauauaugcuuaccaacucugagcuguugucccucauuaaugauaugcccaucacgaacgaccaaaagaaacugaugucaaacaauguccagaucguucgccagcagagcuacaguauuaugugcauaaucaaggaagagguguuagcguauguagugcaacugccucucuacggcgucauugauacuccauguuggaaacuucauacaucuccccugugcaccacuaacacaaaggaaggcuccaauaucuguuugacccgaacggaccgugggugguacugcgauaacgcaggaagcgugucguucuuuccucaggccgagaccuguaagguucagucuaauagaguguucugcgacacaaugaacucccuaacucugccaucagaagucaaucucugcaacguggauauauuuaaucccaaauaugacuguaagauuaugaccaguaaaacagauguaagcuccucuguuaucacuagccugggugcuaucgugucaugcuacggcaagaccaaauguacagccaguaacaagaauagggggauuaucaagaccuucuccaacggaugcgacuaugucagcaauaaaggcguggacacugucucuguggguaacacgcuuuacuguguuaauaagcaagaggggcagucacuguaugugaaaggagagccuauuauaaacuuuuacgauccauugguauucccgagugacgaauuugaugcaagcaucucccaggucaacgagaagauuaaucagucucucgcuuucauccggaaaucggacgaacuguuacacaacgugaaugccggcaagagcacaaccaacaucaugauuacuaccauaaucauuguuaucauugugauccugcuaucccucauagcggucggccugcuuuuguauugcaaggcccgcucaacacccgugacccugaguaaagaucaacucucugggaucaauaacauugcauucagcaauugaggacuagugaagggaacacccaaauuuaauucagccuuaagcacaauuaauuaagagugaaacguaauuguacaagcaguuggucacccaccauagggcaugaucaacaccgcaaccuuuccuuuuucccccagugauucugaaaaaccccucuucccuucagcuugcuuagauguuccaaauuuaguaagcuuaaggcggccuacagaagaaaaagaaaaaaaaggccacaaaaguucccucucacuuucaguaaauaaaauaaaagcagcaacagaaauaaagaaauaaaugaaauucaaaaugaaauaaauauuguguugugcagcauuaaaaaaucaauaaaaauuaaaaaugagcaagaucuaaaaaaaaaaaaaaaaaaaaaaaaaaaaaaaaaaaaaaaaaaaaaaaaaaaaaaaaaaaaaaaaugcaucccccccccccccccccccccccccccccccaaaggcucuuuucagagccaccagaauu

SEQ ID NO: 3261 - RNA, 2277 nt, Artificial Sequence
  mRNA product Design d-3 comprising derived and/or modified sequence from HRSV(A2)__F_DSCav1_mut3 (opt4)
gggagagggcgcuuggcuugcaaggacccugagcugcggcauugaagcacacccaacccaacucgacugaagucagccucacugaaccggaucugagaaucuucucucucugggcuugccagggcucuccgaaccuagcuagcauccucuucaauuccaacuagaaagcuuaccauggagcugcugauccugaaggccaacgccaucaccaccauccugaccgccgugaccuucugcuucgccagcggccagaacaucaccgaggaguucuaccagagcaccugcagcgccgugagcaagggcuaccugggcgcccugagaaccggcugguacaccagcgugaucaccaucgagcugagcaacaucaaggagaucaagugcaacggcaccgacgccaaggugaagcugaucaagcaggagcuggacaaguacaagaacgccgugaccgaccugcagcugcugaugcagagcacccccgccaccggcagcggcagcgccaucugcagcggcguggccgugugcaaggugcugcaccuggagggcgaggugaacaagaucaagagcgcccugcugagcaccaacaaggccguggugagccugagcaacggcgugagcgugcugaccuucaaggugcuggaccugaagaacuacaucgacaagcagcugcugcccauccugaacaagcagagcugcagcauccccaacaucgagaccgugaucgaguuccagcagaagaacaacagacugcuggagaucaccagagaguucagcgugaacgccggcgugaccacccccgugagcaccuacaugcugaccaacagcgagcugcugagccugaucaacgacaugcccaucaccaacgaccagaagaagcugaugagcaacaacgugcagaucgugagacagcagagcuacagcaucaugugcaucaucaaggaggaggugcuggccuacguggugcagcugccccuguacggcgugaucgacacccccugcuggaagcugcacaccagcccccugugcaccaccaacaccaaggagggcagcaacaucugccugaccagaaccgacagaggcugguacugcgacaacgccggcagcgugagcuucuucccccaggccgagaccugcaaggugcagagcaacagaguguucugcgacaccaugaacagccugacccugcccagcgaggugaaccugugcaacguggacaucuucaaccccaaguacgacugcaagaucaugaccagcaagaccgacgugagcagcagcgugaucaccagccugggcgccaucgugagcugcuacggcaagaccaagugcaccgccagcaacaagaacagaggcaucaucaagaccuucagcaacggcugcgacuacgugagcaacaagggcguggacaccgugagcgugggcaacacccuguacugcgugaacaagcaggagggccagagccuguacgugaagggcgagcccaucaucaacuucuacgacccccugguguuccccagcgacgaguucgacgccagcaucagccaggugaacgagaagaucaaccagagccuggccuucaucagaaagagcgacgagcugcugcacaacgugaacgccggcaagagcaccaccaacaucaugaucaccaccaucaucaucgugaucaucgugauccugcugagccugaucgccgugggccugcugcuguacugcaaggccagaagcacccccgugacccugagcaaggaccagcugagcggcaucaacaacaucgccuucagcaacugaggacuagugaagggaacacccaaauuuaauucagccuuaagcacaauuaauuaagagugaaacguaauuguacaagcaguuggucacccaccauagggcaugaucaacaccgcaaccuuuccuuuuucccccagugauucugaaaaaccccucuucccuucagcuugcuuagauguuccaaauuuaguaagcuuaaggcggccuacagaagaaaaagaaaaaaaaggccacaaaaguucccucucacuuucaguaaauaaaauaaaagcagcaacagaaauaaagaaauaaaugaaauucaaaaugaaauaaauauuguguugugcagcauuaaaaaaucaauaaaaauuaaaaaugagcaagaucuaaaaaaaaaaaaaaaaaaaaaaaaaaaaaaaaaaaaaaaaaaaaaaaaaaaaaaaaaaaaaaaaugcaucccccccccccccccccccccccccccccccaaaggcucuuuucagagccaccagaauu

SEQ ID NO: 3262 - RNA, 2277 nt, Artificial Sequence
  mRNA product Design d-3 comprising derived and/or modified sequence from HRSV(A2)__F_DSCav1_mut3 (opt5)
gggagagggcgcuuggcuugcaaggacccugagcugcggcauugaagcacacccaacccaacucgacugaagucagccucacugaaccggaucugagaaucuucucucucugggcuugccagggcucuccgaaccuagcuagcauccucuucaauuccaacuagaaagcuuaccauggagcugcucauccugaaggccaacgcuauuaccacaauccuuacggccgugaccuucugcuuugcgagcggccagaauauuacagaagaguucuaccaauccaccuguucugcugucagcaaaggguaucugggagcccucagaacaggcugguacaccuccguuaucacaauugaacugucuaacaucaaggagaucaaaugcaaugggaccgacgccaaggugaaacuuauuaagcaggaacuggauaaguauaaaaacgcugugacggaccuccagcugcugaugcagagcacccccgccacaggauccggcucugcuaucuguagcggggucgccgugugcaagguucuccaccuggagggagaggugaauaaaauuaaguccgcgcuucugagcaccaacaaagccgucgugucucucuccaauggcguuagcgugcugacauuuaagguccuugaucugaagaacuacaucgacaaacaacuccugccuauucugaauaagcagucuuguuccaucccgaacauugaaaccgugaucgaguuccagcagaaaaauaaccggcuccuggaaaucacgcgcgaguuuagcgugaaugcuggcgucacaacccccguuucuacauauaugcuuaccaacuccgagcugcucagccugauuaaugauaugccuaucaccaacgaccaaaagaaacuuauguccaacaaugugcagauugugagacagcagucuuacagcaucaugugcauuaucaaggaagagguccuggccuaugugguucaacucccccuguacggggugaucgauacaccuuguuggaaacugcauacgagcccccucugcaccacaaacaccaaggaaggauccaauauuugucugacacggaccgaccgcggcugguacugcgauaacgcugggucugucuccuucuuuccucaggccgagacguguaaggugcagagcaauagaguuuucugcgacacaaugaacucucuuacccugccgagcgaagugaaucucugcaacgucgauaucuuuaaucccaaauaugacuguaagauuaugaccuccaaaacagaugugucuagcuccgucaucaccagccugggagcgauugugucuugcuacggcaagacaaaauguacggccuccaacaagaaucgggggaucaucaagaccuucagcaacggaugcgacuauguuucuaauaaaggcguggacacagucuccgugggcaacacccuuuacuguguuaauaagcaagaggggcagagccuguaugugaaaggagagccuauuaucaacuuuuacgauccccucgucuucccuuccgacgaauuugaugcuucuauuagccaggugaacgagaagaucaaucagucccuggccuucauucgcaaaucugacgaacugcuccacaacgugaaugcuggcaagagcacaaccaacaucaugauuacgaccaucaucauuguuaucauugucauccugcuuucccugauugccguggggcuccugcuguauugcaaggccagaagcacacccgugacccuuucuaaagaucaacucuccggaaucaauaacaucgcuuucagcaauugaggacuagugaagggaacacccaaauuuaauucagccuuaagcacaauuaauuaagagugaaacguaauuguacaagcaguuggucacccaccauagggcaugaucaacaccgcaaccuuuccuuuuucccccagugauucugaaaaaccccucuucccuucagcuugcuuagauguuccaaauuuaguaagcuuaaggcggccuacagaagaaaaagaaaaaaaaggccacaaaaguucccucucacuuucaguaaauaaaauaaaagcagcaacagaaauaaagaaauaaaugaaauucaaaaugaaauaaauauuguguugugcagcauuaaaaaaucaauaaaaauuaaaaaugagcaagaucuaaaaaaaaaaaaaaaaaaaaaaaaaaaaaaaaaaaaaaaaaaaaaaaaaaaaaaaaaaaaaaaaugcaucccccccccccccccccccccccccccccccaaaggcucuuuucagagccaccagaauu

SEQ ID NO: 3263 - RNA, 2277 nt, Artificial Sequence
  mRNA product Design d-3 comprising derived and/or modified sequence from HRSV(A2)__F_DSCav1_mut3 (opt6)
gggagagggcgcuuggcuugcaaggacccugagcugcggcauugaagcacacccaacccaacucgacugaagucagccucacugaaccggaucugagaaucuucucucucugggcuugccagggcucuccgaaccuagcuagcauccucuucaauuccaacuagaaagcuuaccauggaauuacucauacuaaaagccaaugccauaaccacuauucuaacagcaguaacauucuguuucgccucaggacaaaacauaacagaagaauuuuaucaauccaccuguuccgcagucucgaaaggcuaccuuggcgcacuaagaaccggaugguauacaucaguaauaaccauugaacuaucaaauaucaaagaaauaaaaugcaacggaacugacgcaaaagucaaacuaauaaaacaagaauuagacaaauacaaaaacgccguuacagacuuacaacuacuaaugcaaucaacuccagcaacaggaucaggaucugcuauaugcucaggugucgccguauguaaaguguuacaccucgaaggcgaaguaaacaaaauaaaaucagcacuacuauccacaaauaaagcaguaguaucacuauccaaugguguaucaguacucacauucaaaguacuagacuuaaaaaauuauauagauaaacaauuacuaccaauauuaaacaaacaaucaugcucaauaccaaacauagaaaccgucauugaauuucaacaaaaaaacaaucgacuucuugaaauaacacgagaauuuucaguaaaugccggaguaacaaccccagucucaacauacauguuaaccaacucugaacuccuaagccuaaucaacgacaugcccauaacuaacgaccaaaaaaaacuaauguccaauaauguccaaauaguaagacaacaauccuacucaauaaugugcauuauaaaagaagaaguccucgccuauguaguacaacuacccuuauacggaguaauugacacaccauguuggaaacuacauacaucaccacuaugcaccacuaacacaaaagaaggcuccaacauaugccuaacccgaacagaucgcggaugguauugcgacaacgcaggaaguguauccuucuuuccacaagcagaaacaugcaaaguacaauccaacagaguauucugugacaccaugaacucucuaacacuaccuuccgaaguaaauuuaugcaacguagacauauuuaaucccaaauacgacuguaaaauaaugaccucaaaaacugaugucucaucaucagucauuacaucacucggagcaauagucaguugcuauggaaaaaccaaaugcacagcuaguaacaaaaacagggguauaauaaaaacauuuucaaacggaugcgauuacguaucaaauaaaggaguagacaccguauccguaggaaauacucucuacugcguaaacaaacaagaaggacaaucccuauacguaaaaggcgaaccaaucauuaacuuuuacgacccacuuguauuuccaucagacgaauuugaugccucaauaucccaagucaaugaaaaaauaaaccaaagucuagcauucauccgaaaaucagaugaacuuuuacacaacguaaacgccggaaaaucaacaacaaacaucaugaucacaacaaucaucauaguaauaauaguuauacuacuuuccuuaauagcagucggccuacuacucuacugcaaagcacgauccacaccaguaaccuuaucuaaagaccaacucucaggcauaaacaacauagcauucucaaacuaaggacuagugaagggaacacccaaauuuaauucagccuuaagcacaauuaauuaagagugaaacguaauuguacaagcaguuggucacccaccauagggcaugaucaacaccgcaaccuuuccuuuuucccccagugauucugaaaaaccccucuucccuucagcuugcuuagauguuccaaauuuaguaagcuuaaggcggccuacagaagaaaaagaaaaaaaaggccacaaaaguucccucucacuuucaguaaauaaaauaaaagcagcaacagaaauaaagaaauaaaugaaauucaaaaugaaauaaauauuguguugugcagcauuaaaaaaucaauaaaaauuaaaaaugagcaagaucuaaaaaaaaaaaaaaaaaaaaaaaaaaaaaaaaaaaaaaaaaaaaaaaaaaaaaaaaaaaaaaaaugcaucccccccccccccccccccccccccccccccaaaggcucuuuucagagccaccagaauu

SEQ ID NO: 3264 - RNA, 2277 nt, Artificial Sequence
  mRNA product Design d-3 comprising derived and/or modified sequence from HRSV(A2)__F_DSCav1_mut3 (opt11)
gggagagggcgcuuggcuugcaaggacccugagcugcggcauugaagcacacccaacccaacucgacugaagucagccucacugaaccggaucugagaaucuucucucucugggcuugccagggcucuccgaaccuagcuagcauccucuucaauuccaacuagaaagcuuaccauggaacuccucauccuuaaagcaaacgccaucacaaccauccucacagcagucacuuucugcuucgcauccggacaaaacaucacagaagaguucuaucaauccacgugcuccgcaguuuccaaaggauaccuuggagccuuacgaaccggcugguacaccuccgucaucaccauagaacucagcaacaucaaagaaaucaaaugcaacggaaccgacgcaaaagucaaacucaucaaacaagaacuagacaaauacaaaaacgcagucaccgaccuccaacuacucaugcaaucaacccccgcaaccggcuccggcuccgccaucugcuccggaguagccguaugcaaaguccuccaccucgaaggcgaaguuaacaagaucaaguccgcacuccuaucaaccaacaaagcagucgucucccuauccaacggcgucuccguauuaacauucaaaguccucgaccucaaaaacuacauagacaaacagcuacuccccauccuaaacaaacaauccugcuccauccccaacaucgaaacugucaucgaguuccaacagaaaaacaaccgccuccuagaaaucacccgagaguucuccguaaacgccggcgucacuacccccgucucuaccuauaugcuaaccaacucugaacuccuaucccuaaucaacgauaugcccauaacuaacgaccaaaagaaacuuauguccaacaacguacaaauaguccggcaacaaucauacucuaucaugugcaucaucaaagaagaaguacuugccuacguuguccaacucccacuauacggcgucauagacacuccaugcuggaaacuucacaccucaccccucugcaccacuaacacuaaagaaggcucuaacaucugccuuacccgcaccgaccgcggaugguacugcgacaacgcaggcucaguuagcuucuucccacaagccgaaaccugcaaaguccagucaaaccgugucuucugcgauaccaugaacucgcucacccucccuuccgaagucaaccucugcaacgucgacaucuucaaccccaaauacgacugcaaaaucaugaccucaaaaaccgacguaucuucuuccgucaucaccucccucggcgccaucguauccugcuacggcaaaaccaaaugcacugcaucaaacaaaaaccgaggcaucaucaaaaccuucucgaacggaugcgacuacguauccaacaagggcgucgacacagucuccguugguaacacccucuacugcgucaacaaacaagaaggccaaucccuauacguaaaaggcgaacccaucaucaacuucuacgacccccucgucuuccccagugacgaauuugacgccuccaucucccaagucaacgaaaagaucaaccaaucccuugccuucauacgcaaauccgacgaacuccuacacaacguuaacgccggaaaaucaacaaccaacaucaugaucacaaccaucauaaucgucauaaucgucauacuccucucccucauagccgucggccugcuauuguacuguaaagcccgcuccacaccagucacacuuucaaaagaccaacucuccgggaucaacaacaucgccuucuccaacuaaggacuagugaagggaacacccaaauuuaauucagccuuaagcacaauuaauuaagagugaaacguaauuguacaagcaguuggucacccaccauagggcaugaucaacaccgcaaccuuuccuuuuucccccagugauucugaaaaaccccucuucccuucagcuugcuuagauguuccaaauuuaguaagcuuaaggcggccuacagaagaaaaagaaaaaaaaggccacaaaaguucccucucacuuucaguaaauaaaauaaaagcagcaacagaaauaaagaaauaaaugaaauucaaaaugaaauaaauauuguguugugcagcauuaaaaaaucaauaaaaauuaaaaaugagcaagaucuaaaaaaaaaaaaaaaaaaaaaaaaaaaaaaaaaaaaaaaaaaaaaaaaaaaaaaaaaaaaaaaaugcaucccccccccccccccccccccccccccccccaaaggcucuuuucagagccaccagaauu

SEQ ID NO: 3265 - RNA, 1960 nt, Artificial Sequence
  mRNA product Design d-4 comprising derived and/or modified sequence from HRSV(A2)__F_DSCav1_mut3 (opt1)
gggagagucccgcagucggcguccagcggcucugcuuguucgugugugugucguugcaggccuuauucaagcuuaccauggagcugcucauccugaaggccaacgccaucaccaccauccugacggcggugaccuucugcuucgccagcggccagaacaucaccgaggaguucuaccaguccacgugcagcgccgucuccaagggguaccucggcgcccugcggaccggcugguacaccuccgugaucaccaucgagcugagcaacaucaaggagaucaagugcaacgggaccgacgccaaggugaagcucaucaagcaggagcuggacaaguacaagaacgcggucacggaccugcagcuccugaugcaguccaccccggcaaccggcuccggcuccgccaucugcagcggcgucgccgugugcaaggugcugcaccucgagggggaggucaacaagaucaagagcgcccugcuguccaccaacaaggccguggugagccucuccaacggcgucagcgugcugaccuucaaggugcuggaccucaagaacuacaucgacaagcagcugcugcccauccugaacaagcagagcugcuccauccccaacaucgagacggugaucgaguuccagcagaagaacaaccggcuccuggagaucacccgcgaguucagcgugaacgccggggucaccacccccguguccacguacaugcugaccaacagcgagcuccugucccugaucaacgacaugccgaucaccaacgaccagaagaagcucaugagcaacaacgugcagaucguccggcagcaguccuacagcaucaugugcaucaucaaggaggaggugcuggcguacgugguccagcugccccucuacggcgugaucgacacccccugcuggaagcugcacacgagcccccugugcaccaccaacaccaaggagggguccaacaucugccucacgcgcaccgaccggggcugguacugcgacaacgccggcagcgucuccuucuucccgcaggccgagaccugcaaggugcagagcaaccgcguguucugcgacaccaugaacucccugacgcugcccagcgagguaaaccucugcaacgucgacaucuucaaccccaaguacgacugcaagaucaugaccuccaagaccgacgugagcuccagcgugaucaccucccugggggccaucgucagcugcuacggcaagacgaagugcaccgccagcaacaagaaccgggggaucaucaagaccuucuccaacggcugcgacuacgugagcaacaagggcguggacaccguguccgucgggaacacccuguacugcgugaacaagcaggagggccagagccucuacgugaagggggagcccaucaucaacuucuacgacccgcuggucuuccccuccgacgaguucgacgcgagcaucucccaggugaacgagaagaucaaccagagccuggccuucauccgcaaguccgacgagcugcuccacaacgugaacgccggcaagagcacgaccaacaucaugaucaccaccaucaucaucgucaucaucgugauccugcugucccucaucgccguggggcugcugcucuacugcaaggcccggagcacgcccgucacccuguccaaggaccagcugagcggcaucaacaacaucgcguucuccaacugaggacuaguggaagcauuuuccuggcugauuaaaagaaauuacucagcuauggucaucuguuccuguuagaaggcuaugcagcauauuauauacuaugcgcauguuaugaaaugcauaauaaaaaauuuuaaaaaaucuaaaagaucuaaaaaaaaaaaaaaaaaaaaaaaaaaaaaaaaaaaaaaaaaaaaaaaaaaaaaaaaaaaaaaaaugcaucccccccccccccccccccccccccccccccaaaggcucuuuucagagccaccagaauu

SEQ ID NO: 3266 - RNA, 1960 nt, Artificial Sequence
  mRNA product Design d-4 comprising derived and/or modified sequence from HRSV(A2)__F_DSCav1_mut3 (opt1)
gggagagucccgcagucggcguccagcggcucugcuuguucgugugugugucguugcaggccuuauucaagcuuaccauggagcugcucauccugaaggccaacgccaucaccaccauccugacggcggugaccuucugcuucgccagcggccagaacaucaccgaggaguucuaccaguccacgugcagcgccgucuccaagggguaccucggcgcccugcgcaccgggugguacaccagcgugaucaccaucgagcuguccaacaucaaggagaucaagugcaacggcaccgacgccaaggugaagcucaucaagcaggagcuggacaaguacaagaacgcggucacggaccugcagcuccugaugcagagcacccccgccaccggguccggcagcgccaucugcuccggcguggccgugugcaagguccugcaccucgagggggaggugaacaagaucaagagcgcgcugcuguccaccaacaaggccguggucagccucuccaacggcgugagcgugcugacguucaagguccuggaccucaagaacuacaucgacaagcagcugcugccgauccucaacaagcaguccugcagcauccccaacaucgagaccgugaucgaguuccagcagaagaacaaccggcugcuggagaucacccgcgaguucuccgugaacgccggggucaccacgcccgugagcaccuacaugcucaccaacuccgagcugcugagccucaucaacgacaugcccaucaccaacgaccagaagaagcugaugagcaacaacgugcagaucguccggcagcaguccuacagcaucaugugcaucaucaaggaggaggugcuggccuacgugguccagcucccgcuguacggcgugaucgacacgcccugcuggaagcugcacaccagcccccucugcaccaccaacacgaaggagggguccaacaucugccugacccgcaccgaccggggcugguacugcgacaacgccggcuccgugagcuucuucccccaggcggagaccugcaagguccaguccaaccgcguguucugcgacacgaugaacagccugacccucccguccgaggucaaccugugcaacguggacaucuucaaccccaaguacgacugcaagaucaugaccagcaagaccgacguguccagcuccgucaucacgagccugggggccaucguguccugcuacggcaagaccaagugcaccgccagcaacaagaaccgggggaucaucaagaccuucuccaacggcugcgacuacgugagcaacaagggcgucgacacgguguccguggggaacacccucuacugcgucaacaagcaggagggccagagccuguacgugaagggggagcccaucaucaacuucuacgacccccugguguucccgagcgacgaguucgacgccuccaucagccaggucaacgagaagaucaaccagucccucgccuucauccgcaagagcgacgagcugcugcacaacgugaacgcgggcaaguccaccaccaacaucaugaucaccacgaucaucaucgugaucaucgucauccuccugagccugaucgccguggggcuccugcuguacugcaaggcccgguccacccccgugacccugagcaaggaccagcucuccggcaucaacaacaucgccuucagcaacugaggacuaguggaagcauuuuccuggcugauuaaaagaaauuacucagcuauggucaucuguuccuguuagaaggcuaugcagcauauuauauacuaugcgcauguuaugaaaugcauaauaaaaaauuuuaaaaaaucuaaaagaucuaaaaaaaaaaaaaaaaaaaaaaaaaaaaaaaaaaaaaaaaaaaaaaaaaaaaaaaaaaaaaaaaugcaucccccccccccccccccccccccccccccccaaaggcucuuuucagagccaccagaauu

SEQ ID NO: 3267 - RNA, 1960 nt, Artificial Sequence
  mRNA product Design d-4 comprising derived and/or modified sequence from HRSV(A2)__F_DSCav1_mut3 (opt2)
gggagagucccgcagucggcguccagcggcucugcuuguucgugugugugucguugcaggccuuauucaagcuuaccauggagcuccucauccucaaggccaacgccaucaccaccauccucaccgccgucaccuucugcuucgccuccggccagaacaucaccgaggaguucuaccaguccaccugcuccgccgucuccaagggcuaccucggcgcccuccgcaccggcugguacaccuccgucaucaccaucgagcucuccaacaucaaggagaucaagugcaacggcaccgacgccaaggucaagcucaucaagcaggagcucgacaaguacaagaacgccgucaccgaccuccagcuccucaugcaguccacccccgccaccggcuccggcuccgccaucugcuccggcgucgccgucugcaagguccuccaccucgagggcgaggucaacaagaucaaguccgcccuccucuccaccaacaaggccgucgucucccucuccaacggcgucuccguccucaccuucaagguccucgaccucaagaacuacaucgacaagcagcuccuccccauccucaacaagcaguccugcuccauccccaacaucgagaccgucaucgaguuccagcagaagaacaaccgccuccucgagaucacccgcgaguucuccgucaacgccggcgucaccacccccgucuccaccuacaugcucaccaacuccgagcuccucucccucaucaacgacaugcccaucaccaacgaccagaagaagcucauguccaacaacguccagaucguccgccagcaguccuacuccaucaugugcaucaucaaggaggagguccucgccuacgucguccagcucccccucuacggcgucaucgacacccccugcuggaagcuccacaccuccccccucugcaccaccaacaccaaggagggcuccaacaucugccucacccgcaccgaccgcggcugguacugcgacaacgccggcuccgucuccuucuucccccaggccgagaccugcaagguccaguccaaccgcgucuucugcgacaccaugaacucccucacccuccccuccgaggucaaccucugcaacgucgacaucuucaaccccaaguacgacugcaagaucaugaccuccaagaccgacgucuccuccuccgucaucaccucccucggcgccaucgucuccugcuacggcaagaccaagugcaccgccuccaacaagaaccgcggcaucaucaagaccuucuccaacggcugcgacuacgucuccaacaagggcgucgacaccgucuccgucggcaacacccucuacugcgucaacaagcaggagggccagucccucuacgucaagggcgagcccaucaucaacuucuacgacccccucgucuuccccuccgacgaguucgacgccuccaucucccaggucaacgagaagaucaaccagucccucgccuucauccgcaaguccgacgagcuccuccacaacgucaacgccggcaaguccaccaccaacaucaugaucaccaccaucaucaucgucaucaucgucauccuccucucccucaucgccgucggccuccuccucuacugcaaggcccgcuccacccccgucacccucuccaaggaccagcucuccggcaucaacaacaucgccuucuccaacugaggacuaguggaagcauuuuccuggcugauuaaaagaaauuacucagcuauggucaucuguuccuguuagaaggcuaugcagcauauuauauacuaugcgcauguuaugaaaugcauaauaaaaaauuuuaaaaaaucuaaaagaucuaaaaaaaaaaaaaaaaaaaaaaaaaaaaaaaaaaaaaaaaaaaaaaaaaaaaaaaaaaaaaaaaugcaucccccccccccccccccccccccccccccccaaaggcucuuuucagagccaccagaauu

SEQ ID NO: 3268 - RNA, 1960 nt, Artificial Sequence
  mRNA product Design d-4 comprising derived and/or modified sequence from HRSV(A2)__F_DSCav1_mut3 (opt3)
gggagagucccgcagucggcguccagcggcucugcuuguucgugugugugucguugcaggccuuauucaagcuuaccauggagcugcucauccuuaaggccaacgcuauuaccacaauacugacugcagugacguucugcuuugccagcggccagaauaucaccgaagaguucuaccaauccacauguucugcggucucaaaaggguauuugggagcuuuaagaacugguugguacaccaguguuauuacaaucgaacugagcaacauuaaggagaucaaaugcaauggcaccgacgccaaggugaaacuaauaaagcaggaacucgauaaguauaaaaacgcaguaacugaccugcagcuucugaugcaguccacacccgccaccgggucuggaucggcuaucuguucaggcguggcagucugcaagguguugcaccucgagggugagguuaauaaaauuaagagcgcccugcugaguacgaacaaagcuguggucucccucucuaauggggugagcguauuaacuuuuaagguucuggaucuuaagaacuacaucgacaaacaauugcugccuauucuaaauaagcaguccuguucaaucccaaacauagaaaccgugauugaguuccagcagaaaaauaacaggcuccuggaaaucacacgggaguuuagugucaaugccggagugacuaccccggugagcacauauaugcuuaccaacucugagcuguugucccucauuaaugauaugcccaucacgaacgaccaaaagaaacugaugucaaacaauguccagaucguucgccagcagagcuacaguauuaugugcauaaucaaggaagagguguuagcguauguagugcaacugccucucuacggcgucauugauacuccauguuggaaacuucauacaucuccccugugcaccacuaacacaaaggaaggcuccaauaucuguuugacccgaacggaccgugggugguacugcgauaacgcaggaagcgugucguucuuuccucaggccgagaccuguaagguucagucuaauagaguguucugcgacacaaugaacucccuaacucugccaucagaagucaaucucugcaacguggauauauuuaaucccaaauaugacuguaagauuaugaccaguaaaacagauguaagcuccucuguuaucacuagccugggugcuaucgugucaugcuacggcaagaccaaauguacagccaguaacaagaauagggggauuaucaagaccuucuccaacggaugcgacuaugucagcaauaaaggcguggacacugucucuguggguaacacgcuuuacuguguuaauaagcaagaggggcagucacuguaugugaaaggagagccuauuauaaacuuuuacgauccauugguauucccgagugacgaauuugaugcaagcaucucccaggucaacgagaagauuaaucagucucucgcuuucauccggaaaucggacgaacuguuacacaacgugaaugccggcaagagcacaaccaacaucaugauuacuaccauaaucauuguuaucauugugauccugcuaucccucauagcggucggccugcuuuuguauugcaaggcccgcucaacacccgugacccugaguaaagaucaacucucugggaucaauaacauugcauucagcaauugaggacuaguggaagcauuuuccuggcugauuaaaagaaauuacucagcuauggucaucuguuccuguuagaaggcuaugcagcauauuauauacuaugcgcauguuaugaaaugcauaauaaaaaauuuuaaaaaaucuaaaagaucuaaaaaaaaaaaaaaaaaaaaaaaaaaaaaaaaaaaaaaaaaaaaaaaaaaaaaaaaaaaaaaaaugcaucccccccccccccccccccccccccccccccaaaggcucuuuucagagccaccagaauu

SEQ ID NO: 3269 - RNA, 1960 nt, Artificial Sequence
  mRNA product Design d-4 comprising derived and/or modified sequence from HRSV(A2)__F_DSCav1_mut3 (opt4)
gggagagucccgcagucggcguccagcggcucugcuuguucgugugugugucguugcaggccuuauucaagcuuaccauggagcugcugauccugaaggccaacgccaucaccaccauccugaccgccgugaccuucugcuucgccagcggccagaacaucaccgaggaguucuaccagagcaccugcagcgccgugagcaagggcuaccugggcgcccugagaaccggcugguacaccagcgugaucaccaucgagcugagcaacaucaaggagaucaagugcaacggcaccgacgccaaggugaagcugaucaagcaggagcuggacaaguacaagaacgccgugaccgaccugcagcugcugaugcagagcacccccgccaccggcagcggcagcgccaucugcagcggcguggccgugugcaaggugcugcaccuggagggcgaggugaacaagaucaagagcgcccugcugagcaccaacaaggccguggugagccugagcaacggcgugagcgugcugaccuucaaggugcuggaccugaagaacuacaucgacaagcagcugcugcccauccugaacaagcagagcugcagcauccccaacaucgagaccgugaucgaguuccagcagaagaacaacagacugcuggagaucaccagagaguucagcgugaacgccggcgugaccacccccgugagcaccuacaugcugaccaacagcgagcugcugagccugaucaacgacaugcccaucaccaacgaccagaagaagcugaugagcaacaacgugcagaucgugagacagcagagcuacagcaucaugugcaucaucaaggaggaggugcuggccuacguggugcagcugccccuguacggcgugaucgacacccccugcuggaagcugcacaccagcccccugugcaccaccaacaccaaggagggcagcaacaucugccugaccagaaccgacagaggcugguacugcgacaacgccggcagcgugagcuucuucccccaggccgagaccugcaaggugcagagcaacagaguguucugcgacaccaugaacagccugacccugcccagcgaggugaaccugugcaacguggacaucuucaaccccaaguacgacugcaagaucaugaccagcaagaccgacgugagcagcagcgugaucaccagccugggcgccaucgugagcugcuacggcaagaccaagugcaccgccagcaacaagaacagaggcaucaucaagaccuucagcaacggcugcgacuacgugagcaacaagggcguggacaccgugagcgugggcaacacccuguacugcgugaacaagcaggagggccagagccuguacgugaagggcgagcccaucaucaacuucuacgacccccugguguuccccagcgacgaguucgacgccagcaucagccaggugaacgagaagaucaaccagagccuggccuucaucagaaagagcgacgagcugcugcacaacgugaacgccggcaagagcaccaccaacaucaugaucaccaccaucaucaucgugaucaucgugauccugcugagccugaucgccgugggccugcugcuguacugcaaggccagaagcacccccgugacccugagcaaggaccagcugagcggcaucaacaacaucgccuucagcaacugaggacuaguggaagcauuuuccuggcugauuaaaagaaauuacucagcuauggucaucuguuccuguuagaaggcuaugcagcauauuauauacuaugcgcauguuaugaaaugcauaauaaaaaauuuuaaaaaaucuaaaagaucuaaaaaaaaaaaaaaaaaaaaaaaaaaaaaaaaaaaaaaaaaaaaaaaaaaaaaaaaaaaaaaaaugcaucccccccccccccccccccccccccccccccaaaggcucuuuucagagccaccagaauu

SEQ ID NO: 3270 - RNA, 1960 nt, Artificial Sequence
  mRNA product Design d-4 comprising derived and/or modified sequence from HRSV(A2)__F_DSCav1_mut3 (opt5)
gggagagucccgcagucggcguccagcggcucugcuuguucgugugugugucguugcaggccuuauucaagcuuaccauggagcugcucauccugaaggccaacgcuauuaccacaauccuuacggccgugaccuucugcuuugcgagcggccagaauauuacagaagaguucuaccaauccaccuguucugcugucagcaaaggguaucugggagcccucagaacaggcugguacaccuccguuaucacaauugaacugucuaacaucaaggagaucaaaugcaaugggaccgacgccaaggugaaacuuauuaagcaggaacuggauaaguauaaaaacgcugugacggaccuccagcugcugaugcagagcacccccgccacaggauccggcucugcuaucuguagcggggucgccgugugcaagguucuccaccuggagggagaggugaauaaaauuaaguccgcgcuucugagcaccaacaaagccgucgugucucucuccaauggcguuagcgugcugacauuuaagguccuugaucugaagaacuacaucgacaaacaacuccugccuauucugaauaagcagucuuguuccaucccgaacauugaaaccgugaucgaguuccagcagaaaaauaaccggcuccuggaaaucacgcgcgaguuuagcgugaaugcuggcgucacaacccccguuucuacauauaugcuuaccaacuccgagcugcucagccugauuaaugauaugccuaucaccaacgaccaaaagaaacuuauguccaacaaugugcagauugugagacagcagucuuacagcaucaugugcauuaucaaggaagagguccuggccuaugugguucaacucccccuguacggggugaucgauacaccuuguuggaaacugcauacgagcccccucugcaccacaaacaccaaggaaggauccaauauuugucugacacggaccgaccgcggcugguacugcgauaacgcugggucugucuccuucuuuccucaggccgagacguguaaggugcagagcaauagaguuuucugcgacacaaugaacucucuuacccugccgagcgaagugaaucucugcaacgucgauaucuuuaaucccaaauaugacuguaagauuaugaccuccaaaacagaugugucuagcuccgucaucaccagccugggagcgauugugucuugcuacggcaagacaaaauguacggccuccaacaagaaucgggggaucaucaagaccuucagcaacggaugcgacuauguuucuaauaaaggcguggacacagucuccgugggcaacacccuuuacuguguuaauaagcaagaggggcagagccuguaugugaaaggagagccuauuaucaacuuuuacgauccccucgucuucccuuccgacgaauuugaugcuucuauuagccaggugaacgagaagaucaaucagucccuggccuucauucgcaaaucugacgaacugcuccacaacgugaaugcuggcaagagcacaaccaacaucaugauuacgaccaucaucauuguuaucauugucauccugcuuucccugauugccguggggcuccugcuguauugcaaggccagaagcacacccgugacccuuucuaaagaucaacucuccggaaucaauaacaucgcuuucagcaauugaggacuaguggaagcauuuuccuggcugauuaaaagaaauuacucagcuauggucaucuguuccuguuagaaggcuaugcagcauauuauauacuaugcgcauguuaugaaaugcauaauaaaaaauuuuaaaaaaucuaaaagaucuaaaaaaaaaaaaaaaaaaaaaaaaaaaaaaaaaaaaaaaaaaaaaaaaaaaaaaaaaaaaaaaaugcaucccccccccccccccccccccccccccccccaaaggcucuuuucagagccaccagaauu

SEQ ID NO: 3271 - RNA, 1960 nt, Artificial Sequence
  mRNA product Design d-4 comprising derived and/or modified sequence from HRSV(A2)__F_DSCav1_mut3 (opt6)
gggagagucccgcagucggcguccagcggcucugcuuguucgugugugugucguugcaggccuuauucaagcuuaccauggaauuacucauacuaaaagccaaugccauaaccacuauucuaacagcaguaacauucuguuucgccucaggacaaaacauaacagaagaauuuuaucaauccaccuguuccgcagucucgaaaggcuaccuuggcgcacuaagaaccggaugguauacaucaguaauaaccauugaacuaucaaauaucaaagaaauaaaaugcaacggaacugacgcaaaagucaaacuaauaaaacaagaauuagacaaauacaaaaacgccguuacagacuuacaacuacuaaugcaaucaacuccagcaacaggaucaggaucugcuauaugcucaggugucgccguauguaaaguguuacaccucgaaggcgaaguaaacaaaauaaaaucagcacuacuauccacaaauaaagcaguaguaucacuauccaaugguguaucaguacucacauucaaaguacuagacuuaaaaaauuauauagauaaacaauuacuaccaauauuaaacaaacaaucaugcucaauaccaaacauagaaaccgucauugaauuucaacaaaaaaacaaucgacuucuugaaauaacacgagaauuuucaguaaaugccggaguaacaaccccagucucaacauacauguuaaccaacucugaacuccuaagccuaaucaacgacaugcccauaacuaacgaccaaaaaaaacuaauguccaauaauguccaaauaguaagacaacaauccuacucaauaaugugcauuauaaaagaagaaguccucgccuauguaguacaacuacccuuauacggaguaauugacacaccauguuggaaacuacauacaucaccacuaugcaccacuaacacaaaagaaggcuccaacauaugccuaacccgaacagaucgcggaugguauugcgacaacgcaggaaguguauccuucuuuccacaagcagaaacaugcaaaguacaauccaacagaguauucugugacaccaugaacucucuaacacuaccuuccgaaguaaauuuaugcaacguagacauauuuaaucccaaauacgacuguaaaauaaugaccucaaaaacugaugucucaucaucagucauuacaucacucggagcaauagucaguugcuauggaaaaaccaaaugcacagcuaguaacaaaaacagggguauaauaaaaacauuuucaaacggaugcgauuacguaucaaauaaaggaguagacaccguauccguaggaaauacucucuacugcguaaacaaacaagaaggacaaucccuauacguaaaaggcgaaccaaucauuaacuuuuacgacccacuuguauuuccaucagacgaauuugaugccucaauaucccaagucaaugaaaaaauaaaccaaagucuagcauucauccgaaaaucagaugaacuuuuacacaacguaaacgccggaaaaucaacaacaaacaucaugaucacaacaaucaucauaguaauaauaguuauacuacuuuccuuaauagcagucggccuacuacucuacugcaaagcacgauccacaccaguaaccuuaucuaaagaccaacucucaggcauaaacaacauagcauucucaaacuaaggacuaguggaagcauuuuccuggcugauuaaaagaaauuacucagcuauggucaucuguuccuguuagaaggcuaugcagcauauuauauacuaugcgcauguuaugaaaugcauaauaaaaaauuuuaaaaaaucuaaaagaucuaaaaaaaaaaaaaaaaaaaaaaaaaaaaaaaaaaaaaaaaaaaaaaaaaaaaaaaaaaaaaaaaugcaucccccccccccccccccccccccccccccccaaaggcucuuuucagagccaccagaauu

SEQ ID NO: 3272 - RNA, 1960 nt, Artificial Sequence
  mRNA product Design d-4 comprising derived and/or modified sequence from HRSV(A2)__F_DSCav1_mut3 (opt11)
gggagagucccgcagucggcguccagcggcucugcuuguucgugugugugucguugcaggccuuauucaagcuuaccauggaacuccucauccuuaaagcaaacgccaucacaaccauccucacagcagucacuuucugcuucgcauccggacaaaacaucacagaagaguucuaucaauccacgugcuccgcaguuuccaaaggauaccuuggagccuuacgaaccggcugguacaccuccgucaucaccauagaacucagcaacaucaaagaaaucaaaugcaacggaaccgacgcaaaagucaaacucaucaaacaagaacuagacaaauacaaaaacgcagucaccgaccuccaacuacucaugcaaucaacccccgcaaccggcuccggcuccgccaucugcuccggaguagccguaugcaaaguccuccaccucgaaggcgaaguuaacaagaucaaguccgcacuccuaucaaccaacaaagcagucgucucccuauccaacggcgucuccguauuaacauucaaaguccucgaccucaaaaacuacauagacaaacagcuacuccccauccuaaacaaacaauccugcuccauccccaacaucgaaacugucaucgaguuccaacagaaaaacaaccgccuccuagaaaucacccgagaguucuccguaaacgccggcgucacuacccccgucucuaccuauaugcuaaccaacucugaacuccuaucccuaaucaacgauaugcccauaacuaacgaccaaaagaaacuuauguccaacaacguacaaauaguccggcaacaaucauacucuaucaugugcaucaucaaagaagaaguacuugccuacguuguccaacucccacuauacggcgucauagacacuccaugcuggaaacuucacaccucaccccucugcaccacuaacacuaaagaaggcucuaacaucugccuuacccgcaccgaccgcggaugguacugcgacaacgcaggcucaguuagcuucuucccacaagccgaaaccugcaaaguccagucaaaccgugucuucugcgauaccaugaacucgcucacccucccuuccgaagucaaccucugcaacgucgacaucuucaaccccaaauacgacugcaaaaucaugaccucaaaaaccgacguaucuucuuccgucaucaccucccucggcgccaucguauccugcuacggcaaaaccaaaugcacugcaucaaacaaaaaccgaggcaucaucaaaaccuucucgaacggaugcgacuacguauccaacaagggcgucgacacagucuccguugguaacacccucuacugcgucaacaaacaagaaggccaaucccuauacguaaaaggcgaacccaucaucaacuucuacgacccccucgucuuccccagugacgaauuugacgccuccaucucccaagucaacgaaaagaucaaccaaucccuugccuucauacgcaaauccgacgaacuccuacacaacguuaacgccggaaaaucaacaaccaacaucaugaucacaaccaucauaaucgucauaaucgucauacuccucucccucauagccgucggccugcuauuguacuguaaagcccgcuccacaccagucacacuuucaaaagaccaacucuccgggaucaacaacaucgccuucuccaacuaaggacuaguggaagcauuuuccuggcugauuaaaagaaauuacucagcuauggucaucuguuccuguuagaaggcuaugcagcauauuauauacuaugcgcauguuaugaaaugcauaauaaaaaauuuuaaaaaaucuaaaagaucuaaaaaaaaaaaaaaaaaaaaaaaaaaaaaaaaaaaaaaaaaaaaaaaaaaaaaaaaaaaaaaaaugcaucccccccccccccccccccccccccccccccaaaggcucuuuucagagccaccagaauu

SEQ ID NO: 3273 - RNA, 2057 nt, Artificial Sequence
  mRNA product Design d-5 comprising derived and/or modified sequence from HRSV(A2)__F_DSCav1_mut3 (opt1)
gggagagggcgcuuggcuugcaaggacccugagcugcggcauugaagcacacccaacccaacucgacugaagucagccucacugaaccggaucugagaaucuucucucucugggcuugccagggcucuccgaaccuagcuagcauccucuucaauuccaacuagaaagcuuaccauggagcugcucauccugaaggccaacgccaucaccaccauccugacggcggugaccuucugcuucgccagcggccagaacaucaccgaggaguucuaccaguccacgugcagcgccgucuccaagggguaccucggcgcccugcggaccggcugguacaccuccgugaucaccaucgagcugagcaacaucaaggagaucaagugcaacgggaccgacgccaaggugaagcucaucaagcaggagcuggacaaguacaagaacgcggucacggaccugcagcuccugaugcaguccaccccggcaaccggcuccggcuccgccaucugcagcggcgucgccgugugcaaggugcugcaccucgagggggaggucaacaagaucaagagcgcccugcuguccaccaacaaggccguggugagccucuccaacggcgucagcgugcugaccuucaaggugcuggaccucaagaacuacaucgacaagcagcugcugcccauccugaacaagcagagcugcuccauccccaacaucgagacggugaucgaguuccagcagaagaacaaccggcuccuggagaucacccgcgaguucagcgugaacgccggggucaccacccccguguccacguacaugcugaccaacagcgagcuccugucccugaucaacgacaugccgaucaccaacgaccagaagaagcucaugagcaacaacgugcagaucguccggcagcaguccuacagcaucaugugcaucaucaaggaggaggugcuggcguacgugguccagcugccccucuacggcgugaucgacacccccugcuggaagcugcacacgagcccccugugcaccaccaacaccaaggagggguccaacaucugccucacgcgcaccgaccggggcugguacugcgacaacgccggcagcgucuccuucuucccgcaggccgagaccugcaaggugcagagcaaccgcguguucugcgacaccaugaacucccugacgcugcccagcgagguaaaccucugcaacgucgacaucuucaaccccaaguacgacugcaagaucaugaccuccaagaccgacgugagcuccagcgugaucaccucccugggggccaucgucagcugcuacggcaagacgaagugcaccgccagcaacaagaaccgggggaucaucaagaccuucuccaacggcugcgacuacgugagcaacaagggcguggacaccguguccgucgggaacacccuguacugcgugaacaagcaggagggccagagccucuacgugaagggggagcccaucaucaacuucuacgacccgcuggucuuccccuccgacgaguucgacgcgagcaucucccaggugaacgagaagaucaaccagagccuggccuucauccgcaaguccgacgagcugcuccacaacgugaacgccggcaagagcacgaccaacaucaugaucaccaccaucaucaucgucaucaucgugauccugcugucccucaucgccguggggcugcugcucuacugcaaggcccggagcacgcccgucacccuguccaaggaccagcugagcggcaucaacaacaucgcguucuccaacugaggacuaguggaagcauuuuccuggcugauuaaaagaaauuacucagcuauggucaucuguuccuguuagaaggcuaugcagcauauuauauacuaugcgcauguuaugaaaugcauaauaaaaaauuuuaaaaaaucuaaaagaucuaaaaaaaaaaaaaaaaaaaaaaaaaaaaaaaaaaaaaaaaaaaaaaaaaaaaaaaaaaaaaaaaugcaucccccccccccccccccccccccccccccccaaaggcucuuuucagagccaccagaauu

SEQ ID NO: 3274 - RNA, 2057 nt, Artificial Sequence
  mRNA product Design d-5 comprising derived and/or modified sequence from HRSV(A2)__F_DSCav1_mut3 (opt1)
gggagagggcgcuuggcuugcaaggacccugagcugcggcauugaagcacacccaacccaacucgacugaagucagccucacugaaccggaucugagaaucuucucucucugggcuugccagggcucuccgaaccuagcuagcauccucuucaauuccaacuagaaagcuuaccauggagcugcucauccugaaggccaacgccaucaccaccauccugacggcggugaccuucugcuucgccagcggccagaacaucaccgaggaguucuaccaguccacgugcagcgccgucuccaagggguaccucggcgcccugcgcaccgggugguacaccagcgugaucaccaucgagcuguccaacaucaaggagaucaagugcaacggcaccgacgccaaggugaagcucaucaagcaggagcuggacaaguacaagaacgcggucacggaccugcagcuccugaugcagagcacccccgccaccggguccggcagcgccaucugcuccggcguggccgugugcaagguccugcaccucgagggggaggugaacaagaucaagagcgcgcugcuguccaccaacaaggccguggucagccucuccaacggcgugagcgugcugacguucaagguccuggaccucaagaacuacaucgacaagcagcugcugccgauccucaacaagcaguccugcagcauccccaacaucgagaccgugaucgaguuccagcagaagaacaaccggcugcuggagaucacccgcgaguucuccgugaacgccggggucaccacgcccgugagcaccuacaugcucaccaacuccgagcugcugagccucaucaacgacaugcccaucaccaacgaccagaagaagcugaugagcaacaacgugcagaucguccggcagcaguccuacagcaucaugugcaucaucaaggaggaggugcuggccuacgugguccagcucccgcuguacggcgugaucgacacgcccugcuggaagcugcacaccagcccccucugcaccaccaacacgaaggagggguccaacaucugccugacccgcaccgaccggggcugguacugcgacaacgccggcuccgugagcuucuucccccaggcggagaccugcaagguccaguccaaccgcguguucugcgacacgaugaacagccugacccucccguccgaggucaaccugugcaacguggacaucuucaaccccaaguacgacugcaagaucaugaccagcaagaccgacguguccagcuccgucaucacgagccugggggccaucguguccugcuacggcaagaccaagugcaccgccagcaacaagaaccgggggaucaucaagaccuucuccaacggcugcgacuacgugagcaacaagggcgucgacacgguguccguggggaacacccucuacugcgucaacaagcaggagggccagagccuguacgugaagggggagcccaucaucaacuucuacgacccccugguguucccgagcgacgaguucgacgccuccaucagccaggucaacgagaagaucaaccagucccucgccuucauccgcaagagcgacgagcugcugcacaacgugaacgcgggcaaguccaccaccaacaucaugaucaccacgaucaucaucgugaucaucgucauccuccugagccugaucgccguggggcuccugcuguacugcaaggcccgguccacccccgugacccugagcaaggaccagcucuccggcaucaacaacaucgccuucagcaacugaggacuaguggaagcauuuuccuggcugauuaaaagaaauuacucagcuauggucaucuguuccuguuagaaggcuaugcagcauauuauauacuaugcgcauguuaugaaaugcauaauaaaaaauuuuaaaaaaucuaaaagaucuaaaaaaaaaaaaaaaaaaaaaaaaaaaaaaaaaaaaaaaaaaaaaaaaaaaaaaaaaaaaaaaaugcaucccccccccccccccccccccccccccccccaaaggcucuuuucagagccaccagaauu

SEQ ID NO: 3275 - RNA, 2057 nt, Artificial Sequence
  mRNA product Design d-5 comprising derived and/or modified sequence from HRSV(A2)__F_DSCav1_mut3 (opt2)
gggagagggcgcuuggcuugcaaggacccugagcugcggcauugaagcacacccaacccaacucgacugaagucagccucacugaaccggaucugagaaucuucucucucugggcuugccagggcucuccgaaccuagcuagcauccucuucaauuccaacuagaaagcuuaccauggagcuccucauccucaaggccaacgccaucaccaccauccucaccgccgucaccuucugcuucgccuccggccagaacaucaccgaggaguucuaccaguccaccugcuccgccgucuccaagggcuaccucggcgcccuccgcaccggcugguacaccuccgucaucaccaucgagcucuccaacaucaaggagaucaagugcaacggcaccgacgccaaggucaagcucaucaagcaggagcucgacaaguacaagaacgccgucaccgaccuccagcuccucaugcaguccacccccgccaccggcuccggcuccgccaucugcuccggcgucgccgucugcaagguccuccaccucgagggcgaggucaacaagaucaaguccgcccuccucuccaccaacaaggccgucgucucccucuccaacggcgucuccguccucaccuucaagguccucgaccucaagaacuacaucgacaagcagcuccuccccauccucaacaagcaguccugcuccauccccaacaucgagaccgucaucgaguuccagcagaagaacaaccgccuccucgagaucacccgcgaguucuccgucaacgccggcgucaccacccccgucuccaccuacaugcucaccaacuccgagcuccucucccucaucaacgacaugcccaucaccaacgaccagaagaagcucauguccaacaacguccagaucguccgccagcaguccuacuccaucaugugcaucaucaaggaggagguccucgccuacgucguccagcucccccucuacggcgucaucgacacccccugcuggaagcuccacaccuccccccucugcaccaccaacaccaaggagggcuccaacaucugccucacccgcaccgaccgcggcugguacugcgacaacgccggcuccgucuccuucuucccccaggccgagaccugcaagguccaguccaaccgcgucuucugcgacaccaugaacucccucacccuccccuccgaggucaaccucugcaacgucgacaucuucaaccccaaguacgacugcaagaucaugaccuccaagaccgacgucuccuccuccgucaucaccucccucggcgccaucgucuccugcuacggcaagaccaagugcaccgccuccaacaagaaccgcggcaucaucaagaccuucuccaacggcugcgacuacgucuccaacaagggcgucgacaccgucuccgucggcaacacccucuacugcgucaacaagcaggagggccagucccucuacgucaagggcgagcccaucaucaacuucuacgacccccucgucuuccccuccgacgaguucgacgccuccaucucccaggucaacgagaagaucaaccagucccucgccuucauccgcaaguccgacgagcuccuccacaacgucaacgccggcaaguccaccaccaacaucaugaucaccaccaucaucaucgucaucaucgucauccuccucucccucaucgccgucggccuccuccucuacugcaaggcccgcuccacccccgucacccucuccaaggaccagcucuccggcaucaacaacaucgccuucuccaacugaggacuaguggaagcauuuuccuggcugauuaaaagaaauuacucagcuauggucaucuguuccuguuagaaggcuaugcagcauauuauauacuaugcgcauguuaugaaaugcauaauaaaaaauuuuaaaaaaucuaaaagaucuaaaaaaaaaaaaaaaaaaaaaaaaaaaaaaaaaaaaaaaaaaaaaaaaaaaaaaaaaaaaaaaaugcaucccccccccccccccccccccccccccccccaaaggcucuuuucagagccaccagaauu

SEQ ID NO: 3276 - RNA, 2057 nt, Artificial Sequence
  mRNA product Design d-5 comprising derived and/or modified sequence from HRSV(A2)__F_DSCav1_mut3 (opt3)
gggagagggcgcuuggcuugcaaggacccugagcugcggcauugaagcacacccaacccaacucgacugaagucagccucacugaaccggaucugagaaucuucucucucugggcuugccagggcucuccgaaccuagcuagcauccucuucaauuccaacuagaaagcuuaccauggagcugcucauccuuaaggccaacgcuauuaccacaauacugacugcagugacguucugcuuugccagcggccagaauaucaccgaagaguucuaccaauccacauguucugcggucucaaaaggguauuugggagcuuuaagaacugguugguacaccaguguuauuacaaucgaacugagcaacauuaaggagaucaaaugcaauggcaccgacgccaaggugaaacuaauaaagcaggaacucgauaaguauaaaaacgcaguaacugaccugcagcuucugaugcaguccacacccgccaccgggucuggaucggcuaucuguucaggcguggcagucugcaagguguugcaccucgagggugagguuaauaaaauuaagagcgcccugcugaguacgaacaaagcuguggucucccucucuaauggggugagcguauuaacuuuuaagguucuggaucuuaagaacuacaucgacaaacaauugcugccuauucuaaauaagcaguccuguucaaucccaaacauagaaaccgugauugaguuccagcagaaaaauaacaggcuccuggaaaucacacgggaguuuagugucaaugccggagugacuaccccggugagcacauauaugcuuaccaacucugagcuguugucccucauuaaugauaugcccaucacgaacgaccaaaagaaacugaugucaaacaauguccagaucguucgccagcagagcuacaguauuaugugcauaaucaaggaagagguguuagcguauguagugcaacugccucucuacggcgucauugauacuccauguuggaaacuucauacaucuccccugugcaccacuaacacaaaggaaggcuccaauaucuguuugacccgaacggaccgugggugguacugcgauaacgcaggaagcgugucguucuuuccucaggccgagaccuguaagguucagucuaauagaguguucugcgacacaaugaacucccuaacucugccaucagaagucaaucucugcaacguggauauauuuaaucccaaauaugacuguaagauuaugaccaguaaaacagauguaagcuccucuguuaucacuagccugggugcuaucgugucaugcuacggcaagaccaaauguacagccaguaacaagaauagggggauuaucaagaccuucuccaacggaugcgacuaugucagcaauaaaggcguggacacugucucuguggguaacacgcuuuacuguguuaauaagcaagaggggcagucacuguaugugaaaggagagccuauuauaaacuuuuacgauccauugguauucccgagugacgaauuugaugcaagcaucucccaggucaacgagaagauuaaucagucucucgcuuucauccggaaaucggacgaacuguuacacaacgugaaugccggcaagagcacaaccaacaucaugauuacuaccauaaucauuguuaucauugugauccugcuaucccucauagcggucggccugcuuuuguauugcaaggcccgcucaacacccgugacccugaguaaagaucaacucucugggaucaauaacauugcauucagcaauugaggacuaguggaagcauuuuccuggcugauuaaaagaaauuacucagcuauggucaucuguuccuguuagaaggcuaugcagcauauuauauacuaugcgcauguuaugaaaugcauaauaaaaaauuuuaaaaaaucuaaaagaucuaaaaaaaaaaaaaaaaaaaaaaaaaaaaaaaaaaaaaaaaaaaaaaaaaaaaaaaaaaaaaaaaugcaucccccccccccccccccccccccccccccccaaaggcucuuuucagagccaccagaauu

SEQ ID NO: 3277 - RNA, 2057 nt, Artificial Sequence
  mRNA product Design d-5 comprising derived and/or modified sequence from HRSV(A2)__F_DSCav1_mut3 (opt4)
gggagagggcgcuuggcuugcaaggacccugagcugcggcauugaagcacacccaacccaacucgacugaagucagccucacugaaccggaucugagaaucuucucucucugggcuugccagggcucuccgaaccuagcuagcauccucuucaauuccaacuagaaagcuuaccauggagcugcugauccugaaggccaacgccaucaccaccauccugaccgccgugaccuucugcuucgccagcggccagaacaucaccgaggaguucuaccagagcaccugcagcgccgugagcaagggcuaccugggcgcccugagaaccggcugguacaccagcgugaucaccaucgagcugagcaacaucaaggagaucaagugcaacggcaccgacgccaaggugaagcugaucaagcaggagcuggacaaguacaagaacgccgugaccgaccugcagcugcugaugcagagcacccccgccaccggcagcggcagcgccaucugcagcggcguggccgugugcaaggugcugcaccuggagggcgaggugaacaagaucaagagcgcccugcugagcaccaacaaggccguggugagccugagcaacggcgugagcgugcugaccuucaaggugcuggaccugaagaacuacaucgacaagcagcugcugcccauccugaacaagcagagcugcagcauccccaacaucgagaccgugaucgaguuccagcagaagaacaacagacugcuggagaucaccagagaguucagcgugaacgccggcgugaccacccccgugagcaccuacaugcugaccaacagcgagcugcugagccugaucaacgacaugcccaucaccaacgaccagaagaagcugaugagcaacaacgugcagaucgugagacagcagagcuacagcaucaugugcaucaucaaggaggaggugcuggccuacguggugcagcugccccuguacggcgugaucgacacccccugcuggaagcugcacaccagcccccugugcaccaccaacaccaaggagggcagcaacaucugccugaccagaaccgacagaggcugguacugcgacaacgccggcagcgugagcuucuucccccaggccgagaccugcaaggugcagagcaacagaguguucugcgacaccaugaacagccugacccugcccagcgaggugaaccugugcaacguggacaucuucaaccccaaguacgacugcaagaucaugaccagcaagaccgacgugagcagcagcgugaucaccagccugggcgccaucgugagcugcuacggcaagaccaagugcaccgccagcaacaagaacagaggcaucaucaagaccuucagcaacggcugcgacuacgugagcaacaagggcguggacaccgugagcgugggcaacacccuguacugcgugaacaagcaggagggccagagccuguacgugaagggcgagcccaucaucaacuucuacgacccccugguguuccccagcgacgaguucgacgccagcaucagccaggugaacgagaagaucaaccagagccuggccuucaucagaaagagcgacgagcugcugcacaacgugaacgccggcaagagcaccaccaacaucaugaucaccaccaucaucaucgugaucaucgugauccugcugagccugaucgccgugggccugcugcuguacugcaaggccagaagcacccccgugacccugagcaaggaccagcugagcggcaucaacaacaucgccuucagcaacugaggacuaguggaagcauuuuccuggcugauuaaaagaaauuacucagcuauggucaucuguuccuguuagaaggcuaugcagcauauuauauacuaugcgcauguuaugaaaugcauaauaaaaaauuuuaaaaaaucuaaaagaucuaaaaaaaaaaaaaaaaaaaaaaaaaaaaaaaaaaaaaaaaaaaaaaaaaaaaaaaaaaaaaaaaugcaucccccccccccccccccccccccccccccccaaaggcucuuuucagagccaccagaauu

SEQ ID NO: 3278 - RNA, 2057 nt, Artificial Sequence
  mRNA product Design d-5 comprising derived and/or modified sequence from HRSV(A2)__F_DSCav1_mut3 (opt5)
gggagagggcgcuuggcuugcaaggacccugagcugcggcauugaagcacacccaacccaacucgacugaagucagccucacugaaccggaucugagaaucuucucucucugggcuugccagggcucuccgaaccuagcuagcauccucuucaauuccaacuagaaagcuuaccauggagcugcucauccugaaggccaacgcuauuaccacaauccuuacggccgugaccuucugcuuugcgagcggccagaauauuacagaagaguucuaccaauccaccuguucugcugucagcaaaggguaucugggagcccucagaacaggcugguacaccuccguuaucacaauugaacugucuaacaucaaggagaucaaaugcaaugggaccgacgccaaggugaaacuuauuaagcaggaacuggauaaguauaaaaacgcugugacggaccuccagcugcugaugcagagcacccccgccacaggauccggcucugcuaucuguagcggggucgccgugugcaagguucuccaccuggagggagaggugaauaaaauuaaguccgcgcuucugagcaccaacaaagccgucgugucucucuccaauggcguuagcgugcugacauuuaagguccuugaucugaagaacuacaucgacaaacaacuccugccuauucugaauaagcagucuuguuccaucccgaacauugaaaccgugaucgaguuccagcagaaaaauaaccggcuccuggaaaucacgcgcgaguuuagcgugaaugcuggcgucacaacccccguuucuacauauaugcuuaccaacuccgagcugcucagccugauuaaugauaugccuaucaccaacgaccaaaagaaacuuauguccaacaaugugcagauugugagacagcagucuuacagcaucaugugcauuaucaaggaagagguccuggccuaugugguucaacucccccuguacggggugaucgauacaccuuguuggaaacugcauacgagcccccucugcaccacaaacaccaaggaaggauccaauauuugucugacacggaccgaccgcggcugguacugcgauaacgcugggucugucuccuucuuuccucaggccgagacguguaaggugcagagcaauagaguuuucugcgacacaaugaacucucuuacccugccgagcgaagugaaucucugcaacgucgauaucuuuaaucccaaauaugacuguaagauuaugaccuccaaaacagaugugucuagcuccgucaucaccagccugggagcgauugugucuugcuacggcaagacaaaauguacggccuccaacaagaaucgggggaucaucaagaccuucagcaacggaugcgacuauguuucuaauaaaggcguggacacagucuccgugggcaacacccuuuacuguguuaauaagcaagaggggcagagccuguaugugaaaggagagccuauuaucaacuuuuacgauccccucgucuucccuuccgacgaauuugaugcuucuauuagccaggugaacgagaagaucaaucagucccuggccuucauucgcaaaucugacgaacugcuccacaacgugaaugcuggcaagagcacaaccaacaucaugauuacgaccaucaucauuguuaucauugucauccugcuuucccugauugccguggggcuccugcuguauugcaaggccagaagcacacccgugacccuuucuaaagaucaacucuccggaaucaauaacaucgcuuucagcaauugaggacuaguggaagcauuuuccuggcugauuaaaagaaauuacucagcuauggucaucuguuccuguuagaaggcuaugcagcauauuauauacuaugcgcauguuaugaaaugcauaauaaaaaauuuuaaaaaaucuaaaagaucuaaaaaaaaaaaaaaaaaaaaaaaaaaaaaaaaaaaaaaaaaaaaaaaaaaaaaaaaaaaaaaaaugcaucccccccccccccccccccccccccccccccaaaggcucuuuucagagccaccagaauu

SEQ ID NO: 3279 - RNA, 2057 nt, Artificial Sequence
  mRNA product Design d-5 comprising derived and/or modified sequence from HRSV(A2)__F_DSCav1_mut3 (opt6)
gggagagggcgcuuggcuugcaaggacccugagcugcggcauugaagcacacccaacccaacucgacugaagucagccucacugaaccggaucugagaaucuucucucucugggcuugccagggcucuccgaaccuagcuagcauccucuucaauuccaacuagaaagcuuaccauggaauuacucauacuaaaagccaaugccauaaccacuauucuaacagcaguaacauucuguuucgccucaggacaaaacauaacagaagaauuuuaucaauccaccuguuccgcagucucgaaaggcuaccuuggcgcacuaagaaccggaugguauacaucaguaauaaccauugaacuaucaaauaucaaagaaauaaaaugcaacggaacugacgcaaaagucaaacuaauaaaacaagaauuagacaaauacaaaaacgccguuacagacuuacaacuacuaaugcaaucaacuccagcaacaggaucaggaucugcuauaugcucaggugucgccguauguaaaguguuacaccucgaaggcgaaguaaacaaaauaaaaucagcacuacuauccacaaauaaagcaguaguaucacuauccaaugguguaucaguacucacauucaaaguacuagacuuaaaaaauuauauagauaaacaauuacuaccaauauuaaacaaacaaucaugcucaauaccaaacauagaaaccgucauugaauuucaacaaaaaaacaaucgacuucuugaaauaacacgagaauuuucaguaaaugccggaguaacaaccccagucucaacauacauguuaaccaacucugaacuccuaagccuaaucaacgacaugcccauaacuaacgaccaaaaaaaacuaauguccaauaauguccaaauaguaagacaacaauccuacucaauaaugugcauuauaaaagaagaaguccucgccuauguaguacaacuacccuuauacggaguaauugacacaccauguuggaaacuacauacaucaccacuaugcaccacuaacacaaaagaaggcuccaacauaugccuaacccgaacagaucgcggaugguauugcgacaacgcaggaaguguauccuucuuuccacaagcagaaacaugcaaaguacaauccaacagaguauucugugacaccaugaacucucuaacacuaccuuccgaaguaaauuuaugcaacguagacauauuuaaucccaaauacgacuguaaaauaaugaccucaaaaacugaugucucaucaucagucauuacaucacucggagcaauagucaguugcuauggaaaaaccaaaugcacagcuaguaacaaaaacagggguauaauaaaaacauuuucaaacggaugcgauuacguaucaaauaaaggaguagacaccguauccguaggaaauacucucuacugcguaaacaaacaagaaggacaaucccuauacguaaaaggcgaaccaaucauuaacuuuuacgacccacuuguauuuccaucagacgaauuugaugccucaauaucccaagucaaugaaaaaauaaaccaaagucuagcauucauccgaaaaucagaugaacuuuuacacaacguaaacgccggaaaaucaacaacaaacaucaugaucacaacaaucaucauaguaauaauaguuauacuacuuuccuuaauagcagucggccuacuacucuacugcaaagcacgauccacaccaguaaccuuaucuaaagaccaacucucaggcauaaacaacauagcauucucaaacuaaggacuaguggaagcauuuuccuggcugauuaaaagaaauuacucagcuauggucaucuguuccuguuagaaggcuaugcagcauauuauauacuaugcgcauguuaugaaaugcauaauaaaaaauuuuaaaaaaucuaaaagaucuaaaaaaaaaaaaaaaaaaaaaaaaaaaaaaaaaaaaaaaaaaaaaaaaaaaaaaaaaaaaaaaaugcaucccccccccccccccccccccccccccccccaaaggcucuuuucagagccaccagaauu

SEQ ID NO: 3280 - RNA, 2057 nt, Artificial Sequence
  mRNA product Design d-5 comprising derived and/or modified sequence from HRSV(A2)__F_DSCav1_mut3 (opt11)
gggagagggcgcuuggcuugcaaggacccugagcugcggcauugaagcacacccaacccaacucgacugaagucagccucacugaaccggaucugagaaucuucucucucugggcuugccagggcucuccgaaccuagcuagcauccucuucaauuccaacuagaaagcuuaccauggaacuccucauccuuaaagcaaacgccaucacaaccauccucacagcagucacuuucugcuucgcauccggacaaaacaucacagaagaguucuaucaauccacgugcuccgcaguuuccaaaggauaccuuggagccuuacgaaccggcugguacaccuccgucaucaccauagaacucagcaacaucaaagaaaucaaaugcaacggaaccgacgcaaaagucaaacucaucaaacaagaacuagacaaauacaaaaacgcagucaccgaccuccaacuacucaugcaaucaacccccgcaaccggcuccggcuccgccaucugcuccggaguagccguaugcaaaguccuccaccucgaaggcgaaguuaacaagaucaaguccgcacuccuaucaaccaacaaagcagucgucucccuauccaacggcgucuccguauuaacauucaaaguccucgaccucaaaaacuacauagacaaacagcuacuccccauccuaaacaaacaauccugcuccauccccaacaucgaaacugucaucgaguuccaacagaaaaacaaccgccuccuagaaaucacccgagaguucuccguaaacgccggcgucacuacccccgucucuaccuauaugcuaaccaacucugaacuccuaucccuaaucaacgauaugcccauaacuaacgaccaaaagaaacuuauguccaacaacguacaaauaguccggcaacaaucauacucuaucaugugcaucaucaaagaagaaguacuugccuacguuguccaacucccacuauacggcgucauagacacuccaugcuggaaacuucacaccucaccccucugcaccacuaacacuaaagaaggcucuaacaucugccuuacccgcaccgaccgcggaugguacugcgacaacgcaggcucaguuagcuucuucccacaagccgaaaccugcaaaguccagucaaaccgugucuucugcgauaccaugaacucgcucacccucccuuccgaagucaaccucugcaacgucgacaucuucaaccccaaauacgacugcaaaaucaugaccucaaaaaccgacguaucuucuuccgucaucaccucccucggcgccaucguauccugcuacggcaaaaccaaaugcacugcaucaaacaaaaaccgaggcaucaucaaaaccuucucgaacggaugcgacuacguauccaacaagggcgucgacacagucuccguugguaacacccucuacugcgucaacaaacaagaaggccaaucccuauacguaaaaggcgaacccaucaucaacuucuacgacccccucgucuuccccagugacgaauuugacgccuccaucucccaagucaacgaaaagaucaaccaaucccuugccuucauacgcaaauccgacgaacuccuacacaacguuaacgccggaaaaucaacaaccaacaucaugaucacaaccaucauaaucgucauaaucgucauacuccucucccucauagccgucggccugcuauuguacuguaaagcccgcuccacaccagucacacuuucaaaagaccaacucuccgggaucaacaacaucgccuucuccaacuaaggacuaguggaagcauuuuccuggcugauuaaaagaaauuacucagcuauggucaucuguuccuguuagaaggcuaugcagcauauuauauacuaugcgcauguuaugaaaugcauaauaaaaaauuuuaaaaaaucuaaaagaucuaaaaaaaaaaaaaaaaaaaaaaaaaaaaaaaaaaaaaaaaaaaaaaaaaaaaaaaaaaaaaaaaugcaucccccccccccccccccccccccccccccccaaaggcucuuuucagagccaccagaauu

SEQ ID NO: 3281 - RNA, 1937 nt, Artificial Sequence
  mRNA product Design e-1 comprising derived and/or modified sequence from HRSV(A2)__F_DSCav1_mut3 (opt1)
gggagaauauaagcguuggcggagcgucgguuguagcacucugcgcgcccgcucuucugcugcuguuugucuacuuccuccugcuuccccgccgccgccgccgccaucaagcuuaccauggagcugcucauccugaaggccaacgccaucaccaccauccugacggcggugaccuucugcuucgccagcggccagaacaucaccgaggaguucuaccaguccacgugcagcgccgucuccaagggguaccucggcgcccugcggaccggcugguacaccuccgugaucaccaucgagcugagcaacaucaaggagaucaagugcaacgggaccgacgccaaggugaagcucaucaagcaggagcuggacaaguacaagaacgcggucacggaccugcagcuccugaugcaguccaccccggcaaccggcuccggcuccgccaucugcagcggcgucgccgugugcaaggugcugcaccucgagggggaggucaacaagaucaagagcgcccugcuguccaccaacaaggccguggugagccucuccaacggcgucagcgugcugaccuucaaggugcuggaccucaagaacuacaucgacaagcagcugcugcccauccugaacaagcagagcugcuccauccccaacaucgagacggugaucgaguuccagcagaagaacaaccggcuccuggagaucacccgcgaguucagcgugaacgccggggucaccacccccguguccacguacaugcugaccaacagcgagcuccugucccugaucaacgacaugccgaucaccaacgaccagaagaagcucaugagcaacaacgugcagaucguccggcagcaguccuacagcaucaugugcaucaucaaggaggaggugcuggcguacgugguccagcugccccucuacggcgugaucgacacccccugcuggaagcugcacacgagcccccugugcaccaccaacaccaaggagggguccaacaucugccucacgcgcaccgaccggggcugguacugcgacaacgccggcagcgucuccuucuucccgcaggccgagaccugcaaggugcagagcaaccgcguguucugcgacaccaugaacucccugacgcugcccagcgagguaaaccucugcaacgucgacaucuucaaccccaaguacgacugcaagaucaugaccuccaagaccgacgugagcuccagcgugaucaccucccugggggccaucgucagcugcuacggcaagacgaagugcaccgccagcaacaagaaccgggggaucaucaagaccuucuccaacggcugcgacuacgugagcaacaagggcguggacaccguguccgucgggaacacccuguacugcgugaacaagcaggagggccagagccucuacgugaagggggagcccaucaucaacuucuacgacccgcuggucuuccccuccgacgaguucgacgcgagcaucucccaggugaacgagaagaucaaccagagccuggccuucauccgcaaguccgacgagcugcuccacaacgugaacgccggcaagagcacgaccaacaucaugaucaccaccaucaucaucgucaucaucgugauccugcugucccucaucgccguggggcugcugcucuacugcaaggcccggagcacgcccgucacccuguccaaggaccagcugagcggcaucaacaacaucgcguucuccaacugaggacuaguguccaccugucccuccugggcugcuggauugucucguuuuccugccaaauaaacaggaucagcgcuuuacagaucuaaaaaaaaaaaaaaaaaaaaaaaaaaaaaaaaaaaaaaaaaaaaaaaaaaaaaaaaaaaaaaaaugcaucccccccccccccccccccccccccccccccaaaggcucuuuucagagccaccagaauu

SEQ ID NO: 3282 - RNA, 1937 nt, Artificial Sequence
  mRNA product Design e-1 comprising derived and/or modified sequence from HRSV(A2)__F_DSCav1_mut3 (opt1)
gggagaauauaagcguuggcggagcgucgguuguagcacucugcgcgcccgcucuucugcugcuguuugucuacuuccuccugcuuccccgccgccgccgccgccaucaagcuuaccauggagcugcucauccugaaggccaacgccaucaccaccauccugacggcggugaccuucugcuucgccagcggccagaacaucaccgaggaguucuaccaguccacgugcagcgccgucuccaagggguaccucggcgcccugcgcaccgggugguacaccagcgugaucaccaucgagcuguccaacaucaaggagaucaagugcaacggcaccgacgccaaggugaagcucaucaagcaggagcuggacaaguacaagaacgcggucacggaccugcagcuccugaugcagagcacccccgccaccggguccggcagcgccaucugcuccggcguggccgugugcaagguccugcaccucgagggggaggugaacaagaucaagagcgcgcugcuguccaccaacaaggccguggucagccucuccaacggcgugagcgugcugacguucaagguccuggaccucaagaacuacaucgacaagcagcugcugccgauccucaacaagcaguccugcagcauccccaacaucgagaccgugaucgaguuccagcagaagaacaaccggcugcuggagaucacccgcgaguucuccgugaacgccggggucaccacgcccgugagcaccuacaugcucaccaacuccgagcugcugagccucaucaacgacaugcccaucaccaacgaccagaagaagcugaugagcaacaacgugcagaucguccggcagcaguccuacagcaucaugugcaucaucaaggaggaggugcuggccuacgugguccagcucccgcuguacggcgugaucgacacgcccugcuggaagcugcacaccagcccccucugcaccaccaacacgaaggagggguccaacaucugccugacccgcaccgaccggggcugguacugcgacaacgccggcuccgugagcuucuucccccaggcggagaccugcaagguccaguccaaccgcguguucugcgacacgaugaacagccugacccucccguccgaggucaaccugugcaacguggacaucuucaaccccaaguacgacugcaagaucaugaccagcaagaccgacguguccagcuccgucaucacgagccugggggccaucguguccugcuacggcaagaccaagugcaccgccagcaacaagaaccgggggaucaucaagaccuucuccaacggcugcgacuacgugagcaacaagggcgucgacacgguguccguggggaacacccucuacugcgucaacaagcaggagggccagagccuguacgugaagggggagcccaucaucaacuucuacgacccccugguguucccgagcgacgaguucgacgccuccaucagccaggucaacgagaagaucaaccagucccucgccuucauccgcaagagcgacgagcugcugcacaacgugaacgcgggcaaguccaccaccaacaucaugaucaccacgaucaucaucgugaucaucgucauccuccugagccugaucgccguggggcuccugcuguacugcaaggcccgguccacccccgugacccugagcaaggaccagcucuccggcaucaacaacaucgccuucagcaacugaggacuaguguccaccugucccuccugggcugcuggauugucucguuuuccugccaaauaaacaggaucagcgcuuuacagaucuaaaaaaaaaaaaaaaaaaaaaaaaaaaaaaaaaaaaaaaaaaaaaaaaaaaaaaaaaaaaaaaaugcaucccccccccccccccccccccccccccccccaaaggcucuuuucagagccaccagaauu

SEQ ID NO: 3283 - RNA, 1937 nt, Artificial Sequence
  mRNA product Design e-1 comprising derived and/or modified sequence from HRSV(A2)__F_DSCav1_mut3 (opt2)
gggagaauauaagcguuggcggagcgucgguuguagcacucugcgcgcccgcucuucugcugcuguuugucuacuuccuccugcuuccccgccgccgccgccgccaucaagcuuaccauggagcuccucauccucaaggccaacgccaucaccaccauccucaccgccgucaccuucugcuucgccuccggccagaacaucaccgaggaguucuaccaguccaccugcuccgccgucuccaagggcuaccucggcgcccuccgcaccggcugguacaccuccgucaucaccaucgagcucuccaacaucaaggagaucaagugcaacggcaccgacgccaaggucaagcucaucaagcaggagcucgacaaguacaagaacgccgucaccgaccuccagcuccucaugcaguccacccccgccaccggcuccggcuccgccaucugcuccggcgucgccgucugcaagguccuccaccucgagggcgaggucaacaagaucaaguccgcccuccucuccaccaacaaggccgucgucucccucuccaacggcgucuccguccucaccuucaagguccucgaccucaagaacuacaucgacaagcagcuccuccccauccucaacaagcaguccugcuccauccccaacaucgagaccgucaucgaguuccagcagaagaacaaccgccuccucgagaucacccgcgaguucuccgucaacgccggcgucaccacccccgucuccaccuacaugcucaccaacuccgagcuccucucccucaucaacgacaugcccaucaccaacgaccagaagaagcucauguccaacaacguccagaucguccgccagcaguccuacuccaucaugugcaucaucaaggaggagguccucgccuacgucguccagcucccccucuacggcgucaucgacacccccugcuggaagcuccacaccuccccccucugcaccaccaacaccaaggagggcuccaacaucugccucacccgcaccgaccgcggcugguacugcgacaacgccggcuccgucuccuucuucccccaggccgagaccugcaagguccaguccaaccgcgucuucugcgacaccaugaacucccucacccuccccuccgaggucaaccucugcaacgucgacaucuucaaccccaaguacgacugcaagaucaugaccuccaagaccgacgucuccuccuccgucaucaccucccucggcgccaucgucuccugcuacggcaagaccaagugcaccgccuccaacaagaaccgcggcaucaucaagaccuucuccaacggcugcgacuacgucuccaacaagggcgucgacaccgucuccgucggcaacacccucuacugcgucaacaagcaggagggccagucccucuacgucaagggcgagcccaucaucaacuucuacgacccccucgucuuccccuccgacgaguucgacgccuccaucucccaggucaacgagaagaucaaccagucccucgccuucauccgcaaguccgacgagcuccuccacaacgucaacgccggcaaguccaccaccaacaucaugaucaccaccaucaucaucgucaucaucgucauccuccucucccucaucgccgucggccuccuccucuacugcaaggcccgcuccacccccgucacccucuccaaggaccagcucuccggcaucaacaacaucgccuucuccaacugaggacuaguguccaccugucccuccugggcugcuggauugucucguuuuccugccaaauaaacaggaucagcgcuuuacagaucuaaaaaaaaaaaaaaaaaaaaaaaaaaaaaaaaaaaaaaaaaaaaaaaaaaaaaaaaaaaaaaaaugcaucccccccccccccccccccccccccccccccaaaggcucuuuucagagccaccagaauu

SEQ ID NO: 3284 - RNA, 1937 nt, Artificial Sequence
  mRNA product Design e-1 comprising derived and/or modified sequence from HRSV(A2)__F_DSCav1_mut3 (opt3)
gggagaauauaagcguuggcggagcgucgguuguagcacucugcgcgcccgcucuucugcugcuguuugucuacuuccuccugcuuccccgccgccgccgccgccaucaagcuuaccauggagcugcucauccuuaaggccaacgcuauuaccacaauacugacugcagugacguucugcuuugccagcggccagaauaucaccgaagaguucuaccaauccacauguucugcggucucaaaaggguauuugggagcuuuaagaacugguugguacaccaguguuauuacaaucgaacugagcaacauuaaggagaucaaaugcaauggcaccgacgccaaggugaaacuaauaaagcaggaacucgauaaguauaaaaacgcaguaacugaccugcagcuucugaugcaguccacacccgccaccgggucuggaucggcuaucuguucaggcguggcagucugcaagguguugcaccucgagggugagguuaauaaaauuaagagcgcccugcugaguacgaacaaagcuguggucucccucucuaauggggugagcguauuaacuuuuaagguucuggaucuuaagaacuacaucgacaaacaauugcugccuauucuaaauaagcaguccuguucaaucccaaacauagaaaccgugauugaguuccagcagaaaaauaacaggcuccuggaaaucacacgggaguuuagugucaaugccggagugacuaccccggugagcacauauaugcuuaccaacucugagcuguugucccucauuaaugauaugcccaucacgaacgaccaaaagaaacugaugucaaacaauguccagaucguucgccagcagagcuacaguauuaugugcauaaucaaggaagagguguuagcguauguagugcaacugccucucuacggcgucauugauacuccauguuggaaacuucauacaucuccccugugcaccacuaacacaaaggaaggcuccaauaucuguuugacccgaacggaccgugggugguacugcgauaacgcaggaagcgugucguucuuuccucaggccgagaccuguaagguucagucuaauagaguguucugcgacacaaugaacucccuaacucugccaucagaagucaaucucugcaacguggauauauuuaaucccaaauaugacuguaagauuaugaccaguaaaacagauguaagcuccucuguuaucacuagccugggugcuaucgugucaugcuacggcaagaccaaauguacagccaguaacaagaauagggggauuaucaagaccuucuccaacggaugcgacuaugucagcaauaaaggcguggacacugucucuguggguaacacgcuuuacuguguuaauaagcaagaggggcagucacuguaugugaaaggagagccuauuauaaacuuuuacgauccauugguauucccgagugacgaauuugaugcaagcaucucccaggucaacgagaagauuaaucagucucucgcuuucauccggaaaucggacgaacuguuacacaacgugaaugccggcaagagcacaaccaacaucaugauuacuaccauaaucauuguuaucauugugauccugcuaucccucauagcggucggccugcuuuuguauugcaaggcccgcucaacacccgugacccugaguaaagaucaacucucugggaucaauaacauugcauucagcaauugaggacuaguguccaccugucccuccugggcugcuggauugucucguuuuccugccaaauaaacaggaucagcgcuuuacagaucuaaaaaaaaaaaaaaaaaaaaaaaaaaaaaaaaaaaaaaaaaaaaaaaaaaaaaaaaaaaaaaaaugcaucccccccccccccccccccccccccccccccaaaggcucuuuucagagccaccagaauu

SEQ ID NO: 3285 - RNA, 1937 nt, Artificial Sequence
  mRNA product Design e-1 comprising derived and/or modified sequence from HRSV(A2)__F_DSCav1_mut3 (opt4)
gggagaauauaagcguuggcggagcgucgguuguagcacucugcgcgcccgcucuucugcugcuguuugucuacuuccuccugcuuccccgccgccgccgccgccaucaagcuuaccauggagcugcugauccugaaggccaacgccaucaccaccauccugaccgccgugaccuucugcuucgccagcggccagaacaucaccgaggaguucuaccagagcaccugcagcgccgugagcaagggcuaccugggcgcccugagaaccggcugguacaccagcgugaucaccaucgagcugagcaacaucaaggagaucaagugcaacggcaccgacgccaaggugaagcugaucaagcaggagcuggacaaguacaagaacgccgugaccgaccugcagcugcugaugcagagcacccccgccaccggcagcggcagcgccaucugcagcggcguggccgugugcaaggugcugcaccuggagggcgaggugaacaagaucaagagcgcccugcugagcaccaacaaggccguggugagccugagcaacggcgugagcgugcugaccuucaaggugcuggaccugaagaacuacaucgacaagcagcugcugcccauccugaacaagcagagcugcagcauccccaacaucgagaccgugaucgaguuccagcagaagaacaacagacugcuggagaucaccagagaguucagcgugaacgccggcgugaccacccccgugagcaccuacaugcugaccaacagcgagcugcugagccugaucaacgacaugcccaucaccaacgaccagaagaagcugaugagcaacaacgugcagaucgugagacagcagagcuacagcaucaugugcaucaucaaggaggaggugcuggccuacguggugcagcugccccuguacggcgugaucgacacccccugcuggaagcugcacaccagcccccugugcaccaccaacaccaaggagggcagcaacaucugccugaccagaaccgacagaggcugguacugcgacaacgccggcagcgugagcuucuucccccaggccgagaccugcaaggugcagagcaacagaguguucugcgacaccaugaacagccugacccugcccagcgaggugaaccugugcaacguggacaucuucaaccccaaguacgacugcaagaucaugaccagcaagaccgacgugagcagcagcgugaucaccagccugggcgccaucgugagcugcuacggcaagaccaagugcaccgccagcaacaagaacagaggcaucaucaagaccuucagcaacggcugcgacuacgugagcaacaagggcguggacaccgugagcgugggcaacacccuguacugcgugaacaagcaggagggccagagccuguacgugaagggcgagcccaucaucaacuucuacgacccccugguguuccccagcgacgaguucgacgccagcaucagccaggugaacgagaagaucaaccagagccuggccuucaucagaaagagcgacgagcugcugcacaacgugaacgccggcaagagcaccaccaacaucaugaucaccaccaucaucaucgugaucaucgugauccugcugagccugaucgccgugggccugcugcuguacugcaaggccagaagcacccccgugacccugagcaaggaccagcugagcggcaucaacaacaucgccuucagcaacugaggacuaguguccaccugucccuccugggcugcuggauugucucguuuuccugccaaauaaacaggaucagcgcuuuacagaucuaaaaaaaaaaaaaaaaaaaaaaaaaaaaaaaaaaaaaaaaaaaaaaaaaaaaaaaaaaaaaaaaugcaucccccccccccccccccccccccccccccccaaaggcucuuuucagagccaccagaauu

SEQ ID NO: 3286 - RNA, 1937 nt, Artificial Sequence
  mRNA product Design e-1 comprising derived and/or modified sequence from HRSV(A2)__F_DSCav1_mut3 (opt5)
gggagaauauaagcguuggcggagcgucgguuguagcacucugcgcgcccgcucuucugcugcuguuugucuacuuccuccugcuuccccgccgccgccgccgccaucaagcuuaccauggagcugcucauccugaaggccaacgcuauuaccacaauccuuacggccgugaccuucugcuuugcgagcggccagaauauuacagaagaguucuaccaauccaccuguucugcugucagcaaaggguaucugggagcccucagaacaggcugguacaccuccguuaucacaauugaacugucuaacaucaaggagaucaaaugcaaugggaccgacgccaaggugaaacuuauuaagcaggaacuggauaaguauaaaaacgcugugacggaccuccagcugcugaugcagagcacccccgccacaggauccggcucugcuaucuguagcggggucgccgugugcaagguucuccaccuggagggagaggugaauaaaauuaaguccgcgcuucugagcaccaacaaagccgucgugucucucuccaauggcguuagcgugcugacauuuaagguccuugaucugaagaacuacaucgacaaacaacuccugccuauucugaauaagcagucuuguuccaucccgaacauugaaaccgugaucgaguuccagcagaaaaauaaccggcuccuggaaaucacgcgcgaguuuagcgugaaugcuggcgucacaacccccguuucuacauauaugcuuaccaacuccgagcugcucagccugauuaaugauaugccuaucaccaacgaccaaaagaaacuuauguccaacaaugugcagauugugagacagcagucuuacagcaucaugugcauuaucaaggaagagguccuggccuaugugguucaacucccccuguacggggugaucgauacaccuuguuggaaacugcauacgagcccccucugcaccacaaacaccaaggaaggauccaauauuugucugacacggaccgaccgcggcugguacugcgauaacgcugggucugucuccuucuuuccucaggccgagacguguaaggugcagagcaauagaguuuucugcgacacaaugaacucucuuacccugccgagcgaagugaaucucugcaacgucgauaucuuuaaucccaaauaugacuguaagauuaugaccuccaaaacagaugugucuagcuccgucaucaccagccugggagcgauugugucuugcuacggcaagacaaaauguacggccuccaacaagaaucgggggaucaucaagaccuucagcaacggaugcgacuauguuucuaauaaaggcguggacacagucuccgugggcaacacccuuuacuguguuaauaagcaagaggggcagagccuguaugugaaaggagagccuauuaucaacuuuuacgauccccucgucuucccuuccgacgaauuugaugcuucuauuagccaggugaacgagaagaucaaucagucccuggccuucauucgcaaaucugacgaacugcuccacaacgugaaugcuggcaagagcacaaccaacaucaugauuacgaccaucaucauuguuaucauugucauccugcuuucccugauugccguggggcuccugcuguauugcaaggccagaagcacacccgugacccuuucuaaagaucaacucuccggaaucaauaacaucgcuuucagcaauugaggacuaguguccaccugucccuccugggcugcuggauugucucguuuuccugccaaauaaacaggaucagcgcuuuacagaucuaaaaaaaaaaaaaaaaaaaaaaaaaaaaaaaaaaaaaaaaaaaaaaaaaaaaaaaaaaaaaaaaugcaucccccccccccccccccccccccccccccccaaaggcucuuuucagagccaccagaauu

SEQ ID NO: 3287 - RNA, 1937 nt, Artificial Sequence
  mRNA product Design e-1 comprising derived and/or modified sequence from HRSV(A2)__F_DSCav1_mut3 (opt6)
gggagaauauaagcguuggcggagcgucgguuguagcacucugcgcgcccgcucuucugcugcuguuugucuacuuccuccugcuuccccgccgccgccgccgccaucaagcuuaccauggaauuacucauacuaaaagccaaugccauaaccacuauucuaacagcaguaacauucuguuucgccucaggacaaaacauaacagaagaauuuuaucaauccaccuguuccgcagucucgaaaggcuaccuuggcgcacuaagaaccggaugguauacaucaguaauaaccauugaacuaucaaauaucaaagaaauaaaaugcaacggaacugacgcaaaagucaaacuaauaaaacaagaauuagacaaauacaaaaacgccguuacagacuuacaacuacuaaugcaaucaacuccagcaacaggaucaggaucugcuauaugcucaggugucgccguauguaaaguguuacaccucgaaggcgaaguaaacaaaauaaaaucagcacuacuauccacaaauaaagcaguaguaucacuauccaaugguguaucaguacucacauucaaaguacuagacuuaaaaaauuauauagauaaacaauuacuaccaauauuaaacaaacaaucaugcucaauaccaaacauagaaaccgucauugaauuucaacaaaaaaacaaucgacuucuugaaauaacacgagaauuuucaguaaaugccggaguaacaaccccagucucaacauacauguuaaccaacucugaacuccuaagccuaaucaacgacaugcccauaacuaacgaccaaaaaaaacuaauguccaauaauguccaaauaguaagacaacaauccuacucaauaaugugcauuauaaaagaagaaguccucgccuauguaguacaacuacccuuauacggaguaauugacacaccauguuggaaacuacauacaucaccacuaugcaccacuaacacaaaagaaggcuccaacauaugccuaacccgaacagaucgcggaugguauugcgacaacgcaggaaguguauccuucuuuccacaagcagaaacaugcaaaguacaauccaacagaguauucugugacaccaugaacucucuaacacuaccuuccgaaguaaauuuaugcaacguagacauauuuaaucccaaauacgacuguaaaauaaugaccucaaaaacugaugucucaucaucagucauuacaucacucggagcaauagucaguugcuauggaaaaaccaaaugcacagcuaguaacaaaaacagggguauaauaaaaacauuuucaaacggaugcgauuacguaucaaauaaaggaguagacaccguauccguaggaaauacucucuacugcguaaacaaacaagaaggacaaucccuauacguaaaaggcgaaccaaucauuaacuuuuacgacccacuuguauuuccaucagacgaauuugaugccucaauaucccaagucaaugaaaaaauaaaccaaagucuagcauucauccgaaaaucagaugaacuuuuacacaacguaaacgccggaaaaucaacaacaaacaucaugaucacaacaaucaucauaguaauaauaguuauacuacuuuccuuaauagcagucggccuacuacucuacugcaaagcacgauccacaccaguaaccuuaucuaaagaccaacucucaggcauaaacaacauagcauucucaaacuaaggacuaguguccaccugucccuccugggcugcuggauugucucguuuuccugccaaauaaacaggaucagcgcuuuacagaucuaaaaaaaaaaaaaaaaaaaaaaaaaaaaaaaaaaaaaaaaaaaaaaaaaaaaaaaaaaaaaaaaugcaucccccccccccccccccccccccccccccccaaaggcucuuuucagagccaccagaauu

SEQ ID NO: 3288 - RNA, 1937 nt, Artificial Sequence
  mRNA product Design e-1 comprising derived and/or modified sequence from HRSV(A2)__F_DSCav1_mut3 (opt11)
gggagaauauaagcguuggcggagcgucgguuguagcacucugcgcgcccgcucuucugcugcuguuugucuacuuccuccugcuuccccgccgccgccgccgccaucaagcuuaccauggaacuccucauccuuaaagcaaacgccaucacaaccauccucacagcagucacuuucugcuucgcauccggacaaaacaucacagaagaguucuaucaauccacgugcuccgcaguuuccaaaggauaccuuggagccuuacgaaccggcugguacaccuccgucaucaccauagaacucagcaacaucaaagaaaucaaaugcaacggaaccgacgcaaaagucaaacucaucaaacaagaacuagacaaauacaaaaacgcagucaccgaccuccaacuacucaugcaaucaacccccgcaaccggcuccggcuccgccaucugcuccggaguagccguaugcaaaguccuccaccucgaaggcgaaguuaacaagaucaaguccgcacuccuaucaaccaacaaagcagucgucucccuauccaacggcgucuccguauuaacauucaaaguccucgaccucaaaaacuacauagacaaacagcuacuccccauccuaaacaaacaauccugcuccauccccaacaucgaaacugucaucgaguuccaacagaaaaacaaccgccuccuagaaaucacccgagaguucuccguaaacgccggcgucacuacccccgucucuaccuauaugcuaaccaacucugaacuccuaucccuaaucaacgauaugcccauaacuaacgaccaaaagaaacuuauguccaacaacguacaaauaguccggcaacaaucauacucuaucaugugcaucaucaaagaagaaguacuugccuacguuguccaacucccacuauacggcgucauagacacuccaugcuggaaacuucacaccucaccccucugcaccacuaacacuaaagaaggcucuaacaucugccuuacccgcaccgaccgcggaugguacugcgacaacgcaggcucaguuagcuucuucccacaagccgaaaccugcaaaguccagucaaaccgugucuucugcgauaccaugaacucgcucacccucccuuccgaagucaaccucugcaacgucgacaucuucaaccccaaauacgacugcaaaaucaugaccucaaaaaccgacguaucuucuuccgucaucaccucccucggcgccaucguauccugcuacggcaaaaccaaaugcacugcaucaaacaaaaaccgaggcaucaucaaaaccuucucgaacggaugcgacuacguauccaacaagggcgucgacacagucuccguugguaacacccucuacugcgucaacaaacaagaaggccaaucccuauacguaaaaggcgaacccaucaucaacuucuacgacccccucgucuuccccagugacgaauuugacgccuccaucucccaagucaacgaaaagaucaaccaaucccuugccuucauacgcaaauccgacgaacuccuacacaacguuaacgccggaaaaucaacaaccaacaucaugaucacaaccaucauaaucgucauaaucgucauacuccucucccucauagccgucggccugcuauuguacuguaaagcccgcuccacaccagucacacuuucaaaagaccaacucuccgggaucaacaacaucgccuucuccaacuaaggacuaguguccaccugucccuccugggcugcuggauugucucguuuuccugccaaauaaacaggaucagcgcuuuacagaucuaaaaaaaaaaaaaaaaaaaaaaaaaaaaaaaaaaaaaaaaaaaaaaaaaaaaaaaaaaaaaaaaugcaucccccccccccccccccccccccccccccccaaaggcucuuuucagagccaccagaauu

SEQ ID NO: 3289 - RNA, 1919 nt, Artificial Sequence
  mRNA product Design e-2 comprising derived and/or modified sequence from HRSV(A2)__F_DSCav1_mut3 (opt1)
gggagacccgugacccggaaguuguacggcuacgcgacuuucccucccacaaacccucgcgcccuuccuuuccuacuugggcccggcagaaagcuuaccauggagcugcucauccugaaggccaacgccaucaccaccauccugacggcggugaccuucugcuucgccagcggccagaacaucaccgaggaguucuaccaguccacgugcagcgccgucuccaagggguaccucggcgcccugcggaccggcugguacaccuccgugaucaccaucgagcugagcaacaucaaggagaucaagugcaacgggaccgacgccaaggugaagcucaucaagcaggagcuggacaaguacaagaacgcggucacggaccugcagcuccugaugcaguccaccccggcaaccggcuccggcuccgccaucugcagcggcgucgccgugugcaaggugcugcaccucgagggggaggucaacaagaucaagagcgcccugcuguccaccaacaaggccguggugagccucuccaacggcgucagcgugcugaccuucaaggugcuggaccucaagaacuacaucgacaagcagcugcugcccauccugaacaagcagagcugcuccauccccaacaucgagacggugaucgaguuccagcagaagaacaaccggcuccuggagaucacccgcgaguucagcgugaacgccggggucaccacccccguguccacguacaugcugaccaacagcgagcuccugucccugaucaacgacaugccgaucaccaacgaccagaagaagcucaugagcaacaacgugcagaucguccggcagcaguccuacagcaucaugugcaucaucaaggaggaggugcuggcguacgugguccagcugccccucuacggcgugaucgacacccccugcuggaagcugcacacgagcccccugugcaccaccaacaccaaggagggguccaacaucugccucacgcgcaccgaccggggcugguacugcgacaacgccggcagcgucuccuucuucccgcaggccgagaccugcaaggugcagagcaaccgcguguucugcgacaccaugaacucccugacgcugcccagcgagguaaaccucugcaacgucgacaucuucaaccccaaguacgacugcaagaucaugaccuccaagaccgacgugagcuccagcgugaucaccucccugggggccaucgucagcugcuacggcaagacgaagugcaccgccagcaacaagaaccgggggaucaucaagaccuucuccaacggcugcgacuacgugagcaacaagggcguggacaccguguccgucgggaacacccuguacugcgugaacaagcaggagggccagagccucuacgugaagggggagcccaucaucaacuucuacgacccgcuggucuuccccuccgacgaguucgacgcgagcaucucccaggugaacgagaagaucaaccagagccuggccuucauccgcaaguccgacgagcugcuccacaacgugaacgccggcaagagcacgaccaacaucaugaucaccaccaucaucaucgucaucaucgugauccugcugucccucaucgccguggggcugcugcucuacugcaaggcccggagcacgcccgucacccuguccaaggaccagcugagcggcaucaacaacaucgcguucuccaacugaggacuaguguccaccugucccuccugggcugcuggauugucucguuuuccugccaaauaaacaggaucagcgcuuuacagaucuaaaaaaaaaaaaaaaaaaaaaaaaaaaaaaaaaaaaaaaaaaaaaaaaaaaaaaaaaaaaaaaaugcaucccccccccccccccccccccccccccccccaaaggcucuuuucagagccaccagaauu

SEQ ID NO: 3290 - RNA, 1919 nt, Artificial Sequence
  mRNA product Design e-2 comprising derived and/or modified sequence from HRSV(A2)__F_DSCav1_mut3 (opt1)
gggagacccgugacccggaaguuguacggcuacgcgacuuucccucccacaaacccucgcgcccuuccuuuccuacuugggcccggcagaaagcuuaccauggagcugcucauccugaaggccaacgccaucaccaccauccugacggcggugaccuucugcuucgccagcggccagaacaucaccgaggaguucuaccaguccacgugcagcgccgucuccaagggguaccucggcgcccugcgcaccgggugguacaccagcgugaucaccaucgagcuguccaacaucaaggagaucaagugcaacggcaccgacgccaaggugaagcucaucaagcaggagcuggacaaguacaagaacgcggucacggaccugcagcuccugaugcagagcacccccgccaccggguccggcagcgccaucugcuccggcguggccgugugcaagguccugcaccucgagggggaggugaacaagaucaagagcgcgcugcuguccaccaacaaggccguggucagccucuccaacggcgugagcgugcugacguucaagguccuggaccucaagaacuacaucgacaagcagcugcugccgauccucaacaagcaguccugcagcauccccaacaucgagaccgugaucgaguuccagcagaagaacaaccggcugcuggagaucacccgcgaguucuccgugaacgccggggucaccacgcccgugagcaccuacaugcucaccaacuccgagcugcugagccucaucaacgacaugcccaucaccaacgaccagaagaagcugaugagcaacaacgugcagaucguccggcagcaguccuacagcaucaugugcaucaucaaggaggaggugcuggccuacgugguccagcucccgcuguacggcgugaucgacacgcccugcuggaagcugcacaccagcccccucugcaccaccaacacgaaggagggguccaacaucugccugacccgcaccgaccggggcugguacugcgacaacgccggcuccgugagcuucuucccccaggcggagaccugcaagguccaguccaaccgcguguucugcgacacgaugaacagccugacccucccguccgaggucaaccugugcaacguggacaucuucaaccccaaguacgacugcaagaucaugaccagcaagaccgacguguccagcuccgucaucacgagccugggggccaucguguccugcuacggcaagaccaagugcaccgccagcaacaagaaccgggggaucaucaagaccuucuccaacggcugcgacuacgugagcaacaagggcgucgacacgguguccguggggaacacccucuacugcgucaacaagcaggagggccagagccuguacgugaagggggagcccaucaucaacuucuacgacccccugguguucccgagcgacgaguucgacgccuccaucagccaggucaacgagaagaucaaccagucccucgccuucauccgcaagagcgacgagcugcugcacaacgugaacgcgggcaaguccaccaccaacaucaugaucaccacgaucaucaucgugaucaucgucauccuccugagccugaucgccguggggcuccugcuguacugcaaggcccgguccacccccgugacccugagcaaggaccagcucuccggcaucaacaacaucgccuucagcaacugaggacuaguguccaccugucccuccugggcugcuggauugucucguuuuccugccaaauaaacaggaucagcgcuuuacagaucuaaaaaaaaaaaaaaaaaaaaaaaaaaaaaaaaaaaaaaaaaaaaaaaaaaaaaaaaaaaaaaaaugcaucccccccccccccccccccccccccccccccaaaggcucuuuucagagccaccagaauu

SEQ ID NO: 3291 - RNA, 1919 nt, Artificial Sequence
  mRNA product Design e-2 comprising derived and/or modified sequence from HRSV(A2)__F_DSCav1_mut3 (opt2)
gggagacccgugacccggaaguuguacggcuacgcgacuuucccucccacaaacccucgcgcccuuccuuuccuacuugggcccggcagaaagcuuaccauggagcuccucauccucaaggccaacgccaucaccaccauccucaccgccgucaccuucugcuucgccuccggccagaacaucaccgaggaguucuaccaguccaccugcuccgccgucuccaagggcuaccucggcgcccuccgcaccggcugguacaccuccgucaucaccaucgagcucuccaacaucaaggagaucaagugcaacggcaccgacgccaaggucaagcucaucaagcaggagcucgacaaguacaagaacgccgucaccgaccuccagcuccucaugcaguccacccccgccaccggcuccggcuccgccaucugcuccggcgucgccgucugcaagguccuccaccucgagggcgaggucaacaagaucaaguccgcccuccucuccaccaacaaggccgucgucucccucuccaacggcgucuccguccucaccuucaagguccucgaccucaagaacuacaucgacaagcagcuccuccccauccucaacaagcaguccugcuccauccccaacaucgagaccgucaucgaguuccagcagaagaacaaccgccuccucgagaucacccgcgaguucuccgucaacgccggcgucaccacccccgucuccaccuacaugcucaccaacuccgagcuccucucccucaucaacgacaugcccaucaccaacgaccagaagaagcucauguccaacaacguccagaucguccgccagcaguccuacuccaucaugugcaucaucaaggaggagguccucgccuacgucguccagcucccccucuacggcgucaucgacacccccugcuggaagcuccacaccuccccccucugcaccaccaacaccaaggagggcuccaacaucugccucacccgcaccgaccgcggcugguacugcgacaacgccggcuccgucuccuucuucccccaggccgagaccugcaagguccaguccaaccgcgucuucugcgacaccaugaacucccucacccuccccuccgaggucaaccucugcaacgucgacaucuucaaccccaaguacgacugcaagaucaugaccuccaagaccgacgucuccuccuccgucaucaccucccucggcgccaucgucuccugcuacggcaagaccaagugcaccgccuccaacaagaaccgcggcaucaucaagaccuucuccaacggcugcgacuacgucuccaacaagggcgucgacaccgucuccgucggcaacacccucuacugcgucaacaagcaggagggccagucccucuacgucaagggcgagcccaucaucaacuucuacgacccccucgucuuccccuccgacgaguucgacgccuccaucucccaggucaacgagaagaucaaccagucccucgccuucauccgcaaguccgacgagcuccuccacaacgucaacgccggcaaguccaccaccaacaucaugaucaccaccaucaucaucgucaucaucgucauccuccucucccucaucgccgucggccuccuccucuacugcaaggcccgcuccacccccgucacccucuccaaggaccagcucuccggcaucaacaacaucgccuucuccaacugaggacuaguguccaccugucccuccugggcugcuggauugucucguuuuccugccaaauaaacaggaucagcgcuuuacagaucuaaaaaaaaaaaaaaaaaaaaaaaaaaaaaaaaaaaaaaaaaaaaaaaaaaaaaaaaaaaaaaaaugcaucccccccccccccccccccccccccccccccaaaggcucuuuucagagccaccagaauu

SEQ ID NO: 3292 - RNA, 1919 nt, Artificial Sequence
  mRNA product Design e-2 comprising derived and/or modified sequence from HRSV(A2)__F_DSCav1_mut3 (opt3)
gggagacccgugacccggaaguuguacggcuacgcgacuuucccucccacaaacccucgcgcccuuccuuuccuacuugggcccggcagaaagcuuaccauggagcugcucauccuuaaggccaacgcuauuaccacaauacugacugcagugacguucugcuuugccagcggccagaauaucaccgaagaguucuaccaauccacauguucugcggucucaaaaggguauuugggagcuuuaagaacugguugguacaccaguguuauuacaaucgaacugagcaacauuaaggagaucaaaugcaauggcaccgacgccaaggugaaacuaauaaagcaggaacucgauaaguauaaaaacgcaguaacugaccugcagcuucugaugcaguccacacccgccaccgggucuggaucggcuaucuguucaggcguggcagucugcaagguguugcaccucgagggugagguuaauaaaauuaagagcgcccugcugaguacgaacaaagcuguggucucccucucuaauggggugagcguauuaacuuuuaagguucuggaucuuaagaacuacaucgacaaacaauugcugccuauucuaaauaagcaguccuguucaaucccaaacauagaaaccgugauugaguuccagcagaaaaauaacaggcuccuggaaaucacacgggaguuuagugucaaugccggagugacuaccccggugagcacauauaugcuuaccaacucugagcuguugucccucauuaaugauaugcccaucacgaacgaccaaaagaaacugaugucaaacaauguccagaucguucgccagcagagcuacaguauuaugugcauaaucaaggaagagguguuagcguauguagugcaacugccucucuacggcgucauugauacuccauguuggaaacuucauacaucuccccugugcaccacuaacacaaaggaaggcuccaauaucuguuugacccgaacggaccgugggugguacugcgauaacgcaggaagcgugucguucuuuccucaggccgagaccuguaagguucagucuaauagaguguucugcgacacaaugaacucccuaacucugccaucagaagucaaucucugcaacguggauauauuuaaucccaaauaugacuguaagauuaugaccaguaaaacagauguaagcuccucuguuaucacuagccugggugcuaucgugucaugcuacggcaagaccaaauguacagccaguaacaagaauagggggauuaucaagaccuucuccaacggaugcgacuaugucagcaauaaaggcguggacacugucucuguggguaacacgcuuuacuguguuaauaagcaagaggggcagucacuguaugugaaaggagagccuauuauaaacuuuuacgauccauugguauucccgagugacgaauuugaugcaagcaucucccaggucaacgagaagauuaaucagucucucgcuuucauccggaaaucggacgaacuguuacacaacgugaaugccggcaagagcacaaccaacaucaugauuacuaccauaaucauuguuaucauugugauccugcuaucccucauagcggucggccugcuuuuguauugcaaggcccgcucaacacccgugacccugaguaaagaucaacucucugggaucaauaacauugcauucagcaauugaggacuaguguccaccugucccuccugggcugcuggauugucucguuuuccugccaaauaaacaggaucagcgcuuuacagaucuaaaaaaaaaaaaaaaaaaaaaaaaaaaaaaaaaaaaaaaaaaaaaaaaaaaaaaaaaaaaaaaaugcaucccccccccccccccccccccccccccccccaaaggcucuuuucagagccaccagaauu

SEQ ID NO: 3293 - RNA, 1919 nt, Artificial Sequence
  mRNA product Design e-2 comprising derived and/or modified sequence from HRSV(A2)__F_DSCav1_mut3 (opt4)
gggagacccgugacccggaaguuguacggcuacgcgacuuucccucccacaaacccucgcgcccuuccuuuccuacuugggcccggcagaaagcuuaccauggagcugcugauccugaaggccaacgccaucaccaccauccugaccgccgugaccuucugcuucgccagcggccagaacaucaccgaggaguucuaccagagcaccugcagcgccgugagcaagggcuaccugggcgcccugagaaccggcugguacaccagcgugaucaccaucgagcugagcaacaucaaggagaucaagugcaacggcaccgacgccaaggugaagcugaucaagcaggagcuggacaaguacaagaacgccgugaccgaccugcagcugcugaugcagagcacccccgccaccggcagcggcagcgccaucugcagcggcguggccgugugcaaggugcugcaccuggagggcgaggugaacaagaucaagagcgcccugcugagcaccaacaaggccguggugagccugagcaacggcgugagcgugcugaccuucaaggugcuggaccugaagaacuacaucgacaagcagcugcugcccauccugaacaagcagagcugcagcauccccaacaucgagaccgugaucgaguuccagcagaagaacaacagacugcuggagaucaccagagaguucagcgugaacgccggcgugaccacccccgugagcaccuacaugcugaccaacagcgagcugcugagccugaucaacgacaugcccaucaccaacgaccagaagaagcugaugagcaacaacgugcagaucgugagacagcagagcuacagcaucaugugcaucaucaaggaggaggugcuggccuacguggugcagcugccccuguacggcgugaucgacacccccugcuggaagcugcacaccagcccccugugcaccaccaacaccaaggagggcagcaacaucugccugaccagaaccgacagaggcugguacugcgacaacgccggcagcgugagcuucuucccccaggccgagaccugcaaggugcagagcaacagaguguucugcgacaccaugaacagccugacccugcccagcgaggugaaccugugcaacguggacaucuucaaccccaaguacgacugcaagaucaugaccagcaagaccgacgugagcagcagcgugaucaccagccugggcgccaucgugagcugcuacggcaagaccaagugcaccgccagcaacaagaacagaggcaucaucaagaccuucagcaacggcugcgacuacgugagcaacaagggcguggacaccgugagcgugggcaacacccuguacugcgugaacaagcaggagggccagagccuguacgugaagggcgagcccaucaucaacuucuacgacccccugguguuccccagcgacgaguucgacgccagcaucagccaggugaacgagaagaucaaccagagccuggccuucaucagaaagagcgacgagcugcugcacaacgugaacgccggcaagagcaccaccaacaucaugaucaccaccaucaucaucgugaucaucgugauccugcugagccugaucgccgugggccugcugcuguacugcaaggccagaagcacccccgugacccugagcaaggaccagcugagcggcaucaacaacaucgccuucagcaacugaggacuaguguccaccugucccuccugggcugcuggauugucucguuuuccugccaaauaaacaggaucagcgcuuuacagaucuaaaaaaaaaaaaaaaaaaaaaaaaaaaaaaaaaaaaaaaaaaaaaaaaaaaaaaaaaaaaaaaaugcaucccccccccccccccccccccccccccccccaaaggcucuuuucagagccaccagaauu

SEQ ID NO: 3294 - RNA, 1919 nt, Artificial Sequence
  mRNA product Design e-2 comprising derived and/or modified sequence from HRSV(A2)__F_DSCav1_mut3 (opt5)
gggagacccgugacccggaaguuguacggcuacgcgacuuucccucccacaaacccucgcgcccuuccuuuccuacuugggcccggcagaaagcuuaccauggagcugcucauccugaaggccaacgcuauuaccacaauccuuacggccgugaccuucugcuuugcgagcggccagaauauuacagaagaguucuaccaauccaccuguucugcugucagcaaaggguaucugggagcccucagaacaggcugguacaccuccguuaucacaauugaacugucuaacaucaaggagaucaaaugcaaugggaccgacgccaaggugaaacuuauuaagcaggaacuggauaaguauaaaaacgcugugacggaccuccagcugcugaugcagagcacccccgccacaggauccggcucugcuaucuguagcggggucgccgugugcaagguucuccaccuggagggagaggugaauaaaauuaaguccgcgcuucugagcaccaacaaagccgucgugucucucuccaauggcguuagcgugcugacauuuaagguccuugaucugaagaacuacaucgacaaacaacuccugccuauucugaauaagcagucuuguuccaucccgaacauugaaaccgugaucgaguuccagcagaaaaauaaccggcuccuggaaaucacgcgcgaguuuagcgugaaugcuggcgucacaacccccguuucuacauauaugcuuaccaacuccgagcugcucagccugauuaaugauaugccuaucaccaacgaccaaaagaaacuuauguccaacaaugugcagauugugagacagcagucuuacagcaucaugugcauuaucaaggaagagguccuggccuaugugguucaacucccccuguacggggugaucgauacaccuuguuggaaacugcauacgagcccccucugcaccacaaacaccaaggaaggauccaauauuugucugacacggaccgaccgcggcugguacugcgauaacgcugggucugucuccuucuuuccucaggccgagacguguaaggugcagagcaauagaguuuucugcgacacaaugaacucucuuacccugccgagcgaagugaaucucugcaacgucgauaucuuuaaucccaaauaugacuguaagauuaugaccuccaaaacagaugugucuagcuccgucaucaccagccugggagcgauugugucuugcuacggcaagacaaaauguacggccuccaacaagaaucgggggaucaucaagaccuucagcaacggaugcgacuauguuucuaauaaaggcguggacacagucuccgugggcaacacccuuuacuguguuaauaagcaagaggggcagagccuguaugugaaaggagagccuauuaucaacuuuuacgauccccucgucuucccuuccgacgaauuugaugcuucuauuagccaggugaacgagaagaucaaucagucccuggccuucauucgcaaaucugacgaacugcuccacaacgugaaugcuggcaagagcacaaccaacaucaugauuacgaccaucaucauuguuaucauugucauccugcuuucccugauugccguggggcuccugcuguauugcaaggccagaagcacacccgugacccuuucuaaagaucaacucuccggaaucaauaacaucgcuuucagcaauugaggacuaguguccaccugucccuccugggcugcuggauugucucguuuuccugccaaauaaacaggaucagcgcuuuacagaucuaaaaaaaaaaaaaaaaaaaaaaaaaaaaaaaaaaaaaaaaaaaaaaaaaaaaaaaaaaaaaaaaugcaucccccccccccccccccccccccccccccccaaaggcucuuuucagagccaccagaauu

SEQ ID NO: 3295 - RNA, 1919 nt, Artificial Sequence
  mRNA product Design e-2 comprising derived and/or modified sequence from HRSV(A2)__F_DSCav1_mut3 (opt6)
gggagacccgugacccggaaguuguacggcuacgcgacuuucccucccacaaacccucgcgcccuuccuuuccuacuugggcccggcagaaagcuuaccauggaauuacucauacuaaaagccaaugccauaaccacuauucuaacagcaguaacauucuguuucgccucaggacaaaacauaacagaagaauuuuaucaauccaccuguuccgcagucucgaaaggcuaccuuggcgcacuaagaaccggaugguauacaucaguaauaaccauugaacuaucaaauaucaaagaaauaaaaugcaacggaacugacgcaaaagucaaacuaauaaaacaagaauuagacaaauacaaaaacgccguuacagacuuacaacuacuaaugcaaucaacuccagcaacaggaucaggaucugcuauaugcucaggugucgccguauguaaaguguuacaccucgaaggcgaaguaaacaaaauaaaaucagcacuacuauccacaaauaaagcaguaguaucacuauccaaugguguaucaguacucacauucaaaguacuagacuuaaaaaauuauauagauaaacaauuacuaccaauauuaaacaaacaaucaugcucaauaccaaacauagaaaccgucauugaauuucaacaaaaaaacaaucgacuucuugaaauaacacgagaauuuucaguaaaugccggaguaacaaccccagucucaacauacauguuaaccaacucugaacuccuaagccuaaucaacgacaugcccauaacuaacgaccaaaaaaaacuaauguccaauaauguccaaauaguaagacaacaauccuacucaauaaugugcauuauaaaagaagaaguccucgccuauguaguacaacuacccuuauacggaguaauugacacaccauguuggaaacuacauacaucaccacuaugcaccacuaacacaaaagaaggcuccaacauaugccuaacccgaacagaucgcggaugguauugcgacaacgcaggaaguguauccuucuuuccacaagcagaaacaugcaaaguacaauccaacagaguauucugugacaccaugaacucucuaacacuaccuuccgaaguaaauuuaugcaacguagacauauuuaaucccaaauacgacuguaaaauaaugaccucaaaaacugaugucucaucaucagucauuacaucacucggagcaauagucaguugcuauggaaaaaccaaaugcacagcuaguaacaaaaacagggguauaauaaaaacauuuucaaacggaugcgauuacguaucaaauaaaggaguagacaccguauccguaggaaauacucucuacugcguaaacaaacaagaaggacaaucccuauacguaaaaggcgaaccaaucauuaacuuuuacgacccacuuguauuuccaucagacgaauuugaugccucaauaucccaagucaaugaaaaaauaaaccaaagucuagcauucauccgaaaaucagaugaacuuuuacacaacguaaacgccggaaaaucaacaacaaacaucaugaucacaacaaucaucauaguaauaauaguuauacuacuuuccuuaauagcagucggccuacuacucuacugcaaagcacgauccacaccaguaaccuuaucuaaagaccaacucucaggcauaaacaacauagcauucucaaacuaaggacuaguguccaccugucccuccugggcugcuggauugucucguuuuccugccaaauaaacaggaucagcgcuuuacagaucuaaaaaaaaaaaaaaaaaaaaaaaaaaaaaaaaaaaaaaaaaaaaaaaaaaaaaaaaaaaaaaaaugcaucccccccccccccccccccccccccccccccaaaggcucuuuucagagccaccagaauu

SEQ ID NO: 3296 - RNA, 1919 nt, Artificial Sequence
  mRNA product Design e-2 comprising derived and/or modified sequence from HRSV(A2)__F_DSCav1_mut3 (opt11)
gggagacccgugacccggaaguuguacggcuacgcgacuuucccucccacaaacccucgcgcccuuccuuuccuacuugggcccggcagaaagcuuaccauggaacuccucauccuuaaagcaaacgccaucacaaccauccucacagcagucacuuucugcuucgcauccggacaaaacaucacagaagaguucuaucaauccacgugcuccgcaguuuccaaaggauaccuuggagccuuacgaaccggcugguacaccuccgucaucaccauagaacucagcaacaucaaagaaaucaaaugcaacggaaccgacgcaaaagucaaacucaucaaacaagaacuagacaaauacaaaaacgcagucaccgaccuccaacuacucaugcaaucaacccccgcaaccggcuccggcuccgccaucugcuccggaguagccguaugcaaaguccuccaccucgaaggcgaaguuaacaagaucaaguccgcacuccuaucaaccaacaaagcagucgucucccuauccaacggcgucuccguauuaacauucaaaguccucgaccucaaaaacuacauagacaaacagcuacuccccauccuaaacaaacaauccugcuccauccccaacaucgaaacugucaucgaguuccaacagaaaaacaaccgccuccuagaaaucacccgagaguucuccguaaacgccggcgucacuacccccgucucuaccuauaugcuaaccaacucugaacuccuaucccuaaucaacgauaugcccauaacuaacgaccaaaagaaacuuauguccaacaacguacaaauaguccggcaacaaucauacucuaucaugugcaucaucaaagaagaaguacuugccuacguuguccaacucccacuauacggcgucauagacacuccaugcuggaaacuucacaccucaccccucugcaccacuaacacuaaagaaggcucuaacaucugccuuacccgcaccgaccgcggaugguacugcgacaacgcaggcucaguuagcuucuucccacaagccgaaaccugcaaaguccagucaaaccgugucuucugcgauaccaugaacucgcucacccucccuuccgaagucaaccucugcaacgucgacaucuucaaccccaaauacgacugcaaaaucaugaccucaaaaaccgacguaucuucuuccgucaucaccucccucggcgccaucguauccugcuacggcaaaaccaaaugcacugcaucaaacaaaaaccgaggcaucaucaaaaccuucucgaacggaugcgacuacguauccaacaagggcgucgacacagucuccguugguaacacccucuacugcgucaacaaacaagaaggccaaucccuauacguaaaaggcgaacccaucaucaacuucuacgacccccucgucuuccccagugacgaauuugacgccuccaucucccaagucaacgaaaagaucaaccaaucccuugccuucauacgcaaauccgacgaacuccuacacaacguuaacgccggaaaaucaacaaccaacaucaugaucacaaccaucauaaucgucauaaucgucauacuccucucccucauagccgucggccugcuauuguacuguaaagcccgcuccacaccagucacacuuucaaaagaccaacucuccgggaucaacaacaucgccuucuccaacuaaggacuaguguccaccugucccuccugggcugcuggauugucucguuuuccugccaaauaaacaggaucagcgcuuuacagaucuaaaaaaaaaaaaaaaaaaaaaaaaaaaaaaaaaaaaaaaaaaaaaaaaaaaaaaaaaaaaaaaaugcaucccccccccccccccccccccccccccccccaaaggcucuuuucagagccaccagaauu

SEQ ID NO: 3297 - RNA, 1889 nt, Artificial Sequence
  mRNA product Design e-3 comprising derived and/or modified sequence from HRSV(A2)__F_DSCav1_mut3 (opt1)
gggagacuuucccauucuguagcagaauuugguguugccuguggucuuggucccgcggagaagcuuaccauggagcugcucauccugaaggccaacgccaucaccaccauccugacggcggugaccuucugcuucgccagcggccagaacaucaccgaggaguucuaccaguccacgugcagcgccgucuccaagggguaccucggcgcccugcggaccggcugguacaccuccgugaucaccaucgagcugagcaacaucaaggagaucaagugcaacgggaccgacgccaaggugaagcucaucaagcaggagcuggacaaguacaagaacgcggucacggaccugcagcuccugaugcaguccaccccggcaaccggcuccggcuccgccaucugcagcggcgucgccgugugcaaggugcugcaccucgagggggaggucaacaagaucaagagcgcccugcuguccaccaacaaggccguggugagccucuccaacggcgucagcgugcugaccuucaaggugcuggaccucaagaacuacaucgacaagcagcugcugcccauccugaacaagcagagcugcuccauccccaacaucgagacggugaucgaguuccagcagaagaacaaccggcuccuggagaucacccgcgaguucagcgugaacgccggggucaccacccccguguccacguacaugcugaccaacagcgagcuccugucccugaucaacgacaugccgaucaccaacgaccagaagaagcucaugagcaacaacgugcagaucguccggcagcaguccuacagcaucaugugcaucaucaaggaggaggugcuggcguacgugguccagcugccccucuacggcgugaucgacacccccugcuggaagcugcacacgagcccccugugcaccaccaacaccaaggagggguccaacaucugccucacgcgcaccgaccggggcugguacugcgacaacgccggcagcgucuccuucuucccgcaggccgagaccugcaaggugcagagcaaccgcguguucugcgacaccaugaacucccugacgcugcccagcgagguaaaccucugcaacgucgacaucuucaaccccaaguacgacugcaagaucaugaccuccaagaccgacgugagcuccagcgugaucaccucccugggggccaucgucagcugcuacggcaagacgaagugcaccgccagcaacaagaaccgggggaucaucaagaccuucuccaacggcugcgacuacgugagcaacaagggcguggacaccguguccgucgggaacacccuguacugcgugaacaagcaggagggccagagccucuacgugaagggggagcccaucaucaacuucuacgacccgcuggucuuccccuccgacgaguucgacgcgagcaucucccaggugaacgagaagaucaaccagagccuggccuucauccgcaaguccgacgagcugcuccacaacgugaacgccggcaagagcacgaccaacaucaugaucaccaccaucaucaucgucaucaucgugauccugcugucccucaucgccguggggcugcugcucuacugcaaggcccggagcacgcccgucacccuguccaaggaccagcugagcggcaucaacaacaucgcguucuccaacugaggacuaguguccaccugucccuccugggcugcuggauugucucguuuuccugccaaauaaacaggaucagcgcuuuacagaucuaaaaaaaaaaaaaaaaaaaaaaaaaaaaaaaaaaaaaaaaaaaaaaaaaaaaaaaaaaaaaaaaugcaucccccccccccccccccccccccccccccccaaaggcucuuuucagagccaccagaauu

SEQ ID NO: 3298 - RNA, 1889 nt, Artificial Sequence
  mRNA product Design e-3 comprising derived and/or modified sequence from HRSV(A2)__F_DSCav1_mut3 (opt1)
gggagacuuucccauucuguagcagaauuugguguugccuguggucuuggucccgcggagaagcuuaccauggagcugcucauccugaaggccaacgccaucaccaccauccugacggcggugaccuucugcuucgccagcggccagaacaucaccgaggaguucuaccaguccacgugcagcgccgucuccaagggguaccucggcgcccugcgcaccgggugguacaccagcgugaucaccaucgagcuguccaacaucaaggagaucaagugcaacggcaccgacgccaaggugaagcucaucaagcaggagcuggacaaguacaagaacgcggucacggaccugcagcuccugaugcagagcacccccgccaccggguccggcagcgccaucugcuccggcguggccgugugcaagguccugcaccucgagggggaggugaacaagaucaagagcgcgcugcuguccaccaacaaggccguggucagccucuccaacggcgugagcgugcugacguucaagguccuggaccucaagaacuacaucgacaagcagcugcugccgauccucaacaagcaguccugcagcauccccaacaucgagaccgugaucgaguuccagcagaagaacaaccggcugcuggagaucacccgcgaguucuccgugaacgccggggucaccacgcccgugagcaccuacaugcucaccaacuccgagcugcugagccucaucaacgacaugcccaucaccaacgaccagaagaagcugaugagcaacaacgugcagaucguccggcagcaguccuacagcaucaugugcaucaucaaggaggaggugcuggccuacgugguccagcucccgcuguacggcgugaucgacacgcccugcuggaagcugcacaccagcccccucugcaccaccaacacgaaggagggguccaacaucugccugacccgcaccgaccggggcugguacugcgacaacgccggcuccgugagcuucuucccccaggcggagaccugcaagguccaguccaaccgcguguucugcgacacgaugaacagccugacccucccguccgaggucaaccugugcaacguggacaucuucaaccccaaguacgacugcaagaucaugaccagcaagaccgacguguccagcuccgucaucacgagccugggggccaucguguccugcuacggcaagaccaagugcaccgccagcaacaagaaccgggggaucaucaagaccuucuccaacggcugcgacuacgugagcaacaagggcgucgacacgguguccguggggaacacccucuacugcgucaacaagcaggagggccagagccuguacgugaagggggagcccaucaucaacuucuacgacccccugguguucccgagcgacgaguucgacgccuccaucagccaggucaacgagaagaucaaccagucccucgccuucauccgcaagagcgacgagcugcugcacaacgugaacgcgggcaaguccaccaccaacaucaugaucaccacgaucaucaucgugaucaucgucauccuccugagccugaucgccguggggcuccugcuguacugcaaggcccgguccacccccgugacccugagcaaggaccagcucuccggcaucaacaacaucgccuucagcaacugaggacuaguguccaccugucccuccugggcugcuggauugucucguuuuccugccaaauaaacaggaucagcgcuuuacagaucuaaaaaaaaaaaaaaaaaaaaaaaaaaaaaaaaaaaaaaaaaaaaaaaaaaaaaaaaaaaaaaaaugcaucccccccccccccccccccccccccccccccaaaggcucuuuucagagccaccagaauu

SEQ ID NO: 3299 - RNA, 1889 nt, Artificial Sequence
  mRNA product Design e-3 comprising derived and/or modified sequence from HRSV(A2)__F_DSCav1_mut3 (opt2)
gggagacuuucccauucuguagcagaauuugguguugccuguggucuuggucccgcggagaagcuuaccauggagcuccucauccucaaggccaacgccaucaccaccauccucaccgccgucaccuucugcuucgccuccggccagaacaucaccgaggaguucuaccaguccaccugcuccgccgucuccaagggcuaccucggcgcccuccgcaccggcugguacaccuccgucaucaccaucgagcucuccaacaucaaggagaucaagugcaacggcaccgacgccaaggucaagcucaucaagcaggagcucgacaaguacaagaacgccgucaccgaccuccagcuccucaugcaguccacccccgccaccggcuccggcuccgccaucugcuccggcgucgccgucugcaagguccuccaccucgagggcgaggucaacaagaucaaguccgcccuccucuccaccaacaaggccgucgucucccucuccaacggcgucuccguccucaccuucaagguccucgaccucaagaacuacaucgacaagcagcuccuccccauccucaacaagcaguccugcuccauccccaacaucgagaccgucaucgaguuccagcagaagaacaaccgccuccucgagaucacccgcgaguucuccgucaacgccggcgucaccacccccgucuccaccuacaugcucaccaacuccgagcuccucucccucaucaacgacaugcccaucaccaacgaccagaagaagcucauguccaacaacguccagaucguccgccagcaguccuacuccaucaugugcaucaucaaggaggagguccucgccuacgucguccagcucccccucuacggcgucaucgacacccccugcuggaagcuccacaccuccccccucugcaccaccaacaccaaggagggcuccaacaucugccucacccgcaccgaccgcggcugguacugcgacaacgccggcuccgucuccuucuucccccaggccgagaccugcaagguccaguccaaccgcgucuucugcgacaccaugaacucccucacccuccccuccgaggucaaccucugcaacgucgacaucuucaaccccaaguacgacugcaagaucaugaccuccaagaccgacgucuccuccuccgucaucaccucccucggcgccaucgucuccugcuacggcaagaccaagugcaccgccuccaacaagaaccgcggcaucaucaagaccuucuccaacggcugcgacuacgucuccaacaagggcgucgacaccgucuccgucggcaacacccucuacugcgucaacaagcaggagggccagucccucuacgucaagggcgagcccaucaucaacuucuacgacccccucgucuuccccuccgacgaguucgacgccuccaucucccaggucaacgagaagaucaaccagucccucgccuucauccgcaaguccgacgagcuccuccacaacgucaacgccggcaaguccaccaccaacaucaugaucaccaccaucaucaucgucaucaucgucauccuccucucccucaucgccgucggccuccuccucuacugcaaggcccgcuccacccccgucacccucuccaaggaccagcucuccggcaucaacaacaucgccuucuccaacugaggacuaguguccaccugucccuccugggcugcuggauugucucguuuuccugccaaauaaacaggaucagcgcuuuacagaucuaaaaaaaaaaaaaaaaaaaaaaaaaaaaaaaaaaaaaaaaaaaaaaaaaaaaaaaaaaaaaaaaugcaucccccccccccccccccccccccccccccccaaaggcucuuuucagagccaccagaauu

SEQ ID NO: 3300 - RNA, 1889 nt, Artificial Sequence
  mRNA product Design e-3 comprising derived and/or modified sequence from HRSV(A2)__F_DSCav1_mut3 (opt3)
gggagacuuucccauucuguagcagaauuugguguugccuguggucuuggucccgcggagaagcuuaccauggagcugcucauccuuaaggccaacgcuauuaccacaauacugacugcagugacguucugcuuugccagcggccagaauaucaccgaagaguucuaccaauccacauguucugcggucucaaaaggguauuugggagcuuuaagaacugguugguacaccaguguuauuacaaucgaacugagcaacauuaaggagaucaaaugcaauggcaccgacgccaaggugaaacuaauaaagcaggaacucgauaaguauaaaaacgcaguaacugaccugcagcuucugaugcaguccacacccgccaccgggucuggaucggcuaucuguucaggcguggcagucugcaagguguugcaccucgagggugagguuaauaaaauuaagagcgcccugcugaguacgaacaaagcuguggucucccucucuaauggggugagcguauuaacuuuuaagguucuggaucuuaagaacuacaucgacaaacaauugcugccuauucuaaauaagcaguccuguucaaucccaaacauagaaaccgugauugaguuccagcagaaaaauaacaggcuccuggaaaucacacgggaguuuagugucaaugccggagugacuaccccggugagcacauauaugcuuaccaacucugagcuguugucccucauuaaugauaugcccaucacgaacgaccaaaagaaacugaugucaaacaauguccagaucguucgccagcagagcuacaguauuaugugcauaaucaaggaagagguguuagcguauguagugcaacugccucucuacggcgucauugauacuccauguuggaaacuucauacaucuccccugugcaccacuaacacaaaggaaggcuccaauaucuguuugacccgaacggaccgugggugguacugcgauaacgcaggaagcgugucguucuuuccucaggccgagaccuguaagguucagucuaauagaguguucugcgacacaaugaacucccuaacucugccaucagaagucaaucucugcaacguggauauauuuaaucccaaauaugacuguaagauuaugaccaguaaaacagauguaagcuccucuguuaucacuagccugggugcuaucgugucaugcuacggcaagaccaaauguacagccaguaacaagaauagggggauuaucaagaccuucuccaacggaugcgacuaugucagcaauaaaggcguggacacugucucuguggguaacacgcuuuacuguguuaauaagcaagaggggcagucacuguaugugaaaggagagccuauuauaaacuuuuacgauccauugguauucccgagugacgaauuugaugcaagcaucucccaggucaacgagaagauuaaucagucucucgcuuucauccggaaaucggacgaacuguuacacaacgugaaugccggcaagagcacaaccaacaucaugauuacuaccauaaucauuguuaucauugugauccugcuaucccucauagcggucggccugcuuuuguauugcaaggcccgcucaacacccgugacccugaguaaagaucaacucucugggaucaauaacauugcauucagcaauugaggacuaguguccaccugucccuccugggcugcuggauugucucguuuuccugccaaauaaacaggaucagcgcuuuacagaucuaaaaaaaaaaaaaaaaaaaaaaaaaaaaaaaaaaaaaaaaaaaaaaaaaaaaaaaaaaaaaaaaugcaucccccccccccccccccccccccccccccccaaaggcucuuuucagagccaccagaauu

SEQ ID NO: 3301 - RNA, 1889 nt, Artificial Sequence
  mRNA product Design e-3 comprising derived and/or modified sequence from HRSV(A2)__F_DSCav1_mut3 (opt4)
gggagacuuucccauucuguagcagaauuugguguugccuguggucuuggucccgcggagaagcuuaccauggagcugcugauccugaaggccaacgccaucaccaccauccugaccgccgugaccuucugcuucgccagcggccagaacaucaccgaggaguucuaccagagcaccugcagcgccgugagcaagggcuaccugggcgcccugagaaccggcugguacaccagcgugaucaccaucgagcugagcaacaucaaggagaucaagugcaacggcaccgacgccaaggugaagcugaucaagcaggagcuggacaaguacaagaacgccgugaccgaccugcagcugcugaugcagagcacccccgccaccggcagcggcagcgccaucugcagcggcguggccgugugcaaggugcugcaccuggagggcgaggugaacaagaucaagagcgcccugcugagcaccaacaaggccguggugagccugagcaacggcgugagcgugcugaccuucaaggugcuggaccugaagaacuacaucgacaagcagcugcugcccauccugaacaagcagagcugcagcauccccaacaucgagaccgugaucgaguuccagcagaagaacaacagacugcuggagaucaccagagaguucagcgugaacgccggcgugaccacccccgugagcaccuacaugcugaccaacagcgagcugcugagccugaucaacgacaugcccaucaccaacgaccagaagaagcugaugagcaacaacgugcagaucgugagacagcagagcuacagcaucaugugcaucaucaaggaggaggugcuggccuacguggugcagcugccccuguacggcgugaucgacacccccugcuggaagcugcacaccagcccccugugcaccaccaacaccaaggagggcagcaacaucugccugaccagaaccgacagaggcugguacugcgacaacgccggcagcgugagcuucuucccccaggccgagaccugcaaggugcagagcaacagaguguucugcgacaccaugaacagccugacccugcccagcgaggugaaccugugcaacguggacaucuucaaccccaaguacgacugcaagaucaugaccagcaagaccgacgugagcagcagcgugaucaccagccugggcgccaucgugagcugcuacggcaagaccaagugcaccgccagcaacaagaacagaggcaucaucaagaccuucagcaacggcugcgacuacgugagcaacaagggcguggacaccgugagcgugggcaacacccuguacugcgugaacaagcaggagggccagagccuguacgugaagggcgagcccaucaucaacuucuacgacccccugguguuccccagcgacgaguucgacgccagcaucagccaggugaacgagaagaucaaccagagccuggccuucaucagaaagagcgacgagcugcugcacaacgugaacgccggcaagagcaccaccaacaucaugaucaccaccaucaucaucgugaucaucgugauccugcugagccugaucgccgugggccugcugcuguacugcaaggccagaagcacccccgugacccugagcaaggaccagcugagcggcaucaacaacaucgccuucagcaacugaggacuaguguccaccugucccuccugggcugcuggauugucucguuuuccugccaaauaaacaggaucagcgcuuuacagaucuaaaaaaaaaaaaaaaaaaaaaaaaaaaaaaaaaaaaaaaaaaaaaaaaaaaaaaaaaaaaaaaaugcaucccccccccccccccccccccccccccccccaaaggcucuuuucagagccaccagaauu

SEQ ID NO: 3302 - RNA, 1889 nt, Artificial Sequence
  mRNA product Design e-3 comprising derived and/or modified sequence from HRSV(A2)__F_DSCav1_mut3 (opt5)
gggagacuuucccauucuguagcagaauuugguguugccuguggucuuggucccgcggagaagcuuaccauggagcugcucauccugaaggccaacgcuauuaccacaauccuuacggccgugaccuucugcuuugcgagcggccagaauauuacagaagaguucuaccaauccaccuguucugcugucagcaaaggguaucugggagcccucagaacaggcugguacaccuccguuaucacaauugaacugucuaacaucaaggagaucaaaugcaaugggaccgacgccaaggugaaacuuauuaagcaggaacuggauaaguauaaaaacgcugugacggaccuccagcugcugaugcagagcacccccgccacaggauccggcucugcuaucuguagcggggucgccgugugcaagguucuccaccuggagggagaggugaauaaaauuaaguccgcgcuucugagcaccaacaaagccgucgugucucucuccaauggcguuagcgugcugacauuuaagguccuugaucugaagaacuacaucgacaaacaacuccugccuauucugaauaagcagucuuguuccaucccgaacauugaaaccgugaucgaguuccagcagaaaaauaaccggcuccuggaaaucacgcgcgaguuuagcgugaaugcuggcgucacaacccccguuucuacauauaugcuuaccaacuccgagcugcucagccugauuaaugauaugccuaucaccaacgaccaaaagaaacuuauguccaacaaugugcagauugugagacagcagucuuacagcaucaugugcauuaucaaggaagagguccuggccuaugugguucaacucccccuguacggggugaucgauacaccuuguuggaaacugcauacgagcccccucugcaccacaaacaccaaggaaggauccaauauuugucugacacggaccgaccgcggcugguacugcgauaacgcugggucugucuccuucuuuccucaggccgagacguguaaggugcagagcaauagaguuuucugcgacacaaugaacucucuuacccugccgagcgaagugaaucucugcaacgucgauaucuuuaaucccaaauaugacuguaagauuaugaccuccaaaacagaugugucuagcuccgucaucaccagccugggagcgauugugucuugcuacggcaagacaaaauguacggccuccaacaagaaucgggggaucaucaagaccuucagcaacggaugcgacuauguuucuaauaaaggcguggacacagucuccgugggcaacacccuuuacuguguuaauaagcaagaggggcagagccuguaugugaaaggagagccuauuaucaacuuuuacgauccccucgucuucccuuccgacgaauuugaugcuucuauuagccaggugaacgagaagaucaaucagucccuggccuucauucgcaaaucugacgaacugcuccacaacgugaaugcuggcaagagcacaaccaacaucaugauuacgaccaucaucauuguuaucauugucauccugcuuucccugauugccguggggcuccugcuguauugcaaggccagaagcacacccgugacccuuucuaaagaucaacucuccggaaucaauaacaucgcuuucagcaauugaggacuaguguccaccugucccuccugggcugcuggauugucucguuuuccugccaaauaaacaggaucagcgcuuuacagaucuaaaaaaaaaaaaaaaaaaaaaaaaaaaaaaaaaaaaaaaaaaaaaaaaaaaaaaaaaaaaaaaaugcaucccccccccccccccccccccccccccccccaaaggcucuuuucagagccaccagaauu

SEQ ID NO: 3303 - RNA, 1889 nt, Artificial Sequence
  mRNA product Design e-3 comprising derived and/or modified sequence from HRSV(A2)__F_DSCav1_mut3 (opt6)
gggagacuuucccauucuguagcagaauuugguguugccuguggucuuggucccgcggagaagcuuaccauggaauuacucauacuaaaagccaaugccauaaccacuauucuaacagcaguaacauucuguuucgccucaggacaaaacauaacagaagaauuuuaucaauccaccuguuccgcagucucgaaaggcuaccuuggcgcacuaagaaccggaugguauacaucaguaauaaccauugaacuaucaaauaucaaagaaauaaaaugcaacggaacugacgcaaaagucaaacuaauaaaacaagaauuagacaaauacaaaaacgccguuacagacuuacaacuacuaaugcaaucaacuccagcaacaggaucaggaucugcuauaugcucaggugucgccguauguaaaguguuacaccucgaaggcgaaguaaacaaaauaaaaucagcacuacuauccacaaauaaagcaguaguaucacuauccaaugguguaucaguacucacauucaaaguacuagacuuaaaaaauuauauagauaaacaauuacuaccaauauuaaacaaacaaucaugcucaauaccaaacauagaaaccgucauugaauuucaacaaaaaaacaaucgacuucuugaaauaacacgagaauuuucaguaaaugccggaguaacaaccccagucucaacauacauguuaaccaacucugaacuccuaagccuaaucaacgacaugcccauaacuaacgaccaaaaaaaacuaauguccaauaauguccaaauaguaagacaacaauccuacucaauaaugugcauuauaaaagaagaaguccucgccuauguaguacaacuacccuuauacggaguaauugacacaccauguuggaaacuacauacaucaccacuaugcaccacuaacacaaaagaaggcuccaacauaugccuaacccgaacagaucgcggaugguauugcgacaacgcaggaaguguauccuucuuuccacaagcagaaacaugcaaaguacaauccaacagaguauucugugacaccaugaacucucuaacacuaccuuccgaaguaaauuuaugcaacguagacauauuuaaucccaaauacgacuguaaaauaaugaccucaaaaacugaugucucaucaucagucauuacaucacucggagcaauagucaguugcuauggaaaaaccaaaugcacagcuaguaacaaaaacagggguauaauaaaaacauuuucaaacggaugcgauuacguaucaaauaaaggaguagacaccguauccguaggaaauacucucuacugcguaaacaaacaagaaggacaaucccuauacguaaaaggcgaaccaaucauuaacuuuuacgacccacuuguauuuccaucagacgaauuugaugccucaauaucccaagucaaugaaaaaauaaaccaaagucuagcauucauccgaaaaucagaugaacuuuuacacaacguaaacgccggaaaaucaacaacaaacaucaugaucacaacaaucaucauaguaauaauaguuauacuacuuuccuuaauagcagucggccuacuacucuacugcaaagcacgauccacaccaguaaccuuaucuaaagaccaacucucaggcauaaacaacauagcauucucaaacuaaggacuaguguccaccugucccuccugggcugcuggauugucucguuuuccugccaaauaaacaggaucagcgcuuuacagaucuaaaaaaaaaaaaaaaaaaaaaaaaaaaaaaaaaaaaaaaaaaaaaaaaaaaaaaaaaaaaaaaaugcaucccccccccccccccccccccccccccccccaaaggcucuuuucagagccaccagaauu

SEQ ID NO: 3304 - RNA, 1889 nt, Artificial Sequence
  mRNA product Design e-3 comprising derived and/or modified sequence from HRSV(A2)__F_DSCav1_mut3 (opt11)
gggagacuuucccauucuguagcagaauuugguguugccuguggucuuggucccgcggagaagcuuaccauggaacuccucauccuuaaagcaaacgccaucacaaccauccucacagcagucacuuucugcuucgcauccggacaaaacaucacagaagaguucuaucaauccacgugcuccgcaguuuccaaaggauaccuuggagccuuacgaaccggcugguacaccuccgucaucaccauagaacucagcaacaucaaagaaaucaaaugcaacggaaccgacgcaaaagucaaacucaucaaacaagaacuagacaaauacaaaaacgcagucaccgaccuccaacuacucaugcaaucaacccccgcaaccggcuccggcuccgccaucugcuccggaguagccguaugcaaaguccuccaccucgaaggcgaaguuaacaagaucaaguccgcacuccuaucaaccaacaaagcagucgucucccuauccaacggcgucuccguauuaacauucaaaguccucgaccucaaaaacuacauagacaaacagcuacuccccauccuaaacaaacaauccugcuccauccccaacaucgaaacugucaucgaguuccaacagaaaaacaaccgccuccuagaaaucacccgagaguucuccguaaacgccggcgucacuacccccgucucuaccuauaugcuaaccaacucugaacuccuaucccuaaucaacgauaugcccauaacuaacgaccaaaagaaacuuauguccaacaacguacaaauaguccggcaacaaucauacucuaucaugugcaucaucaaagaagaaguacuugccuacguuguccaacucccacuauacggcgucauagacacuccaugcuggaaacuucacaccucaccccucugcaccacuaacacuaaagaaggcucuaacaucugccuuacccgcaccgaccgcggaugguacugcgacaacgcaggcucaguuagcuucuucccacaagccgaaaccugcaaaguccagucaaaccgugucuucugcgauaccaugaacucgcucacccucccuuccgaagucaaccucugcaacgucgacaucuucaaccccaaauacgacugcaaaaucaugaccucaaaaaccgacguaucuucuuccgucaucaccucccucggcgccaucguauccugcuacggcaaaaccaaaugcacugcaucaaacaaaaaccgaggcaucaucaaaaccuucucgaacggaugcgacuacguauccaacaagggcgucgacacagucuccguugguaacacccucuacugcgucaacaaacaagaaggccaaucccuauacguaaaaggcgaacccaucaucaacuucuacgacccccucgucuuccccagugacgaauuugacgccuccaucucccaagucaacgaaaagaucaaccaaucccuugccuucauacgcaaauccgacgaacuccuacacaacguuaacgccggaaaaucaacaaccaacaucaugaucacaaccaucauaaucgucauaaucgucauacuccucucccucauagccgucggccugcuauuguacuguaaagcccgcuccacaccagucacacuuucaaaagaccaacucuccgggaucaacaacaucgccuucuccaacuaaggacuaguguccaccugucccuccugggcugcuggauugucucguuuuccugccaaauaaacaggaucagcgcuuuacagaucuaaaaaaaaaaaaaaaaaaaaaaaaaaaaaaaaaaaaaaaaaaaaaaaaaaaaaaaaaaaaaaaaugcaucccccccccccccccccccccccccccccccaaaggcucuuuucagagccaccagaauu

SEQ ID NO: 3305 - RNA, 1943 nt, Artificial Sequence
  mRNA product Design e-4 comprising derived and/or modified sequence from HRSV(A2)__F_DSCav1_mut3 (opt1)
gggagacuccugucgggcggaaguaggaggaguagaguuuaaaaacaguacucuuuuuccgguucgggacguaguugaagcaacgacaagccggauaaccgcucuugagacaggaagcuuaccauggagcugcucauccugaaggccaacgccaucaccaccauccugacggcggugaccuucugcuucgccagcggccagaacaucaccgaggaguucuaccaguccacgugcagcgccgucuccaagggguaccucggcgcccugcggaccggcugguacaccuccgugaucaccaucgagcugagcaacaucaaggagaucaagugcaacgggaccgacgccaaggugaagcucaucaagcaggagcuggacaaguacaagaacgcggucacggaccugcagcuccugaugcaguccaccccggcaaccggcuccggcuccgccaucugcagcggcgucgccgugugcaaggugcugcaccucgagggggaggucaacaagaucaagagcgcccugcuguccaccaacaaggccguggugagccucuccaacggcgucagcgugcugaccuucaaggugcuggaccucaagaacuacaucgacaagcagcugcugcccauccugaacaagcagagcugcuccauccccaacaucgagacggugaucgaguuccagcagaagaacaaccggcuccuggagaucacccgcgaguucagcgugaacgccggggucaccacccccguguccacguacaugcugaccaacagcgagcuccugucccugaucaacgacaugccgaucaccaacgaccagaagaagcucaugagcaacaacgugcagaucguccggcagcaguccuacagcaucaugugcaucaucaaggaggaggugcuggcguacgugguccagcugccccucuacggcgugaucgacacccccugcuggaagcugcacacgagcccccugugcaccaccaacaccaaggagggguccaacaucugccucacgcgcaccgaccggggcugguacugcgacaacgccggcagcgucuccuucuucccgcaggccgagaccugcaaggugcagagcaaccgcguguucugcgacaccaugaacucccugacgcugcccagcgagguaaaccucugcaacgucgacaucuucaaccccaaguacgacugcaagaucaugaccuccaagaccgacgugagcuccagcgugaucaccucccugggggccaucgucagcugcuacggcaagacgaagugcaccgccagcaacaagaaccgggggaucaucaagaccuucuccaacggcugcgacuacgugagcaacaagggcguggacaccguguccgucgggaacacccuguacugcgugaacaagcaggagggccagagccucuacgugaagggggagcccaucaucaacuucuacgacccgcuggucuuccccuccgacgaguucgacgcgagcaucucccaggugaacgagaagaucaaccagagccuggccuucauccgcaaguccgacgagcugcuccacaacgugaacgccggcaagagcacgaccaacaucaugaucaccaccaucaucaucgucaucaucgugauccugcugucccucaucgccguggggcugcugcucuacugcaaggcccggagcacgcccgucacccuguccaaggaccagcugagcggcaucaacaacaucgcguucuccaacugaggacuaguguccaccugucccuccugggcugcuggauugucucguuuuccugccaaauaaacaggaucagcgcuuuacagaucuaaaaaaaaaaaaaaaaaaaaaaaaaaaaaaaaaaaaaaaaaaaaaaaaaaaaaaaaaaaaaaaaugcaucccccccccccccccccccccccccccccccaaaggcucuuuucagagccaccagaauu

SEQ ID NO: 3306 - RNA, 1943 nt, Artificial Sequence
  mRNA product Design e-4 comprising derived and/or modified sequence from HRSV(A2)__F_DSCav1_mut3 (opt1)
gggagacuccugucgggcggaaguaggaggaguagaguuuaaaaacaguacucuuuuuccgguucgggacguaguugaagcaacgacaagccggauaaccgcucuugagacaggaagcuuaccauggagcugcucauccugaaggccaacgccaucaccaccauccugacggcggugaccuucugcuucgccagcggccagaacaucaccgaggaguucuaccaguccacgugcagcgccgucuccaagggguaccucggcgcccugcgcaccgggugguacaccagcgugaucaccaucgagcuguccaacaucaaggagaucaagugcaacggcaccgacgccaaggugaagcucaucaagcaggagcuggacaaguacaagaacgcggucacggaccugcagcuccugaugcagagcacccccgccaccggguccggcagcgccaucugcuccggcguggccgugugcaagguccugcaccucgagggggaggugaacaagaucaagagcgcgcugcuguccaccaacaaggccguggucagccucuccaacggcgugagcgugcugacguucaagguccuggaccucaagaacuacaucgacaagcagcugcugccgauccucaacaagcaguccugcagcauccccaacaucgagaccgugaucgaguuccagcagaagaacaaccggcugcuggagaucacccgcgaguucuccgugaacgccggggucaccacgcccgugagcaccuacaugcucaccaacuccgagcugcugagccucaucaacgacaugcccaucaccaacgaccagaagaagcugaugagcaacaacgugcagaucguccggcagcaguccuacagcaucaugugcaucaucaaggaggaggugcuggccuacgugguccagcucccgcuguacggcgugaucgacacgcccugcuggaagcugcacaccagcccccucugcaccaccaacacgaaggagggguccaacaucugccugacccgcaccgaccggggcugguacugcgacaacgccggcuccgugagcuucuucccccaggcggagaccugcaagguccaguccaaccgcguguucugcgacacgaugaacagccugacccucccguccgaggucaaccugugcaacguggacaucuucaaccccaaguacgacugcaagaucaugaccagcaagaccgacguguccagcuccgucaucacgagccugggggccaucguguccugcuacggcaagaccaagugcaccgccagcaacaagaaccgggggaucaucaagaccuucuccaacggcugcgacuacgugagcaacaagggcgucgacacgguguccguggggaacacccucuacugcgucaacaagcaggagggccagagccuguacgugaagggggagcccaucaucaacuucuacgacccccugguguucccgagcgacgaguucgacgccuccaucagccaggucaacgagaagaucaaccagucccucgccuucauccgcaagagcgacgagcugcugcacaacgugaacgcgggcaaguccaccaccaacaucaugaucaccacgaucaucaucgugaucaucgucauccuccugagccugaucgccguggggcuccugcuguacugcaaggcccgguccacccccgugacccugagcaaggaccagcucuccggcaucaacaacaucgccuucagcaacugaggacuaguguccaccugucccuccugggcugcuggauugucucguuuuccugccaaauaaacaggaucagcgcuuuacagaucuaaaaaaaaaaaaaaaaaaaaaaaaaaaaaaaaaaaaaaaaaaaaaaaaaaaaaaaaaaaaaaaaugcaucccccccccccccccccccccccccccccccaaaggcucuuuucagagccaccagaauu

SEQ ID NO: 3307 - RNA, 1943 nt, Artificial Sequence
  mRNA product Design e-4 comprising derived and/or modified sequence from HRSV(A2)__F_DSCav1_mut3 (opt2)
gggagacuccugucgggcggaaguaggaggaguagaguuuaaaaacaguacucuuuuuccgguucgggacguaguugaagcaacgacaagccggauaaccgcucuugagacaggaagcuuaccauggagcuccucauccucaaggccaacgccaucaccaccauccucaccgccgucaccuucugcuucgccuccggccagaacaucaccgaggaguucuaccaguccaccugcuccgccgucuccaagggcuaccucggcgcccuccgcaccggcugguacaccuccgucaucaccaucgagcucuccaacaucaaggagaucaagugcaacggcaccgacgccaaggucaagcucaucaagcaggagcucgacaaguacaagaacgccgucaccgaccuccagcuccucaugcaguccacccccgccaccggcuccggcuccgccaucugcuccggcgucgccgucugcaagguccuccaccucgagggcgaggucaacaagaucaaguccgcccuccucuccaccaacaaggccgucgucucccucuccaacggcgucuccguccucaccuucaagguccucgaccucaagaacuacaucgacaagcagcuccuccccauccucaacaagcaguccugcuccauccccaacaucgagaccgucaucgaguuccagcagaagaacaaccgccuccucgagaucacccgcgaguucuccgucaacgccggcgucaccacccccgucuccaccuacaugcucaccaacuccgagcuccucucccucaucaacgacaugcccaucaccaacgaccagaagaagcucauguccaacaacguccagaucguccgccagcaguccuacuccaucaugugcaucaucaaggaggagguccucgccuacgucguccagcucccccucuacggcgucaucgacacccccugcuggaagcuccacaccuccccccucugcaccaccaacaccaaggagggcuccaacaucugccucacccgcaccgaccgcggcugguacugcgacaacgccggcuccgucuccuucuucccccaggccgagaccugcaagguccaguccaaccgcgucuucugcgacaccaugaacucccucacccuccccuccgaggucaaccucugcaacgucgacaucuucaaccccaaguacgacugcaagaucaugaccuccaagaccgacgucuccuccuccgucaucaccucccucggcgccaucgucuccugcuacggcaagaccaagugcaccgccuccaacaagaaccgcggcaucaucaagaccuucuccaacggcugcgacuacgucuccaacaagggcgucgacaccgucuccgucggcaacacccucuacugcgucaacaagcaggagggccagucccucuacgucaagggcgagcccaucaucaacuucuacgacccccucgucuuccccuccgacgaguucgacgccuccaucucccaggucaacgagaagaucaaccagucccucgccuucauccgcaaguccgacgagcuccuccacaacgucaacgccggcaaguccaccaccaacaucaugaucaccaccaucaucaucgucaucaucgucauccuccucucccucaucgccgucggccuccuccucuacugcaaggcccgcuccacccccgucacccucuccaaggaccagcucuccggcaucaacaacaucgccuucuccaacugaggacuaguguccaccugucccuccugggcugcuggauugucucguuuuccugccaaauaaacaggaucagcgcuuuacagaucuaaaaaaaaaaaaaaaaaaaaaaaaaaaaaaaaaaaaaaaaaaaaaaaaaaaaaaaaaaaaaaaaugcaucccccccccccccccccccccccccccccccaaaggcucuuuucagagccaccagaauu

SEQ ID NO: 3308 - RNA, 1943 nt, Artificial Sequence
  mRNA product Design e-4 comprising derived and/or modified sequence from HRSV(A2)__F_DSCav1_mut3 (opt3)
gggagacuccugucgggcggaaguaggaggaguagaguuuaaaaacaguacucuuuuuccgguucgggacguaguugaagcaacgacaagccggauaaccgcucuugagacaggaagcuuaccauggagcugcucauccuuaaggccaacgcuauuaccacaauacugacugcagugacguucugcuuugccagcggccagaauaucaccgaagaguucuaccaauccacauguucugcggucucaaaaggguauuugggagcuuuaagaacugguugguacaccaguguuauuacaaucgaacugagcaacauuaaggagaucaaaugcaauggcaccgacgccaaggugaaacuaauaaagcaggaacucgauaaguauaaaaacgcaguaacugaccugcagcuucugaugcaguccacacccgccaccgggucuggaucggcuaucuguucaggcguggcagucugcaagguguugcaccucgagggugagguuaauaaaauuaagagcgcccugcugaguacgaacaaagcuguggucucccucucuaauggggugagcguauuaacuuuuaagguucuggaucuuaagaacuacaucgacaaacaauugcugccuauucuaaauaagcaguccuguucaaucccaaacauagaaaccgugauugaguuccagcagaaaaauaacaggcuccuggaaaucacacgggaguuuagugucaaugccggagugacuaccccggugagcacauauaugcuuaccaacucugagcuguugucccucauuaaugauaugcccaucacgaacgaccaaaagaaacugaugucaaacaauguccagaucguucgccagcagagcuacaguauuaugugcauaaucaaggaagagguguuagcguauguagugcaacugccucucuacggcgucauugauacuccauguuggaaacuucauacaucuccccugugcaccacuaacacaaaggaaggcuccaauaucuguuugacccgaacggaccgugggugguacugcgauaacgcaggaagcgugucguucuuuccucaggccgagaccuguaagguucagucuaauagaguguucugcgacacaaugaacucccuaacucugccaucagaagucaaucucugcaacguggauauauuuaaucccaaauaugacuguaagauuaugaccaguaaaacagauguaagcuccucuguuaucacuagccugggugcuaucgugucaugcuacggcaagaccaaauguacagccaguaacaagaauagggggauuaucaagaccuucuccaacggaugcgacuaugucagcaauaaaggcguggacacugucucuguggguaacacgcuuuacuguguuaauaagcaagaggggcagucacuguaugugaaaggagagccuauuauaaacuuuuacgauccauugguauucccgagugacgaauuugaugcaagcaucucccaggucaacgagaagauuaaucagucucucgcuuucauccggaaaucggacgaacuguuacacaacgugaaugccggcaagagcacaaccaacaucaugauuacuaccauaaucauuguuaucauugugauccugcuaucccucauagcggucggccugcuuuuguauugcaaggcccgcucaacacccgugacccugaguaaagaucaacucucugggaucaauaacauugcauucagcaauugaggacuaguguccaccugucccuccugggcugcuggauugucucguuuuccugccaaauaaacaggaucagcgcuuuacagaucuaaaaaaaaaaaaaaaaaaaaaaaaaaaaaaaaaaaaaaaaaaaaaaaaaaaaaaaaaaaaaaaaugcaucccccccccccccccccccccccccccccccaaaggcucuuuucagagccaccagaauu

SEQ ID NO: 3309 - RNA, 1943 nt, Artificial Sequence
  mRNA product Design e-4 comprising derived and/or modified sequence from HRSV(A2)__F_DSCav1_mut3 (opt4)
gggagacuccugucgggcggaaguaggaggaguagaguuuaaaaacaguacucuuuuuccgguucgggacguaguugaagcaacgacaagccggauaaccgcucuugagacaggaagcuuaccauggagcugcugauccugaaggccaacgccaucaccaccauccugaccgccgugaccuucugcuucgccagcggccagaacaucaccgaggaguucuaccagagcaccugcagcgccgugagcaagggcuaccugggcgcccugagaaccggcugguacaccagcgugaucaccaucgagcugagcaacaucaaggagaucaagugcaacggcaccgacgccaaggugaagcugaucaagcaggagcuggacaaguacaagaacgccgugaccgaccugcagcugcugaugcagagcacccccgccaccggcagcggcagcgccaucugcagcggcguggccgugugcaaggugcugcaccuggagggcgaggugaacaagaucaagagcgcccugcugagcaccaacaaggccguggugagccugagcaacggcgugagcgugcugaccuucaaggugcuggaccugaagaacuacaucgacaagcagcugcugcccauccugaacaagcagagcugcagcauccccaacaucgagaccgugaucgaguuccagcagaagaacaacagacugcuggagaucaccagagaguucagcgugaacgccggcgugaccacccccgugagcaccuacaugcugaccaacagcgagcugcugagccugaucaacgacaugcccaucaccaacgaccagaagaagcugaugagcaacaacgugcagaucgugagacagcagagcuacagcaucaugugcaucaucaaggaggaggugcuggccuacguggugcagcugccccuguacggcgugaucgacacccccugcuggaagcugcacaccagcccccugugcaccaccaacaccaaggagggcagcaacaucugccugaccagaaccgacagaggcugguacugcgacaacgccggcagcgugagcuucuucccccaggccgagaccugcaaggugcagagcaacagaguguucugcgacaccaugaacagccugacccugcccagcgaggugaaccugugcaacguggacaucuucaaccccaaguacgacugcaagaucaugaccagcaagaccgacgugagcagcagcgugaucaccagccugggcgccaucgugagcugcuacggcaagaccaagugcaccgccagcaacaagaacagaggcaucaucaagaccuucagcaacggcugcgacuacgugagcaacaagggcguggacaccgugagcgugggcaacacccuguacugcgugaacaagcaggagggccagagccuguacgugaagggcgagcccaucaucaacuucuacgacccccugguguuccccagcgacgaguucgacgccagcaucagccaggugaacgagaagaucaaccagagccuggccuucaucagaaagagcgacgagcugcugcacaacgugaacgccggcaagagcaccaccaacaucaugaucaccaccaucaucaucgugaucaucgugauccugcugagccugaucgccgugggccugcugcuguacugcaaggccagaagcacccccgugacccugagcaaggaccagcugagcggcaucaacaacaucgccuucagcaacugaggacuaguguccaccugucccuccugggcugcuggauugucucguuuuccugccaaauaaacaggaucagcgcuuuacagaucuaaaaaaaaaaaaaaaaaaaaaaaaaaaaaaaaaaaaaaaaaaaaaaaaaaaaaaaaaaaaaaaaugcaucccccccccccccccccccccccccccccccaaaggcucuuuucagagccaccagaauu

SEQ ID NO: 3310 - RNA, 1943 nt, Artificial Sequence
  mRNA product Design e-4 comprising derived and/or modified sequence from HRSV(A2)__F_DSCav1_mut3 (opt5)
gggagacuccugucgggcggaaguaggaggaguagaguuuaaaaacaguacucuuuuuccgguucgggacguaguugaagcaacgacaagccggauaaccgcucuugagacaggaagcuuaccauggagcugcucauccugaaggccaacgcuauuaccacaauccuuacggccgugaccuucugcuuugcgagcggccagaauauuacagaagaguucuaccaauccaccuguucugcugucagcaaaggguaucugggagcccucagaacaggcugguacaccuccguuaucacaauugaacugucuaacaucaaggagaucaaaugcaaugggaccgacgccaaggugaaacuuauuaagcaggaacuggauaaguauaaaaacgcugugacggaccuccagcugcugaugcagagcacccccgccacaggauccggcucugcuaucuguagcggggucgccgugugcaagguucuccaccuggagggagaggugaauaaaauuaaguccgcgcuucugagcaccaacaaagccgucgugucucucuccaauggcguuagcgugcugacauuuaagguccuugaucugaagaacuacaucgacaaacaacuccugccuauucugaauaagcagucuuguuccaucccgaacauugaaaccgugaucgaguuccagcagaaaaauaaccggcuccuggaaaucacgcgcgaguuuagcgugaaugcuggcgucacaacccccguuucuacauauaugcuuaccaacuccgagcugcucagccugauuaaugauaugccuaucaccaacgaccaaaagaaacuuauguccaacaaugugcagauugugagacagcagucuuacagcaucaugugcauuaucaaggaagagguccuggccuaugugguucaacucccccuguacggggugaucgauacaccuuguuggaaacugcauacgagcccccucugcaccacaaacaccaaggaaggauccaauauuugucugacacggaccgaccgcggcugguacugcgauaacgcugggucugucuccuucuuuccucaggccgagacguguaaggugcagagcaauagaguuuucugcgacacaaugaacucucuuacccugccgagcgaagugaaucucugcaacgucgauaucuuuaaucccaaauaugacuguaagauuaugaccuccaaaacagaugugucuagcuccgucaucaccagccugggagcgauugugucuugcuacggcaagacaaaauguacggccuccaacaagaaucgggggaucaucaagaccuucagcaacggaugcgacuauguuucuaauaaaggcguggacacagucuccgugggcaacacccuuuacuguguuaauaagcaagaggggcagagccuguaugugaaaggagagccuauuaucaacuuuuacgauccccucgucuucccuuccgacgaauuugaugcuucuauuagccaggugaacgagaagaucaaucagucccuggccuucauucgcaaaucugacgaacugcuccacaacgugaaugcuggcaagagcacaaccaacaucaugauuacgaccaucaucauuguuaucauugucauccugcuuucccugauugccguggggcuccugcuguauugcaaggccagaagcacacccgugacccuuucuaaagaucaacucuccggaaucaauaacaucgcuuucagcaauugaggacuaguguccaccugucccuccugggcugcuggauugucucguuuuccugccaaauaaacaggaucagcgcuuuacagaucuaaaaaaaaaaaaaaaaaaaaaaaaaaaaaaaaaaaaaaaaaaaaaaaaaaaaaaaaaaaaaaaaugcaucccccccccccccccccccccccccccccccaaaggcucuuuucagagccaccagaauu

SEQ ID NO: 3311 - RNA, 1943 nt, Artificial Sequence
  mRNA product Design e-4 comprising derived and/or modified sequence from HRSV(A2)__F_DSCav1_mut3 (opt6)
gggagacuccugucgggcggaaguaggaggaguagaguuuaaaaacaguacucuuuuuccgguucgggacguaguugaagcaacgacaagccggauaaccgcucuugagacaggaagcuuaccauggaauuacucauacuaaaagccaaugccauaaccacuauucuaacagcaguaacauucuguuucgccucaggacaaaacauaacagaagaauuuuaucaauccaccuguuccgcagucucgaaaggcuaccuuggcgcacuaagaaccggaugguauacaucaguaauaaccauugaacuaucaaauaucaaagaaauaaaaugcaacggaacugacgcaaaagucaaacuaauaaaacaagaauuagacaaauacaaaaacgccguuacagacuuacaacuacuaaugcaaucaacuccagcaacaggaucaggaucugcuauaugcucaggugucgccguauguaaaguguuacaccucgaaggcgaaguaaacaaaauaaaaucagcacuacuauccacaaauaaagcaguaguaucacuauccaaugguguaucaguacucacauucaaaguacuagacuuaaaaaauuauauagauaaacaauuacuaccaauauuaaacaaacaaucaugcucaauaccaaacauagaaaccgucauugaauuucaacaaaaaaacaaucgacuucuugaaauaacacgagaauuuucaguaaaugccggaguaacaaccccagucucaacauacauguuaaccaacucugaacuccuaagccuaaucaacgacaugcccauaacuaacgaccaaaaaaaacuaauguccaauaauguccaaauaguaagacaacaauccuacucaauaaugugcauuauaaaagaagaaguccucgccuauguaguacaacuacccuuauacggaguaauugacacaccauguuggaaacuacauacaucaccacuaugcaccacuaacacaaaagaaggcuccaacauaugccuaacccgaacagaucgcggaugguauugcgacaacgcaggaaguguauccuucuuuccacaagcagaaacaugcaaaguacaauccaacagaguauucugugacaccaugaacucucuaacacuaccuuccgaaguaaauuuaugcaacguagacauauuuaaucccaaauacgacuguaaaauaaugaccucaaaaacugaugucucaucaucagucauuacaucacucggagcaauagucaguugcuauggaaaaaccaaaugcacagcuaguaacaaaaacagggguauaauaaaaacauuuucaaacggaugcgauuacguaucaaauaaaggaguagacaccguauccguaggaaauacucucuacugcguaaacaaacaagaaggacaaucccuauacguaaaaggcgaaccaaucauuaacuuuuacgacccacuuguauuuccaucagacgaauuugaugccucaauaucccaagucaaugaaaaaauaaaccaaagucuagcauucauccgaaaaucagaugaacuuuuacacaacguaaacgccggaaaaucaacaacaaacaucaugaucacaacaaucaucauaguaauaauaguuauacuacuuuccuuaauagcagucggccuacuacucuacugcaaagcacgauccacaccaguaaccuuaucuaaagaccaacucucaggcauaaacaacauagcauucucaaacuaaggacuaguguccaccugucccuccugggcugcuggauugucucguuuuccugccaaauaaacaggaucagcgcuuuacagaucuaaaaaaaaaaaaaaaaaaaaaaaaaaaaaaaaaaaaaaaaaaaaaaaaaaaaaaaaaaaaaaaaugcaucccccccccccccccccccccccccccccccaaaggcucuuuucagagccaccagaauu

SEQ ID NO: 3312 - RNA, 1943 nt, Artificial Sequence
  mRNA product Design e-4 comprising derived and/or modified sequence from HRSV(A2)__F_DSCav1_mut3 (opt11)
gggagacuccugucgggcggaaguaggaggaguagaguuuaaaaacaguacucuuuuuccgguucgggacguaguugaagcaacgacaagccggauaaccgcucuugagacaggaagcuuaccauggaacuccucauccuuaaagcaaacgccaucacaaccauccucacagcagucacuuucugcuucgcauccggacaaaacaucacagaagaguucuaucaauccacgugcuccgcaguuuccaaaggauaccuuggagccuuacgaaccggcugguacaccuccgucaucaccauagaacucagcaacaucaaagaaaucaaaugcaacggaaccgacgcaaaagucaaacucaucaaacaagaacuagacaaauacaaaaacgcagucaccgaccuccaacuacucaugcaaucaacccccgcaaccggcuccggcuccgccaucugcuccggaguagccguaugcaaaguccuccaccucgaaggcgaaguuaacaagaucaaguccgcacuccuaucaaccaacaaagcagucgucucccuauccaacggcgucuccguauuaacauucaaaguccucgaccucaaaaacuacauagacaaacagcuacuccccauccuaaacaaacaauccugcuccauccccaacaucgaaacugucaucgaguuccaacagaaaaacaaccgccuccuagaaaucacccgagaguucuccguaaacgccggcgucacuacccccgucucuaccuauaugcuaaccaacucugaacuccuaucccuaaucaacgauaugcccauaacuaacgaccaaaagaaacuuauguccaacaacguacaaauaguccggcaacaaucauacucuaucaugugcaucaucaaagaagaaguacuugccuacguuguccaacucccacuauacggcgucauagacacuccaugcuggaaacuucacaccucaccccucugcaccacuaacacuaaagaaggcucuaacaucugccuuacccgcaccgaccgcggaugguacugcgacaacgcaggcucaguuagcuucuucccacaagccgaaaccugcaaaguccagucaaaccgugucuucugcgauaccaugaacucgcucacccucccuuccgaagucaaccucugcaacgucgacaucuucaaccccaaauacgacugcaaaaucaugaccucaaaaaccgacguaucuucuuccgucaucaccucccucggcgccaucguauccugcuacggcaaaaccaaaugcacugcaucaaacaaaaaccgaggcaucaucaaaaccuucucgaacggaugcgacuacguauccaacaagggcgucgacacagucuccguugguaacacccucuacugcgucaacaaacaagaaggccaaucccuauacguaaaaggcgaacccaucaucaacuucuacgacccccucgucuuccccagugacgaauuugacgccuccaucucccaagucaacgaaaagaucaaccaaucccuugccuucauacgcaaauccgacgaacuccuacacaacguuaacgccggaaaaucaacaaccaacaucaugaucacaaccaucauaaucgucauaaucgucauacuccucucccucauagccgucggccugcuauuguacuguaaagcccgcuccacaccagucacacuuucaaaagaccaacucuccgggaucaacaacaucgccuucuccaacuaaggacuaguguccaccugucccuccugggcugcuggauugucucguuuuccugccaaauaaacaggaucagcgcuuuacagaucuaaaaaaaaaaaaaaaaaaaaaaaaaaaaaaaaaaaaaaaaaaaaaaaaaaaaaaaaaaaaaaaaugcaucccccccccccccccccccccccccccccccaaaggcucuuuucagagccaccagaauu

SEQ ID NO: 3313 - RNA, 1910 nt, Artificial Sequence
  mRNA product Design e-5 comprising derived and/or modified sequence from HRSV(A2)__F_DSCav1_mut3 (opt1)
gggagagcggcucggccauuuugucccagucaguccggaggcugcggcugcagaaguaccgccugcggaguaacugcaaagaagcuuaccauggagcugcucauccugaaggccaacgccaucaccaccauccugacggcggugaccuucugcuucgccagcggccagaacaucaccgaggaguucuaccaguccacgugcagcgccgucuccaagggguaccucggcgcccugcggaccggcugguacaccuccgugaucaccaucgagcugagcaacaucaaggagaucaagugcaacgggaccgacgccaaggugaagcucaucaagcaggagcuggacaaguacaagaacgcggucacggaccugcagcuccugaugcaguccaccccggcaaccggcuccggcuccgccaucugcagcggcgucgccgugugcaaggugcugcaccucgagggggaggucaacaagaucaagagcgcccugcuguccaccaacaaggccguggugagccucuccaacggcgucagcgugcugaccuucaaggugcuggaccucaagaacuacaucgacaagcagcugcugcccauccugaacaagcagagcugcuccauccccaacaucgagacggugaucgaguuccagcagaagaacaaccggcuccuggagaucacccgcgaguucagcgugaacgccggggucaccacccccguguccacguacaugcugaccaacagcgagcuccugucccugaucaacgacaugccgaucaccaacgaccagaagaagcucaugagcaacaacgugcagaucguccggcagcaguccuacagcaucaugugcaucaucaaggaggaggugcuggcguacgugguccagcugccccucuacggcgugaucgacacccccugcuggaagcugcacacgagcccccugugcaccaccaacaccaaggagggguccaacaucugccucacgcgcaccgaccggggcugguacugcgacaacgccggcagcgucuccuucuucccgcaggccgagaccugcaaggugcagagcaaccgcguguucugcgacaccaugaacucccugacgcugcccagcgagguaaaccucugcaacgucgacaucuucaaccccaaguacgacugcaagaucaugaccuccaagaccgacgugagcuccagcgugaucaccucccugggggccaucgucagcugcuacggcaagacgaagugcaccgccagcaacaagaaccgggggaucaucaagaccuucuccaacggcugcgacuacgugagcaacaagggcguggacaccguguccgucgggaacacccuguacugcgugaacaagcaggagggccagagccucuacgugaagggggagcccaucaucaacuucuacgacccgcuggucuuccccuccgacgaguucgacgcgagcaucucccaggugaacgagaagaucaaccagagccuggccuucauccgcaaguccgacgagcugcuccacaacgugaacgccggcaagagcacgaccaacaucaugaucaccaccaucaucaucgucaucaucgugauccugcugucccucaucgccguggggcugcugcucuacugcaaggcccggagcacgcccgucacccuguccaaggaccagcugagcggcaucaacaacaucgcguucuccaacugaggacuaguguccaccugucccuccugggcugcuggauugucucguuuuccugccaaauaaacaggaucagcgcuuuacagaucuaaaaaaaaaaaaaaaaaaaaaaaaaaaaaaaaaaaaaaaaaaaaaaaaaaaaaaaaaaaaaaaaugcaucccccccccccccccccccccccccccccccaaaggcucuuuucagagccaccagaauu

SEQ ID NO: 3314 - RNA, 1910 nt, Artificial Sequence
  mRNA product Design e-5 comprising derived and/or modified sequence from HRSV(A2)__F_DSCav1_mut3 (opt1)
gggagagcggcucggccauuuugucccagucaguccggaggcugcggcugcagaaguaccgccugcggaguaacugcaaagaagcuuaccauggagcugcucauccugaaggccaacgccaucaccaccauccugacggcggugaccuucugcuucgccagcggccagaacaucaccgaggaguucuaccaguccacgugcagcgccgucuccaagggguaccucggcgcccugcgcaccgggugguacaccagcgugaucaccaucgagcuguccaacaucaaggagaucaagugcaacggcaccgacgccaaggugaagcucaucaagcaggagcuggacaaguacaagaacgcggucacggaccugcagcuccugaugcagagcacccccgccaccggguccggcagcgccaucugcuccggcguggccgugugcaagguccugcaccucgagggggaggugaacaagaucaagagcgcgcugcuguccaccaacaaggccguggucagccucuccaacggcgugagcgugcugacguucaagguccuggaccucaagaacuacaucgacaagcagcugcugccgauccucaacaagcaguccugcagcauccccaacaucgagaccgugaucgaguuccagcagaagaacaaccggcugcuggagaucacccgcgaguucuccgugaacgccggggucaccacgcccgugagcaccuacaugcucaccaacuccgagcugcugagccucaucaacgacaugcccaucaccaacgaccagaagaagcugaugagcaacaacgugcagaucguccggcagcaguccuacagcaucaugugcaucaucaaggaggaggugcuggccuacgugguccagcucccgcuguacggcgugaucgacacgcccugcuggaagcugcacaccagcccccucugcaccaccaacacgaaggagggguccaacaucugccugacccgcaccgaccggggcugguacugcgacaacgccggcuccgugagcuucuucccccaggcggagaccugcaagguccaguccaaccgcguguucugcgacacgaugaacagccugacccucccguccgaggucaaccugugcaacguggacaucuucaaccccaaguacgacugcaagaucaugaccagcaagaccgacguguccagcuccgucaucacgagccugggggccaucguguccugcuacggcaagaccaagugcaccgccagcaacaagaaccgggggaucaucaagaccuucuccaacggcugcgacuacgugagcaacaagggcgucgacacgguguccguggggaacacccucuacugcgucaacaagcaggagggccagagccuguacgugaagggggagcccaucaucaacuucuacgacccccugguguucccgagcgacgaguucgacgccuccaucagccaggucaacgagaagaucaaccagucccucgccuucauccgcaagagcgacgagcugcugcacaacgugaacgcgggcaaguccaccaccaacaucaugaucaccacgaucaucaucgugaucaucgucauccuccugagccugaucgccguggggcuccugcuguacugcaaggcccgguccacccccgugacccugagcaaggaccagcucuccggcaucaacaacaucgccuucagcaacugaggacuaguguccaccugucccuccugggcugcuggauugucucguuuuccugccaaauaaacaggaucagcgcuuuacagaucuaaaaaaaaaaaaaaaaaaaaaaaaaaaaaaaaaaaaaaaaaaaaaaaaaaaaaaaaaaaaaaaaugcaucccccccccccccccccccccccccccccccaaaggcucuuuucagagccaccagaauu

SEQ ID NO: 3315 - RNA, 1910 nt, Artificial Sequence
  mRNA product Design e-5 comprising derived and/or modified sequence from HRSV(A2)__F_DSCav1_mut3 (opt2)
gggagagcggcucggccauuuugucccagucaguccggaggcugcggcugcagaaguaccgccugcggaguaacugcaaagaagcuuaccauggagcuccucauccucaaggccaacgccaucaccaccauccucaccgccgucaccuucugcuucgccuccggccagaacaucaccgaggaguucuaccaguccaccugcuccgccgucuccaagggcuaccucggcgcccuccgcaccggcugguacaccuccgucaucaccaucgagcucuccaacaucaaggagaucaagugcaacggcaccgacgccaaggucaagcucaucaagcaggagcucgacaaguacaagaacgccgucaccgaccuccagcuccucaugcaguccacccccgccaccggcuccggcuccgccaucugcuccggcgucgccgucugcaagguccuccaccucgagggcgaggucaacaagaucaaguccgcccuccucuccaccaacaaggccgucgucucccucuccaacggcgucuccguccucaccuucaagguccucgaccucaagaacuacaucgacaagcagcuccuccccauccucaacaagcaguccugcuccauccccaacaucgagaccgucaucgaguuccagcagaagaacaaccgccuccucgagaucacccgcgaguucuccgucaacgccggcgucaccacccccgucuccaccuacaugcucaccaacuccgagcuccucucccucaucaacgacaugcccaucaccaacgaccagaagaagcucauguccaacaacguccagaucguccgccagcaguccuacuccaucaugugcaucaucaaggaggagguccucgccuacgucguccagcucccccucuacggcgucaucgacacccccugcuggaagcuccacaccuccccccucugcaccaccaacaccaaggagggcuccaacaucugccucacccgcaccgaccgcggcugguacugcgacaacgccggcuccgucuccuucuucccccaggccgagaccugcaagguccaguccaaccgcgucuucugcgacaccaugaacucccucacccuccccuccgaggucaaccucugcaacgucgacaucuucaaccccaaguacgacugcaagaucaugaccuccaagaccgacgucuccuccuccgucaucaccucccucggcgccaucgucuccugcuacggcaagaccaagugcaccgccuccaacaagaaccgcggcaucaucaagaccuucuccaacggcugcgacuacgucuccaacaagggcgucgacaccgucuccgucggcaacacccucuacugcgucaacaagcaggagggccagucccucuacgucaagggcgagcccaucaucaacuucuacgacccccucgucuuccccuccgacgaguucgacgccuccaucucccaggucaacgagaagaucaaccagucccucgccuucauccgcaaguccgacgagcuccuccacaacgucaacgccggcaaguccaccaccaacaucaugaucaccaccaucaucaucgucaucaucgucauccuccucucccucaucgccgucggccuccuccucuacugcaaggcccgcuccacccccgucacccucuccaaggaccagcucuccggcaucaacaacaucgccuucuccaacugaggacuaguguccaccugucccuccugggcugcuggauugucucguuuuccugccaaauaaacaggaucagcgcuuuacagaucuaaaaaaaaaaaaaaaaaaaaaaaaaaaaaaaaaaaaaaaaaaaaaaaaaaaaaaaaaaaaaaaaugcaucccccccccccccccccccccccccccccccaaaggcucuuuucagagccaccagaauu

SEQ ID NO: 3316 - RNA, 1910 nt, Artificial Sequence
  mRNA product Design e-5 comprising derived and/or modified sequence from HRSV(A2)__F_DSCav1_mut3 (opt3)
gggagagcggcucggccauuuugucccagucaguccggaggcugcggcugcagaaguaccgccugcggaguaacugcaaagaagcuuaccauggagcugcucauccuuaaggccaacgcuauuaccacaauacugacugcagugacguucugcuuugccagcggccagaauaucaccgaagaguucuaccaauccacauguucugcggucucaaaaggguauuugggagcuuuaagaacugguugguacaccaguguuauuacaaucgaacugagcaacauuaaggagaucaaaugcaauggcaccgacgccaaggugaaacuaauaaagcaggaacucgauaaguauaaaaacgcaguaacugaccugcagcuucugaugcaguccacacccgccaccgggucuggaucggcuaucuguucaggcguggcagucugcaagguguugcaccucgagggugagguuaauaaaauuaagagcgcccugcugaguacgaacaaagcuguggucucccucucuaauggggugagcguauuaacuuuuaagguucuggaucuuaagaacuacaucgacaaacaauugcugccuauucuaaauaagcaguccuguucaaucccaaacauagaaaccgugauugaguuccagcagaaaaauaacaggcuccuggaaaucacacgggaguuuagugucaaugccggagugacuaccccggugagcacauauaugcuuaccaacucugagcuguugucccucauuaaugauaugcccaucacgaacgaccaaaagaaacugaugucaaacaauguccagaucguucgccagcagagcuacaguauuaugugcauaaucaaggaagagguguuagcguauguagugcaacugccucucuacggcgucauugauacuccauguuggaaacuucauacaucuccccugugcaccacuaacacaaaggaaggcuccaauaucuguuugacccgaacggaccgugggugguacugcgauaacgcaggaagcgugucguucuuuccucaggccgagaccuguaagguucagucuaauagaguguucugcgacacaaugaacucccuaacucugccaucagaagucaaucucugcaacguggauauauuuaaucccaaauaugacuguaagauuaugaccaguaaaacagauguaagcuccucuguuaucacuagccugggugcuaucgugucaugcuacggcaagaccaaauguacagccaguaacaagaauagggggauuaucaagaccuucuccaacggaugcgacuaugucagcaauaaaggcguggacacugucucuguggguaacacgcuuuacuguguuaauaagcaagaggggcagucacuguaugugaaaggagagccuauuauaaacuuuuacgauccauugguauucccgagugacgaauuugaugcaagcaucucccaggucaacgagaagauuaaucagucucucgcuuucauccggaaaucggacgaacuguuacacaacgugaaugccggcaagagcacaaccaacaucaugauuacuaccauaaucauuguuaucauugugauccugcuaucccucauagcggucggccugcuuuuguauugcaaggcccgcucaacacccgugacccugaguaaagaucaacucucugggaucaauaacauugcauucagcaauugaggacuaguguccaccugucccuccugggcugcuggauugucucguuuuccugccaaauaaacaggaucagcgcuuuacagaucuaaaaaaaaaaaaaaaaaaaaaaaaaaaaaaaaaaaaaaaaaaaaaaaaaaaaaaaaaaaaaaaaugcaucccccccccccccccccccccccccccccccaaaggcucuuuucagagccaccagaauu

SEQ ID NO: 3317 - RNA, 1910 nt, Artificial Sequence
  mRNA product Design e-5 comprising derived and/or modified sequence from HRSV(A2)__F_DSCav1_mut3 (opt4)
gggagagcggcucggccauuuugucccagucaguccggaggcugcggcugcagaaguaccgccugcggaguaacugcaaagaagcuuaccauggagcugcugauccugaaggccaacgccaucaccaccauccugaccgccgugaccuucugcuucgccagcggccagaacaucaccgaggaguucuaccagagcaccugcagcgccgugagcaagggcuaccugggcgcccugagaaccggcugguacaccagcgugaucaccaucgagcugagcaacaucaaggagaucaagugcaacggcaccgacgccaaggugaagcugaucaagcaggagcuggacaaguacaagaacgccgugaccgaccugcagcugcugaugcagagcacccccgccaccggcagcggcagcgccaucugcagcggcguggccgugugcaaggugcugcaccuggagggcgaggugaacaagaucaagagcgcccugcugagcaccaacaaggccguggugagccugagcaacggcgugagcgugcugaccuucaaggugcuggaccugaagaacuacaucgacaagcagcugcugcccauccugaacaagcagagcugcagcauccccaacaucgagaccgugaucgaguuccagcagaagaacaacagacugcuggagaucaccagagaguucagcgugaacgccggcgugaccacccccgugagcaccuacaugcugaccaacagcgagcugcugagccugaucaacgacaugcccaucaccaacgaccagaagaagcugaugagcaacaacgugcagaucgugagacagcagagcuacagcaucaugugcaucaucaaggaggaggugcuggccuacguggugcagcugccccuguacggcgugaucgacacccccugcuggaagcugcacaccagcccccugugcaccaccaacaccaaggagggcagcaacaucugccugaccagaaccgacagaggcugguacugcgacaacgccggcagcgugagcuucuucccccaggccgagaccugcaaggugcagagcaacagaguguucugcgacaccaugaacagccugacccugcccagcgaggugaaccugugcaacguggacaucuucaaccccaaguacgacugcaagaucaugaccagcaagaccgacgugagcagcagcgugaucaccagccugggcgccaucgugagcugcuacggcaagaccaagugcaccgccagcaacaagaacagaggcaucaucaagaccuucagcaacggcugcgacuacgugagcaacaagggcguggacaccgugagcgugggcaacacccuguacugcgugaacaagcaggagggccagagccuguacgugaagggcgagcccaucaucaacuucuacgacccccugguguuccccagcgacgaguucgacgccagcaucagccaggugaacgagaagaucaaccagagccuggccuucaucagaaagagcgacgagcugcugcacaacgugaacgccggcaagagcaccaccaacaucaugaucaccaccaucaucaucgugaucaucgugauccugcugagccugaucgccgugggccugcugcuguacugcaaggccagaagcacccccgugacccugagcaaggaccagcugagcggcaucaacaacaucgccuucagcaacugaggacuaguguccaccugucccuccugggcugcuggauugucucguuuuccugccaaauaaacaggaucagcgcuuuacagaucuaaaaaaaaaaaaaaaaaaaaaaaaaaaaaaaaaaaaaaaaaaaaaaaaaaaaaaaaaaaaaaaaugcaucccccccccccccccccccccccccccccccaaaggcucuuuucagagccaccagaauu

SEQ ID NO: 3318 - RNA, 1910 nt, Artificial Sequence
  mRNA product Design e-5 comprising derived and/or modified sequence from HRSV(A2)__F_DSCav1_mut3 (opt5)
gggagagcggcucggccauuuugucccagucaguccggaggcugcggcugcagaaguaccgccugcggaguaacugcaaagaagcuuaccauggagcugcucauccugaaggccaacgcuauuaccacaauccuuacggccgugaccuucugcuuugcgagcggccagaauauuacagaagaguucuaccaauccaccuguucugcugucagcaaaggguaucugggagcccucagaacaggcugguacaccuccguuaucacaauugaacugucuaacaucaaggagaucaaaugcaaugggaccgacgccaaggugaaacuuauuaagcaggaacuggauaaguauaaaaacgcugugacggaccuccagcugcugaugcagagcacccccgccacaggauccggcucugcuaucuguagcggggucgccgugugcaagguucuccaccuggagggagaggugaauaaaauuaaguccgcgcuucugagcaccaacaaagccgucgugucucucuccaauggcguuagcgugcugacauuuaagguccuugaucugaagaacuacaucgacaaacaacuccugccuauucugaauaagcagucuuguuccaucccgaacauugaaaccgugaucgaguuccagcagaaaaauaaccggcuccuggaaaucacgcgcgaguuuagcgugaaugcuggcgucacaacccccguuucuacauauaugcuuaccaacuccgagcugcucagccugauuaaugauaugccuaucaccaacgaccaaaagaaacuuauguccaacaaugugcagauugugagacagcagucuuacagcaucaugugcauuaucaaggaagagguccuggccuaugugguucaacucccccuguacggggugaucgauacaccuuguuggaaacugcauacgagcccccucugcaccacaaacaccaaggaaggauccaauauuugucugacacggaccgaccgcggcugguacugcgauaacgcugggucugucuccuucuuuccucaggccgagacguguaaggugcagagcaauagaguuuucugcgacacaaugaacucucuuacccugccgagcgaagugaaucucugcaacgucgauaucuuuaaucccaaauaugacuguaagauuaugaccuccaaaacagaugugucuagcuccgucaucaccagccugggagcgauugugucuugcuacggcaagacaaaauguacggccuccaacaagaaucgggggaucaucaagaccuucagcaacggaugcgacuauguuucuaauaaaggcguggacacagucuccgugggcaacacccuuuacuguguuaauaagcaagaggggcagagccuguaugugaaaggagagccuauuaucaacuuuuacgauccccucgucuucccuuccgacgaauuugaugcuucuauuagccaggugaacgagaagaucaaucagucccuggccuucauucgcaaaucugacgaacugcuccacaacgugaaugcuggcaagagcacaaccaacaucaugauuacgaccaucaucauuguuaucauugucauccugcuuucccugauugccguggggcuccugcuguauugcaaggccagaagcacacccgugacccuuucuaaagaucaacucuccggaaucaauaacaucgcuuucagcaauugaggacuaguguccaccugucccuccugggcugcuggauugucucguuuuccugccaaauaaacaggaucagcgcuuuacagaucuaaaaaaaaaaaaaaaaaaaaaaaaaaaaaaaaaaaaaaaaaaaaaaaaaaaaaaaaaaaaaaaaugcaucccccccccccccccccccccccccccccccaaaggcucuuuucagagccaccagaauu

SEQ ID NO: 3319 - RNA, 1910 nt, Artificial Sequence
  mRNA product Design e-5 comprising derived and/or modified sequence from HRSV(A2)__F_DSCav1_mut3 (opt6)
gggagagcggcucggccauuuugucccagucaguccggaggcugcggcugcagaaguaccgccugcggaguaacugcaaagaagcuuaccauggaauuacucauacuaaaagccaaugccauaaccacuauucuaacagcaguaacauucuguuucgccucaggacaaaacauaacagaagaauuuuaucaauccaccuguuccgcagucucgaaaggcuaccuuggcgcacuaagaaccggaugguauacaucaguaauaaccauugaacuaucaaauaucaaagaaauaaaaugcaacggaacugacgcaaaagucaaacuaauaaaacaagaauuagacaaauacaaaaacgccguuacagacuuacaacuacuaaugcaaucaacuccagcaacaggaucaggaucugcuauaugcucaggugucgccguauguaaaguguuacaccucgaaggcgaaguaaacaaaauaaaaucagcacuacuauccacaaauaaagcaguaguaucacuauccaaugguguaucaguacucacauucaaaguacuagacuuaaaaaauuauauagauaaacaauuacuaccaauauuaaacaaacaaucaugcucaauaccaaacauagaaaccgucauugaauuucaacaaaaaaacaaucgacuucuugaaauaacacgagaauuuucaguaaaugccggaguaacaaccccagucucaacauacauguuaaccaacucugaacuccuaagccuaaucaacgacaugcccauaacuaacgaccaaaaaaaacuaauguccaauaauguccaaauaguaagacaacaauccuacucaauaaugugcauuauaaaagaagaaguccucgccuauguaguacaacuacccuuauacggaguaauugacacaccauguuggaaacuacauacaucaccacuaugcaccacuaacacaaaagaaggcuccaacauaugccuaacccgaacagaucgcggaugguauugcgacaacgcaggaaguguauccuucuuuccacaagcagaaacaugcaaaguacaauccaacagaguauucugugacaccaugaacucucuaacacuaccuuccgaaguaaauuuaugcaacguagacauauuuaaucccaaauacgacuguaaaauaaugaccucaaaaacugaugucucaucaucagucauuacaucacucggagcaauagucaguugcuauggaaaaaccaaaugcacagcuaguaacaaaaacagggguauaauaaaaacauuuucaaacggaugcgauuacguaucaaauaaaggaguagacaccguauccguaggaaauacucucuacugcguaaacaaacaagaaggacaaucccuauacguaaaaggcgaaccaaucauuaacuuuuacgacccacuuguauuuccaucagacgaauuugaugccucaauaucccaagucaaugaaaaaauaaaccaaagucuagcauucauccgaaaaucagaugaacuuuuacacaacguaaacgccggaaaaucaacaacaaacaucaugaucacaacaaucaucauaguaauaauaguuauacuacuuuccuuaauagcagucggccuacuacucuacugcaaagcacgauccacaccaguaaccuuaucuaaagaccaacucucaggcauaaacaacauagcauucucaaacuaaggacuaguguccaccugucccuccugggcugcuggauugucucguuuuccugccaaauaaacaggaucagcgcuuuacagaucuaaaaaaaaaaaaaaaaaaaaaaaaaaaaaaaaaaaaaaaaaaaaaaaaaaaaaaaaaaaaaaaaugcaucccccccccccccccccccccccccccccccaaaggcucuuuucagagccaccagaauu

SEQ ID NO: 3320 - RNA, 1910 nt, Artificial Sequence
  mRNA product Design e-5 comprising derived and/or modified sequence from HRSV(A2)__F_DSCav1_mut3 (opt11)
gggagagcggcucggccauuuugucccagucaguccggaggcugcggcugcagaaguaccgccugcggaguaacugcaaagaagcuuaccauggaacuccucauccuuaaagcaaacgccaucacaaccauccucacagcagucacuuucugcuucgcauccggacaaaacaucacagaagaguucuaucaauccacgugcuccgcaguuuccaaaggauaccuuggagccuuacgaaccggcugguacaccuccgucaucaccauagaacucagcaacaucaaagaaaucaaaugcaacggaaccgacgcaaaagucaaacucaucaaacaagaacuagacaaauacaaaaacgcagucaccgaccuccaacuacucaugcaaucaacccccgcaaccggcuccggcuccgccaucugcuccggaguagccguaugcaaaguccuccaccucgaaggcgaaguuaacaagaucaaguccgcacuccuaucaaccaacaaagcagucgucucccuauccaacggcgucuccguauuaacauucaaaguccucgaccucaaaaacuacauagacaaacagcuacuccccauccuaaacaaacaauccugcuccauccccaacaucgaaacugucaucgaguuccaacagaaaaacaaccgccuccuagaaaucacccgagaguucuccguaaacgccggcgucacuacccccgucucuaccuauaugcuaaccaacucugaacuccuaucccuaaucaacgauaugcccauaacuaacgaccaaaagaaacuuauguccaacaacguacaaauaguccggcaacaaucauacucuaucaugugcaucaucaaagaagaaguacuugccuacguuguccaacucccacuauacggcgucauagacacuccaugcuggaaacuucacaccucaccccucugcaccacuaacacuaaagaaggcucuaacaucugccuuacccgcaccgaccgcggaugguacugcgacaacgcaggcucaguuagcuucuucccacaagccgaaaccugcaaaguccagucaaaccgugucuucugcgauaccaugaacucgcucacccucccuuccgaagucaaccucugcaacgucgacaucuucaaccccaaauacgacugcaaaaucaugaccucaaaaaccgacguaucuucuuccgucaucaccucccucggcgccaucguauccugcuacggcaaaaccaaaugcacugcaucaaacaaaaaccgaggcaucaucaaaaccuucucgaacggaugcgacuacguauccaacaagggcgucgacacagucuccguugguaacacccucuacugcgucaacaaacaagaaggccaaucccuauacguaaaaggcgaacccaucaucaacuucuacgacccccucgucuuccccagugacgaauuugacgccuccaucucccaagucaacgaaaagaucaaccaaucccuugccuucauacgcaaauccgacgaacuccuacacaacguuaacgccggaaaaucaacaaccaacaucaugaucacaaccaucauaaucgucauaaucgucauacuccucucccucauagccgucggccugcuauuguacuguaaagcccgcuccacaccagucacacuuucaaaagaccaacucuccgggaucaacaacaucgccuucuccaacuaaggacuaguguccaccugucccuccugggcugcuggauugucucguuuuccugccaaauaaacaggaucagcgcuuuacagaucuaaaaaaaaaaaaaaaaaaaaaaaaaaaaaaaaaaaaaaaaaaaaaaaaaaaaaaaaaaaaaaaaugcaucccccccccccccccccccccccccccccccaaaggcucuuuucagagccaccagaauu

SEQ ID NO: 3321 - RNA, 1977 nt, Artificial Sequence
  mRNA product Design e-6 comprising derived and/or modified sequence from HRSV(A2)__F_DSCav1_mut3 (opt1)
gggagagcggcucggccauuuugucccagucaguccggaggcugcggcugcagaaguaccgccugcggaguaacugcaaagaagcuuaccauggagcugcucauccugaaggccaacgccaucaccaccauccugacggcggugaccuucugcuucgccagcggccagaacaucaccgaggaguucuaccaguccacgugcagcgccgucuccaagggguaccucggcgcccugcggaccggcugguacaccuccgugaucaccaucgagcugagcaacaucaaggagaucaagugcaacgggaccgacgccaaggugaagcucaucaagcaggagcuggacaaguacaagaacgcggucacggaccugcagcuccugaugcaguccaccccggcaaccggcuccggcuccgccaucugcagcggcgucgccgugugcaaggugcugcaccucgagggggaggucaacaagaucaagagcgcccugcuguccaccaacaaggccguggugagccucuccaacggcgucagcgugcugaccuucaaggugcuggaccucaagaacuacaucgacaagcagcugcugcccauccugaacaagcagagcugcuccauccccaacaucgagacggugaucgaguuccagcagaagaacaaccggcuccuggagaucacccgcgaguucagcgugaacgccggggucaccacccccguguccacguacaugcugaccaacagcgagcuccugucccugaucaacgacaugccgaucaccaacgaccagaagaagcucaugagcaacaacgugcagaucguccggcagcaguccuacagcaucaugugcaucaucaaggaggaggugcuggcguacgugguccagcugccccucuacggcgugaucgacacccccugcuggaagcugcacacgagcccccugugcaccaccaacaccaaggagggguccaacaucugccucacgcgcaccgaccggggcugguacugcgacaacgccggcagcgucuccuucuucccgcaggccgagaccugcaaggugcagagcaaccgcguguucugcgacaccaugaacucccugacgcugcccagcgagguaaaccucugcaacgucgacaucuucaaccccaaguacgacugcaagaucaugaccuccaagaccgacgugagcuccagcgugaucaccucccugggggccaucgucagcugcuacggcaagacgaagugcaccgccagcaacaagaaccgggggaucaucaagaccuucuccaacggcugcgacuacgugagcaacaagggcguggacaccguguccgucgggaacacccuguacugcgugaacaagcaggagggccagagccucuacgugaagggggagcccaucaucaacuucuacgacccgcuggucuuccccuccgacgaguucgacgcgagcaucucccaggugaacgagaagaucaaccagagccuggccuucauccgcaaguccgacgagcugcuccacaacgugaacgccggcaagagcacgaccaacaucaugaucaccaccaucaucaucgucaucaucgugauccugcugucccucaucgccguggggcugcugcucuacugcaaggcccggagcacgcccgucacccuguccaaggaccagcugagcggcaucaacaacaucgcguucuccaacugaggacuaguacuggcugcaucucccuuuccucuguccuccauccuucucccaggauggugaagggggaccugguacccagugauccccaccccaggauccuaaaucaugacuuaccugcuaauaaaaacucauuggaaaagugagaagaucuaaaaaaaaaaaaaaaaaaaaaaaaaaaaaaaaaaaaaaaaaaaaaaaaaaaaaaaaaaaaaaaaugcaucccccccccccccccccccccccccccccccaaaggcucuuuucagagccaccagaauu

SEQ ID NO: 3322 - RNA, 1977 nt, Artificial Sequence
  mRNA product Design e-6 comprising derived and/or modified sequence from HRSV(A2)__F_DSCav1_mut3 (opt1)
gggagagcggcucggccauuuugucccagucaguccggaggcugcggcugcagaaguaccgccugcggaguaacugcaaagaagcuuaccauggagcugcucauccugaaggccaacgccaucaccaccauccugacggcggugaccuucugcuucgccagcggccagaacaucaccgaggaguucuaccaguccacgugcagcgccgucuccaagggguaccucggcgcccugcgcaccgggugguacaccagcgugaucaccaucgagcuguccaacaucaaggagaucaagugcaacggcaccgacgccaaggugaagcucaucaagcaggagcuggacaaguacaagaacgcggucacggaccugcagcuccugaugcagagcacccccgccaccggguccggcagcgccaucugcuccggcguggccgugugcaagguccugcaccucgagggggaggugaacaagaucaagagcgcgcugcuguccaccaacaaggccguggucagccucuccaacggcgugagcgugcugacguucaagguccuggaccucaagaacuacaucgacaagcagcugcugccgauccucaacaagcaguccugcagcauccccaacaucgagaccgugaucgaguuccagcagaagaacaaccggcugcuggagaucacccgcgaguucuccgugaacgccggggucaccacgcccgugagcaccuacaugcucaccaacuccgagcugcugagccucaucaacgacaugcccaucaccaacgaccagaagaagcugaugagcaacaacgugcagaucguccggcagcaguccuacagcaucaugugcaucaucaaggaggaggugcuggccuacgugguccagcucccgcuguacggcgugaucgacacgcccugcuggaagcugcacaccagcccccucugcaccaccaacacgaaggagggguccaacaucugccugacccgcaccgaccggggcugguacugcgacaacgccggcuccgugagcuucuucccccaggcggagaccugcaagguccaguccaaccgcguguucugcgacacgaugaacagccugacccucccguccgaggucaaccugugcaacguggacaucuucaaccccaaguacgacugcaagaucaugaccagcaagaccgacguguccagcuccgucaucacgagccugggggccaucguguccugcuacggcaagaccaagugcaccgccagcaacaagaaccgggggaucaucaagaccuucuccaacggcugcgacuacgugagcaacaagggcgucgacacgguguccguggggaacacccucuacugcgucaacaagcaggagggccagagccuguacgugaagggggagcccaucaucaacuucuacgacccccugguguucccgagcgacgaguucgacgccuccaucagccaggucaacgagaagaucaaccagucccucgccuucauccgcaagagcgacgagcugcugcacaacgugaacgcgggcaaguccaccaccaacaucaugaucaccacgaucaucaucgugaucaucgucauccuccugagccugaucgccguggggcuccugcuguacugcaaggcccgguccacccccgugacccugagcaaggaccagcucuccggcaucaacaacaucgccuucagcaacugaggacuaguacuggcugcaucucccuuuccucuguccuccauccuucucccaggauggugaagggggaccugguacccagugauccccaccccaggauccuaaaucaugacuuaccugcuaauaaaaacucauuggaaaagugagaagaucuaaaaaaaaaaaaaaaaaaaaaaaaaaaaaaaaaaaaaaaaaaaaaaaaaaaaaaaaaaaaaaaaugcaucccccccccccccccccccccccccccccccaaaggcucuuuucagagccaccagaauu

SEQ ID NO: 3323 - RNA, 1977 nt, Artificial Sequence
  mRNA product Design e-6 comprising derived and/or modified sequence from HRSV(A2)__F_DSCav1_mut3 (opt2)
gggagagcggcucggccauuuugucccagucaguccggaggcugcggcugcagaaguaccgccugcggaguaacugcaaagaagcuuaccauggagcuccucauccucaaggccaacgccaucaccaccauccucaccgccgucaccuucugcuucgccuccggccagaacaucaccgaggaguucuaccaguccaccugcuccgccgucuccaagggcuaccucggcgcccuccgcaccggcugguacaccuccgucaucaccaucgagcucuccaacaucaaggagaucaagugcaacggcaccgacgccaaggucaagcucaucaagcaggagcucgacaaguacaagaacgccgucaccgaccuccagcuccucaugcaguccacccccgccaccggcuccggcuccgccaucugcuccggcgucgccgucugcaagguccuccaccucgagggcgaggucaacaagaucaaguccgcccuccucuccaccaacaaggccgucgucucccucuccaacggcgucuccguccucaccuucaagguccucgaccucaagaacuacaucgacaagcagcuccuccccauccucaacaagcaguccugcuccauccccaacaucgagaccgucaucgaguuccagcagaagaacaaccgccuccucgagaucacccgcgaguucuccgucaacgccggcgucaccacccccgucuccaccuacaugcucaccaacuccgagcuccucucccucaucaacgacaugcccaucaccaacgaccagaagaagcucauguccaacaacguccagaucguccgccagcaguccuacuccaucaugugcaucaucaaggaggagguccucgccuacgucguccagcucccccucuacggcgucaucgacacccccugcuggaagcuccacaccuccccccucugcaccaccaacaccaaggagggcuccaacaucugccucacccgcaccgaccgcggcugguacugcgacaacgccggcuccgucuccuucuucccccaggccgagaccugcaagguccaguccaaccgcgucuucugcgacaccaugaacucccucacccuccccuccgaggucaaccucugcaacgucgacaucuucaaccccaaguacgacugcaagaucaugaccuccaagaccgacgucuccuccuccgucaucaccucccucggcgccaucgucuccugcuacggcaagaccaagugcaccgccuccaacaagaaccgcggcaucaucaagaccuucuccaacggcugcgacuacgucuccaacaagggcgucgacaccgucuccgucggcaacacccucuacugcgucaacaagcaggagggccagucccucuacgucaagggcgagcccaucaucaacuucuacgacccccucgucuuccccuccgacgaguucgacgccuccaucucccaggucaacgagaagaucaaccagucccucgccuucauccgcaaguccgacgagcuccuccacaacgucaacgccggcaaguccaccaccaacaucaugaucaccaccaucaucaucgucaucaucgucauccuccucucccucaucgccgucggccuccuccucuacugcaaggcccgcuccacccccgucacccucuccaaggaccagcucuccggcaucaacaacaucgccuucuccaacugaggacuaguacuggcugcaucucccuuuccucuguccuccauccuucucccaggauggugaagggggaccugguacccagugauccccaccccaggauccuaaaucaugacuuaccugcuaauaaaaacucauuggaaaagugagaagaucuaaaaaaaaaaaaaaaaaaaaaaaaaaaaaaaaaaaaaaaaaaaaaaaaaaaaaaaaaaaaaaaaugcaucccccccccccccccccccccccccccccccaaaggcucuuuucagagccaccagaauu

SEQ ID NO: 3324 - RNA, 1977 nt, Artificial Sequence
  mRNA product Design e-6 comprising derived and/or modified sequence from HRSV(A2)__F_DSCav1_mut3 (opt3)
gggagagcggcucggccauuuugucccagucaguccggaggcugcggcugcagaaguaccgccugcggaguaacugcaaagaagcuuaccauggagcugcucauccuuaaggccaacgcuauuaccacaauacugacugcagugacguucugcuuugccagcggccagaauaucaccgaagaguucuaccaauccacauguucugcggucucaaaaggguauuugggagcuuuaagaacugguugguacaccaguguuauuacaaucgaacugagcaacauuaaggagaucaaaugcaauggcaccgacgccaaggugaaacuaauaaagcaggaacucgauaaguauaaaaacgcaguaacugaccugcagcuucugaugcaguccacacccgccaccgggucuggaucggcuaucuguucaggcguggcagucugcaagguguugcaccucgagggugagguuaauaaaauuaagagcgcccugcugaguacgaacaaagcuguggucucccucucuaauggggugagcguauuaacuuuuaagguucuggaucuuaagaacuacaucgacaaacaauugcugccuauucuaaauaagcaguccuguucaaucccaaacauagaaaccgugauugaguuccagcagaaaaauaacaggcuccuggaaaucacacgggaguuuagugucaaugccggagugacuaccccggugagcacauauaugcuuaccaacucugagcuguugucccucauuaaugauaugcccaucacgaacgaccaaaagaaacugaugucaaacaauguccagaucguucgccagcagagcuacaguauuaugugcauaaucaaggaagagguguuagcguauguagugcaacugccucucuacggcgucauugauacuccauguuggaaacuucauacaucuccccugugcaccacuaacacaaaggaaggcuccaauaucuguuugacccgaacggaccgugggugguacugcgauaacgcaggaagcgugucguucuuuccucaggccgagaccuguaagguucagucuaauagaguguucugcgacacaaugaacucccuaacucugccaucagaagucaaucucugcaacguggauauauuuaaucccaaauaugacuguaagauuaugaccaguaaaacagauguaagcuccucuguuaucacuagccugggugcuaucgugucaugcuacggcaagaccaaauguacagccaguaacaagaauagggggauuaucaagaccuucuccaacggaugcgacuaugucagcaauaaaggcguggacacugucucuguggguaacacgcuuuacuguguuaauaagcaagaggggcagucacuguaugugaaaggagagccuauuauaaacuuuuacgauccauugguauucccgagugacgaauuugaugcaagcaucucccaggucaacgagaagauuaaucagucucucgcuuucauccggaaaucggacgaacuguuacacaacgugaaugccggcaagagcacaaccaacaucaugauuacuaccauaaucauuguuaucauugugauccugcuaucccucauagcggucggccugcuuuuguauugcaaggcccgcucaacacccgugacccugaguaaagaucaacucucugggaucaauaacauugcauucagcaauugaggacuaguacuggcugcaucucccuuuccucuguccuccauccuucucccaggauggugaagggggaccugguacccagugauccccaccccaggauccuaaaucaugacuuaccugcuaauaaaaacucauuggaaaagugagaagaucuaaaaaaaaaaaaaaaaaaaaaaaaaaaaaaaaaaaaaaaaaaaaaaaaaaaaaaaaaaaaaaaaugcaucccccccccccccccccccccccccccccccaaaggcucuuuucagagccaccagaauu

SEQ ID NO: 3325 - RNA, 1977 nt, Artificial Sequence
  mRNA product Design e-6 comprising derived and/or modified sequence from HRSV(A2)__F_DSCav1_mut3 (opt4)
gggagagcggcucggccauuuugucccagucaguccggaggcugcggcugcagaaguaccgccugcggaguaacugcaaagaagcuuaccauggagcugcugauccugaaggccaacgccaucaccaccauccugaccgccgugaccuucugcuucgccagcggccagaacaucaccgaggaguucuaccagagcaccugcagcgccgugagcaagggcuaccugggcgcccugagaaccggcugguacaccagcgugaucaccaucgagcugagcaacaucaaggagaucaagugcaacggcaccgacgccaaggugaagcugaucaagcaggagcuggacaaguacaagaacgccgugaccgaccugcagcugcugaugcagagcacccccgccaccggcagcggcagcgccaucugcagcggcguggccgugugcaaggugcugcaccuggagggcgaggugaacaagaucaagagcgcccugcugagcaccaacaaggccguggugagccugagcaacggcgugagcgugcugaccuucaaggugcuggaccugaagaacuacaucgacaagcagcugcugcccauccugaacaagcagagcugcagcauccccaacaucgagaccgugaucgaguuccagcagaagaacaacagacugcuggagaucaccagagaguucagcgugaacgccggcgugaccacccccgugagcaccuacaugcugaccaacagcgagcugcugagccugaucaacgacaugcccaucaccaacgaccagaagaagcugaugagcaacaacgugcagaucgugagacagcagagcuacagcaucaugugcaucaucaaggaggaggugcuggccuacguggugcagcugccccuguacggcgugaucgacacccccugcuggaagcugcacaccagcccccugugcaccaccaacaccaaggagggcagcaacaucugccugaccagaaccgacagaggcugguacugcgacaacgccggcagcgugagcuucuucccccaggccgagaccugcaaggugcagagcaacagaguguucugcgacaccaugaacagccugacccugcccagcgaggugaaccugugcaacguggacaucuucaaccccaaguacgacugcaagaucaugaccagcaagaccgacgugagcagcagcgugaucaccagccugggcgccaucgugagcugcuacggcaagaccaagugcaccgccagcaacaagaacagaggcaucaucaagaccuucagcaacggcugcgacuacgugagcaacaagggcguggacaccgugagcgugggcaacacccuguacugcgugaacaagcaggagggccagagccuguacgugaagggcgagcccaucaucaacuucuacgacccccugguguuccccagcgacgaguucgacgccagcaucagccaggugaacgagaagaucaaccagagccuggccuucaucagaaagagcgacgagcugcugcacaacgugaacgccggcaagagcaccaccaacaucaugaucaccaccaucaucaucgugaucaucgugauccugcugagccugaucgccgugggccugcugcuguacugcaaggccagaagcacccccgugacccugagcaaggaccagcugagcggcaucaacaacaucgccuucagcaacugaggacuaguacuggcugcaucucccuuuccucuguccuccauccuucucccaggauggugaagggggaccugguacccagugauccccaccccaggauccuaaaucaugacuuaccugcuaauaaaaacucauuggaaaagugagaagaucuaaaaaaaaaaaaaaaaaaaaaaaaaaaaaaaaaaaaaaaaaaaaaaaaaaaaaaaaaaaaaaaaugcaucccccccccccccccccccccccccccccccaaaggcucuuuucagagccaccagaauu

SEQ ID NO: 3326 - RNA, 1977 nt, Artificial Sequence
  mRNA product Design e-6 comprising derived and/or modified sequence from HRSV(A2)__F_DSCav1_mut3 (opt5)
gggagagcggcucggccauuuugucccagucaguccggaggcugcggcugcagaaguaccgccugcggaguaacugcaaagaagcuuaccauggagcugcucauccugaaggccaacgcuauuaccacaauccuuacggccgugaccuucugcuuugcgagcggccagaauauuacagaagaguucuaccaauccaccuguucugcugucagcaaaggguaucugggagcccucagaacaggcugguacaccuccguuaucacaauugaacugucuaacaucaaggagaucaaaugcaaugggaccgacgccaaggugaaacuuauuaagcaggaacuggauaaguauaaaaacgcugugacggaccuccagcugcugaugcagagcacccccgccacaggauccggcucugcuaucuguagcggggucgccgugugcaagguucuccaccuggagggagaggugaauaaaauuaaguccgcgcuucugagcaccaacaaagccgucgugucucucuccaauggcguuagcgugcugacauuuaagguccuugaucugaagaacuacaucgacaaacaacuccugccuauucugaauaagcagucuuguuccaucccgaacauugaaaccgugaucgaguuccagcagaaaaauaaccggcuccuggaaaucacgcgcgaguuuagcgugaaugcuggcgucacaacccccguuucuacauauaugcuuaccaacuccgagcugcucagccugauuaaugauaugccuaucaccaacgaccaaaagaaacuuauguccaacaaugugcagauugugagacagcagucuuacagcaucaugugcauuaucaaggaagagguccuggccuaugugguucaacucccccuguacggggugaucgauacaccuuguuggaaacugcauacgagcccccucugcaccacaaacaccaaggaaggauccaauauuugucugacacggaccgaccgcggcugguacugcgauaacgcugggucugucuccuucuuuccucaggccgagacguguaaggugcagagcaauagaguuuucugcgacacaaugaacucucuuacccugccgagcgaagugaaucucugcaacgucgauaucuuuaaucccaaauaugacuguaagauuaugaccuccaaaacagaugugucuagcuccgucaucaccagccugggagcgauugugucuugcuacggcaagacaaaauguacggccuccaacaagaaucgggggaucaucaagaccuucagcaacggaugcgacuauguuucuaauaaaggcguggacacagucuccgugggcaacacccuuuacuguguuaauaagcaagaggggcagagccuguaugugaaaggagagccuauuaucaacuuuuacgauccccucgucuucccuuccgacgaauuugaugcuucuauuagccaggugaacgagaagaucaaucagucccuggccuucauucgcaaaucugacgaacugcuccacaacgugaaugcuggcaagagcacaaccaacaucaugauuacgaccaucaucauuguuaucauugucauccugcuuucccugauugccguggggcuccugcuguauugcaaggccagaagcacacccgugacccuuucuaaagaucaacucuccggaaucaauaacaucgcuuucagcaauugaggacuaguacuggcugcaucucccuuuccucuguccuccauccuucucccaggauggugaagggggaccugguacccagugauccccaccccaggauccuaaaucaugacuuaccugcuaauaaaaacucauuggaaaagugagaagaucuaaaaaaaaaaaaaaaaaaaaaaaaaaaaaaaaaaaaaaaaaaaaaaaaaaaaaaaaaaaaaaaaugcaucccccccccccccccccccccccccccccccaaaggcucuuuucagagccaccagaauu

SEQ ID NO: 3327 - RNA, 1977 nt, Artificial Sequence
  mRNA product Design e-6 comprising derived and/or modified sequence from HRSV(A2)__F_DSCav1_mut3 (opt6)
gggagagcggcucggccauuuugucccagucaguccggaggcugcggcugcagaaguaccgccugcggaguaacugcaaagaagcuuaccauggaauuacucauacuaaaagccaaugccauaaccacuauucuaacagcaguaacauucuguuucgccucaggacaaaacauaacagaagaauuuuaucaauccaccuguuccgcagucucgaaaggcuaccuuggcgcacuaagaaccggaugguauacaucaguaauaaccauugaacuaucaaauaucaaagaaauaaaaugcaacggaacugacgcaaaagucaaacuaauaaaacaagaauuagacaaauacaaaaacgccguuacagacuuacaacuacuaaugcaaucaacuccagcaacaggaucaggaucugcuauaugcucaggugucgccguauguaaaguguuacaccucgaaggcgaaguaaacaaaauaaaaucagcacuacuauccacaaauaaagcaguaguaucacuauccaaugguguaucaguacucacauucaaaguacuagacuuaaaaaauuauauagauaaacaauuacuaccaauauuaaacaaacaaucaugcucaauaccaaacauagaaaccgucauugaauuucaacaaaaaaacaaucgacuucuugaaauaacacgagaauuuucaguaaaugccggaguaacaaccccagucucaacauacauguuaaccaacucugaacuccuaagccuaaucaacgacaugcccauaacuaacgaccaaaaaaaacuaauguccaauaauguccaaauaguaagacaacaauccuacucaauaaugugcauuauaaaagaagaaguccucgccuauguaguacaacuacccuuauacggaguaauugacacaccauguuggaaacuacauacaucaccacuaugcaccacuaacacaaaagaaggcuccaacauaugccuaacccgaacagaucgcggaugguauugcgacaacgcaggaaguguauccuucuuuccacaagcagaaacaugcaaaguacaauccaacagaguauucugugacaccaugaacucucuaacacuaccuuccgaaguaaauuuaugcaacguagacauauuuaaucccaaauacgacuguaaaauaaugaccucaaaaacugaugucucaucaucagucauuacaucacucggagcaauagucaguugcuauggaaaaaccaaaugcacagcuaguaacaaaaacagggguauaauaaaaacauuuucaaacggaugcgauuacguaucaaauaaaggaguagacaccguauccguaggaaauacucucuacugcguaaacaaacaagaaggacaaucccuauacguaaaaggcgaaccaaucauuaacuuuuacgacccacuuguauuuccaucagacgaauuugaugccucaauaucccaagucaaugaaaaaauaaaccaaagucuagcauucauccgaaaaucagaugaacuuuuacacaacguaaacgccggaaaaucaacaacaaacaucaugaucacaacaaucaucauaguaauaauaguuauacuacuuuccuuaauagcagucggccuacuacucuacugcaaagcacgauccacaccaguaaccuuaucuaaagaccaacucucaggcauaaacaacauagcauucucaaacuaaggacuaguacuggcugcaucucccuuuccucuguccuccauccuucucccaggauggugaagggggaccugguacccagugauccccaccccaggauccuaaaucaugacuuaccugcuaauaaaaacucauuggaaaagugagaagaucuaaaaaaaaaaaaaaaaaaaaaaaaaaaaaaaaaaaaaaaaaaaaaaaaaaaaaaaaaaaaaaaaugcaucccccccccccccccccccccccccccccccaaaggcucuuuucagagccaccagaauu

SEQ ID NO: 3328 - RNA, 1977 nt, Artificial Sequence
  mRNA product Design e-6 comprising derived and/or modified sequence from HRSV(A2)__F_DSCav1_mut3 (opt11)
gggagagcggcucggccauuuugucccagucaguccggaggcugcggcugcagaaguaccgccugcggaguaacugcaaagaagcuuaccauggaacuccucauccuuaaagcaaacgccaucacaaccauccucacagcagucacuuucugcuucgcauccggacaaaacaucacagaagaguucuaucaauccacgugcuccgcaguuuccaaaggauaccuuggagccuuacgaaccggcugguacaccuccgucaucaccauagaacucagcaacaucaaagaaaucaaaugcaacggaaccgacgcaaaagucaaacucaucaaacaagaacuagacaaauacaaaaacgcagucaccgaccuccaacuacucaugcaaucaacccccgcaaccggcuccggcuccgccaucugcuccggaguagccguaugcaaaguccuccaccucgaaggcgaaguuaacaagaucaaguccgcacuccuaucaaccaacaaagcagucgucucccuauccaacggcgucuccguauuaacauucaaaguccucgaccucaaaaacuacauagacaaacagcuacuccccauccuaaacaaacaauccugcuccauccccaacaucgaaacugucaucgaguuccaacagaaaaacaaccgccuccuagaaaucacccgagaguucuccguaaacgccggcgucacuacccccgucucuaccuauaugcuaaccaacucugaacuccuaucccuaaucaacgauaugcccauaacuaacgaccaaaagaaacuuauguccaacaacguacaaauaguccggcaacaaucauacucuaucaugugcaucaucaaagaagaaguacuugccuacguuguccaacucccacuauacggcgucauagacacuccaugcuggaaacuucacaccucaccccucugcaccacuaacacuaaagaaggcucuaacaucugccuuacccgcaccgaccgcggaugguacugcgacaacgcaggcucaguuagcuucuucccacaagccgaaaccugcaaaguccagucaaaccgugucuucugcgauaccaugaacucgcucacccucccuuccgaagucaaccucugcaacgucgacaucuucaaccccaaauacgacugcaaaaucaugaccucaaaaaccgacguaucuucuuccgucaucaccucccucggcgccaucguauccugcuacggcaaaaccaaaugcacugcaucaaacaaaaaccgaggcaucaucaaaaccuucucgaacggaugcgacuacguauccaacaagggcgucgacacagucuccguugguaacacccucuacugcgucaacaaacaagaaggccaaucccuauacguaaaaggcgaacccaucaucaacuucuacgacccccucgucuuccccagugacgaauuugacgccuccaucucccaagucaacgaaaagaucaaccaaucccuugccuucauacgcaaauccgacgaacuccuacacaacguuaacgccggaaaaucaacaaccaacaucaugaucacaaccaucauaaucgucauaaucgucauacuccucucccucauagccgucggccugcuauuguacuguaaagcccgcuccacaccagucacacuuucaaaagaccaacucuccgggaucaacaacaucgccuucuccaacuaaggacuaguacuggcugcaucucccuuuccucuguccuccauccuucucccaggauggugaagggggaccugguacccagugauccccaccccaggauccuaaaucaugacuuaccugcuaauaaaaacucauuggaaaagugagaagaucuaaaaaaaaaaaaaaaaaaaaaaaaaaaaaaaaaaaaaaaaaaaaaaaaaaaaaaaaaaaaaaaaugcaucccccccccccccccccccccccccccccccaaaggcucuuuucagagccaccagaauu

SEQ ID NO: 3329 - RNA, 2193 nt, Artificial Sequence
  mRNA product Design f-1 comprising derived and/or modified sequence from HRSV(A2)__F_DSCav1_mut3 (opt1)
gggagagcggcucggccauuuugucccagucaguccggaggcugcggcugcagaaguaccgccugcggaguaacugcaaagaagcuuaccauggagcugcucauccugaaggccaacgccaucaccaccauccugacggcggugaccuucugcuucgccagcggccagaacaucaccgaggaguucuaccaguccacgugcagcgccgucuccaagggguaccucggcgcccugcggaccggcugguacaccuccgugaucaccaucgagcugagcaacaucaaggagaucaagugcaacgggaccgacgccaaggugaagcucaucaagcaggagcuggacaaguacaagaacgcggucacggaccugcagcuccugaugcaguccaccccggcaaccggcuccggcuccgccaucugcagcggcgucgccgugugcaaggugcugcaccucgagggggaggucaacaagaucaagagcgcccugcuguccaccaacaaggccguggugagccucuccaacggcgucagcgugcugaccuucaaggugcuggaccucaagaacuacaucgacaagcagcugcugcccauccugaacaagcagagcugcuccauccccaacaucgagacggugaucgaguuccagcagaagaacaaccggcuccuggagaucacccgcgaguucagcgugaacgccggggucaccacccccguguccacguacaugcugaccaacagcgagcuccugucccugaucaacgacaugccgaucaccaacgaccagaagaagcucaugagcaacaacgugcagaucguccggcagcaguccuacagcaucaugugcaucaucaaggaggaggugcuggcguacgugguccagcugccccucuacggcgugaucgacacccccugcuggaagcugcacacgagcccccugugcaccaccaacaccaaggagggguccaacaucugccucacgcgcaccgaccggggcugguacugcgacaacgccggcagcgucuccuucuucccgcaggccgagaccugcaaggugcagagcaaccgcguguucugcgacaccaugaacucccugacgcugcccagcgagguaaaccucugcaacgucgacaucuucaaccccaaguacgacugcaagaucaugaccuccaagaccgacgugagcuccagcgugaucaccucccugggggccaucgucagcugcuacggcaagacgaagugcaccgccagcaacaagaaccgggggaucaucaagaccuucuccaacggcugcgacuacgugagcaacaagggcguggacaccguguccgucgggaacacccuguacugcgugaacaagcaggagggccagagccucuacgugaagggggagcccaucaucaacuucuacgacccgcuggucuuccccuccgacgaguucgacgcgagcaucucccaggugaacgagaagaucaaccagagccuggccuucauccgcaaguccgacgagcugcuccacaacgugaacgccggcaagagcacgaccaacaucaugaucaccaccaucaucaucgucaucaucgugauccugcugucccucaucgccguggggcugcugcucuacugcaaggcccggagcacgcccgucacccuguccaaggaccagcugagcggcaucaacaacaucgcguucuccaacugaggacuagugaagggaacacccaaauuuaauucagccuuaagcacaauuaauuaagagugaaacguaauuguacaagcaguuggucacccaccauagggcaugaucaacaccgcaaccuuuccuuuuucccccagugauucugaaaaaccccucuucccuucagcuugcuuagauguuccaaauuuaguaagcuuaaggcggccuacagaagaaaaagaaaaaaaaggccacaaaaguucccucucacuuucaguaaauaaaauaaaagcagcaacagaaauaaagaaauaaaugaaauucaaaaugaaauaaauauuguguugugcagcauuaaaaaaucaauaaaaauuaaaaaugagcaagaucuaaaaaaaaaaaaaaaaaaaaaaaaaaaaaaaaaaaaaaaaaaaaaaaaaaaaaaaaaaaaaaaaugcaucccccccccccccccccccccccccccccccaaaggcucuuuucagagccaccagaauu

SEQ ID NO: 3330 - RNA, 2193 nt, Artificial Sequence
  mRNA product Design f-1 comprising derived and/or modified sequence from HRSV(A2)__F_DSCav1_mut3 (opt1)
gggagagcggcucggccauuuugucccagucaguccggaggcugcggcugcagaaguaccgccugcggaguaacugcaaagaagcuuaccauggagcugcucauccugaaggccaacgccaucaccaccauccugacggcggugaccuucugcuucgccagcggccagaacaucaccgaggaguucuaccaguccacgugcagcgccgucuccaagggguaccucggcgcccugcgcaccgggugguacaccagcgugaucaccaucgagcuguccaacaucaaggagaucaagugcaacggcaccgacgccaaggugaagcucaucaagcaggagcuggacaaguacaagaacgcggucacggaccugcagcuccugaugcagagcacccccgccaccggguccggcagcgccaucugcuccggcguggccgugugcaagguccugcaccucgagggggaggugaacaagaucaagagcgcgcugcuguccaccaacaaggccguggucagccucuccaacggcgugagcgugcugacguucaagguccuggaccucaagaacuacaucgacaagcagcugcugccgauccucaacaagcaguccugcagcauccccaacaucgagaccgugaucgaguuccagcagaagaacaaccggcugcuggagaucacccgcgaguucuccgugaacgccggggucaccacgcccgugagcaccuacaugcucaccaacuccgagcugcugagccucaucaacgacaugcccaucaccaacgaccagaagaagcugaugagcaacaacgugcagaucguccggcagcaguccuacagcaucaugugcaucaucaaggaggaggugcuggccuacgugguccagcucccgcuguacggcgugaucgacacgcccugcuggaagcugcacaccagcccccucugcaccaccaacacgaaggagggguccaacaucugccugacccgcaccgaccggggcugguacugcgacaacgccggcuccgugagcuucuucccccaggcggagaccugcaagguccaguccaaccgcguguucugcgacacgaugaacagccugacccucccguccgaggucaaccugugcaacguggacaucuucaaccccaaguacgacugcaagaucaugaccagcaagaccgacguguccagcuccgucaucacgagccugggggccaucguguccugcuacggcaagaccaagugcaccgccagcaacaagaaccgggggaucaucaagaccuucuccaacggcugcgacuacgugagcaacaagggcgucgacacgguguccguggggaacacccucuacugcgucaacaagcaggagggccagagccuguacgugaagggggagcccaucaucaacuucuacgacccccugguguucccgagcgacgaguucgacgccuccaucagccaggucaacgagaagaucaaccagucccucgccuucauccgcaagagcgacgagcugcugcacaacgugaacgcgggcaaguccaccaccaacaucaugaucaccacgaucaucaucgugaucaucgucauccuccugagccugaucgccguggggcuccugcuguacugcaaggcccgguccacccccgugacccugagcaaggaccagcucuccggcaucaacaacaucgccuucagcaacugaggacuagugaagggaacacccaaauuuaauucagccuuaagcacaauuaauuaagagugaaacguaauuguacaagcaguuggucacccaccauagggcaugaucaacaccgcaaccuuuccuuuuucccccagugauucugaaaaaccccucuucccuucagcuugcuuagauguuccaaauuuaguaagcuuaaggcggccuacagaagaaaaagaaaaaaaaggccacaaaaguucccucucacuuucaguaaauaaaauaaaagcagcaacagaaauaaagaaauaaaugaaauucaaaaugaaauaaauauuguguugugcagcauuaaaaaaucaauaaaaauuaaaaaugagcaagaucuaaaaaaaaaaaaaaaaaaaaaaaaaaaaaaaaaaaaaaaaaaaaaaaaaaaaaaaaaaaaaaaaugcaucccccccccccccccccccccccccccccccaaaggcucuuuucagagccaccagaauu

SEQ ID NO: 3331 - RNA, 2193 nt, Artificial Sequence
  mRNA product Design f-1 comprising derived and/or modified sequence from HRSV(A2)__F_DSCav1_mut3 (opt2)
gggagagcggcucggccauuuugucccagucaguccggaggcugcggcugcagaaguaccgccugcggaguaacugcaaagaagcuuaccauggagcuccucauccucaaggccaacgccaucaccaccauccucaccgccgucaccuucugcuucgccuccggccagaacaucaccgaggaguucuaccaguccaccugcuccgccgucuccaagggcuaccucggcgcccuccgcaccggcugguacaccuccgucaucaccaucgagcucuccaacaucaaggagaucaagugcaacggcaccgacgccaaggucaagcucaucaagcaggagcucgacaaguacaagaacgccgucaccgaccuccagcuccucaugcaguccacccccgccaccggcuccggcuccgccaucugcuccggcgucgccgucugcaagguccuccaccucgagggcgaggucaacaagaucaaguccgcccuccucuccaccaacaaggccgucgucucccucuccaacggcgucuccguccucaccuucaagguccucgaccucaagaacuacaucgacaagcagcuccuccccauccucaacaagcaguccugcuccauccccaacaucgagaccgucaucgaguuccagcagaagaacaaccgccuccucgagaucacccgcgaguucuccgucaacgccggcgucaccacccccgucuccaccuacaugcucaccaacuccgagcuccucucccucaucaacgacaugcccaucaccaacgaccagaagaagcucauguccaacaacguccagaucguccgccagcaguccuacuccaucaugugcaucaucaaggaggagguccucgccuacgucguccagcucccccucuacggcgucaucgacacccccugcuggaagcuccacaccuccccccucugcaccaccaacaccaaggagggcuccaacaucugccucacccgcaccgaccgcggcugguacugcgacaacgccggcuccgucuccuucuucccccaggccgagaccugcaagguccaguccaaccgcgucuucugcgacaccaugaacucccucacccuccccuccgaggucaaccucugcaacgucgacaucuucaaccccaaguacgacugcaagaucaugaccuccaagaccgacgucuccuccuccgucaucaccucccucggcgccaucgucuccugcuacggcaagaccaagugcaccgccuccaacaagaaccgcggcaucaucaagaccuucuccaacggcugcgacuacgucuccaacaagggcgucgacaccgucuccgucggcaacacccucuacugcgucaacaagcaggagggccagucccucuacgucaagggcgagcccaucaucaacuucuacgacccccucgucuuccccuccgacgaguucgacgccuccaucucccaggucaacgagaagaucaaccagucccucgccuucauccgcaaguccgacgagcuccuccacaacgucaacgccggcaaguccaccaccaacaucaugaucaccaccaucaucaucgucaucaucgucauccuccucucccucaucgccgucggccuccuccucuacugcaaggcccgcuccacccccgucacccucuccaaggaccagcucuccggcaucaacaacaucgccuucuccaacugaggacuagugaagggaacacccaaauuuaauucagccuuaagcacaauuaauuaagagugaaacguaauuguacaagcaguuggucacccaccauagggcaugaucaacaccgcaaccuuuccuuuuucccccagugauucugaaaaaccccucuucccuucagcuugcuuagauguuccaaauuuaguaagcuuaaggcggccuacagaagaaaaagaaaaaaaaggccacaaaaguucccucucacuuucaguaaauaaaauaaaagcagcaacagaaauaaagaaauaaaugaaauucaaaaugaaauaaauauuguguugugcagcauuaaaaaaucaauaaaaauuaaaaaugagcaagaucuaaaaaaaaaaaaaaaaaaaaaaaaaaaaaaaaaaaaaaaaaaaaaaaaaaaaaaaaaaaaaaaaugcaucccccccccccccccccccccccccccccccaaaggcucuuuucagagccaccagaauu

SEQ ID NO: 3332 - RNA, 2193 nt, Artificial Sequence
  mRNA product Design f-1 comprising derived and/or modified sequence from HRSV(A2)__F_DSCav1_mut3 (opt3)
gggagagcggcucggccauuuugucccagucaguccggaggcugcggcugcagaaguaccgccugcggaguaacugcaaagaagcuuaccauggagcugcucauccuuaaggccaacgcuauuaccacaauacugacugcagugacguucugcuuugccagcggccagaauaucaccgaagaguucuaccaauccacauguucugcggucucaaaaggguauuugggagcuuuaagaacugguugguacaccaguguuauuacaaucgaacugagcaacauuaaggagaucaaaugcaauggcaccgacgccaaggugaaacuaauaaagcaggaacucgauaaguauaaaaacgcaguaacugaccugcagcuucugaugcaguccacacccgccaccgggucuggaucggcuaucuguucaggcguggcagucugcaagguguugcaccucgagggugagguuaauaaaauuaagagcgcccugcugaguacgaacaaagcuguggucucccucucuaauggggugagcguauuaacuuuuaagguucuggaucuuaagaacuacaucgacaaacaauugcugccuauucuaaauaagcaguccuguucaaucccaaacauagaaaccgugauugaguuccagcagaaaaauaacaggcuccuggaaaucacacgggaguuuagugucaaugccggagugacuaccccggugagcacauauaugcuuaccaacucugagcuguugucccucauuaaugauaugcccaucacgaacgaccaaaagaaacugaugucaaacaauguccagaucguucgccagcagagcuacaguauuaugugcauaaucaaggaagagguguuagcguauguagugcaacugccucucuacggcgucauugauacuccauguuggaaacuucauacaucuccccugugcaccacuaacacaaaggaaggcuccaauaucuguuugacccgaacggaccgugggugguacugcgauaacgcaggaagcgugucguucuuuccucaggccgagaccuguaagguucagucuaauagaguguucugcgacacaaugaacucccuaacucugccaucagaagucaaucucugcaacguggauauauuuaaucccaaauaugacuguaagauuaugaccaguaaaacagauguaagcuccucuguuaucacuagccugggugcuaucgugucaugcuacggcaagaccaaauguacagccaguaacaagaauagggggauuaucaagaccuucuccaacggaugcgacuaugucagcaauaaaggcguggacacugucucuguggguaacacgcuuuacuguguuaauaagcaagaggggcagucacuguaugugaaaggagagccuauuauaaacuuuuacgauccauugguauucccgagugacgaauuugaugcaagcaucucccaggucaacgagaagauuaaucagucucucgcuuucauccggaaaucggacgaacuguuacacaacgugaaugccggcaagagcacaaccaacaucaugauuacuaccauaaucauuguuaucauugugauccugcuaucccucauagcggucggccugcuuuuguauugcaaggcccgcucaacacccgugacccugaguaaagaucaacucucugggaucaauaacauugcauucagcaauugaggacuagugaagggaacacccaaauuuaauucagccuuaagcacaauuaauuaagagugaaacguaauuguacaagcaguuggucacccaccauagggcaugaucaacaccgcaaccuuuccuuuuucccccagugauucugaaaaaccccucuucccuucagcuugcuuagauguuccaaauuuaguaagcuuaaggcggccuacagaagaaaaagaaaaaaaaggccacaaaaguucccucucacuuucaguaaauaaaauaaaagcagcaacagaaauaaagaaauaaaugaaauucaaaaugaaauaaauauuguguugugcagcauuaaaaaaucaauaaaaauuaaaaaugagcaagaucuaaaaaaaaaaaaaaaaaaaaaaaaaaaaaaaaaaaaaaaaaaaaaaaaaaaaaaaaaaaaaaaaugcaucccccccccccccccccccccccccccccccaaaggcucuuuucagagccaccagaauu

SEQ ID NO: 3333 - RNA, 2193 nt, Artificial Sequence
  mRNA product Design f-1 comprising derived and/or modified sequence from HRSV(A2)__F_DSCav1_mut3 (opt4)
gggagagcggcucggccauuuugucccagucaguccggaggcugcggcugcagaaguaccgccugcggaguaacugcaaagaagcuuaccauggagcugcugauccugaaggccaacgccaucaccaccauccugaccgccgugaccuucugcuucgccagcggccagaacaucaccgaggaguucuaccagagcaccugcagcgccgugagcaagggcuaccugggcgcccugagaaccggcugguacaccagcgugaucaccaucgagcugagcaacaucaaggagaucaagugcaacggcaccgacgccaaggugaagcugaucaagcaggagcuggacaaguacaagaacgccgugaccgaccugcagcugcugaugcagagcacccccgccaccggcagcggcagcgccaucugcagcggcguggccgugugcaaggugcugcaccuggagggcgaggugaacaagaucaagagcgcccugcugagcaccaacaaggccguggugagccugagcaacggcgugagcgugcugaccuucaaggugcuggaccugaagaacuacaucgacaagcagcugcugcccauccugaacaagcagagcugcagcauccccaacaucgagaccgugaucgaguuccagcagaagaacaacagacugcuggagaucaccagagaguucagcgugaacgccggcgugaccacccccgugagcaccuacaugcugaccaacagcgagcugcugagccugaucaacgacaugcccaucaccaacgaccagaagaagcugaugagcaacaacgugcagaucgugagacagcagagcuacagcaucaugugcaucaucaaggaggaggugcuggccuacguggugcagcugccccuguacggcgugaucgacacccccugcuggaagcugcacaccagcccccugugcaccaccaacaccaaggagggcagcaacaucugccugaccagaaccgacagaggcugguacugcgacaacgccggcagcgugagcuucuucccccaggccgagaccugcaaggugcagagcaacagaguguucugcgacaccaugaacagccugacccugcccagcgaggugaaccugugcaacguggacaucuucaaccccaaguacgacugcaagaucaugaccagcaagaccgacgugagcagcagcgugaucaccagccugggcgccaucgugagcugcuacggcaagaccaagugcaccgccagcaacaagaacagaggcaucaucaagaccuucagcaacggcugcgacuacgugagcaacaagggcguggacaccgugagcgugggcaacacccuguacugcgugaacaagcaggagggccagagccuguacgugaagggcgagcccaucaucaacuucuacgacccccugguguuccccagcgacgaguucgacgccagcaucagccaggugaacgagaagaucaaccagagccuggccuucaucagaaagagcgacgagcugcugcacaacgugaacgccggcaagagcaccaccaacaucaugaucaccaccaucaucaucgugaucaucgugauccugcugagccugaucgccgugggccugcugcuguacugcaaggccagaagcacccccgugacccugagcaaggaccagcugagcggcaucaacaacaucgccuucagcaacugaggacuagugaagggaacacccaaauuuaauucagccuuaagcacaauuaauuaagagugaaacguaauuguacaagcaguuggucacccaccauagggcaugaucaacaccgcaaccuuuccuuuuucccccagugauucugaaaaaccccucuucccuucagcuugcuuagauguuccaaauuuaguaagcuuaaggcggccuacagaagaaaaagaaaaaaaaggccacaaaaguucccucucacuuucaguaaauaaaauaaaagcagcaacagaaauaaagaaauaaaugaaauucaaaaugaaauaaauauuguguugugcagcauuaaaaaaucaauaaaaauuaaaaaugagcaagaucuaaaaaaaaaaaaaaaaaaaaaaaaaaaaaaaaaaaaaaaaaaaaaaaaaaaaaaaaaaaaaaaaugcaucccccccccccccccccccccccccccccccaaaggcucuuuucagagccaccagaauu

SEQ ID NO: 3334 - RNA, 2193 nt, Artificial Sequence
  mRNA product Design f-1 comprising derived and/or modified sequence from HRSV(A2)__F_DSCav1_mut3 (opt5)
gggagagcggcucggccauuuugucccagucaguccggaggcugcggcugcagaaguaccgccugcggaguaacugcaaagaagcuuaccauggagcugcucauccugaaggccaacgcuauuaccacaauccuuacggccgugaccuucugcuuugcgagcggccagaauauuacagaagaguucuaccaauccaccuguucugcugucagcaaaggguaucugggagcccucagaacaggcugguacaccuccguuaucacaauugaacugucuaacaucaaggagaucaaaugcaaugggaccgacgccaaggugaaacuuauuaagcaggaacuggauaaguauaaaaacgcugugacggaccuccagcugcugaugcagagcacccccgccacaggauccggcucugcuaucuguagcggggucgccgugugcaagguucuccaccuggagggagaggugaauaaaauuaaguccgcgcuucugagcaccaacaaagccgucgugucucucuccaauggcguuagcgugcugacauuuaagguccuugaucugaagaacuacaucgacaaacaacuccugccuauucugaauaagcagucuuguuccaucccgaacauugaaaccgugaucgaguuccagcagaaaaauaaccggcuccuggaaaucacgcgcgaguuuagcgugaaugcuggcgucacaacccccguuucuacauauaugcuuaccaacuccgagcugcucagccugauuaaugauaugccuaucaccaacgaccaaaagaaacuuauguccaacaaugugcagauugugagacagcagucuuacagcaucaugugcauuaucaaggaagagguccuggccuaugugguucaacucccccuguacggggugaucgauacaccuuguuggaaacugcauacgagcccccucugcaccacaaacaccaaggaaggauccaauauuugucugacacggaccgaccgcggcugguacugcgauaacgcugggucugucuccuucuuuccucaggccgagacguguaaggugcagagcaauagaguuuucugcgacacaaugaacucucuuacccugccgagcgaagugaaucucugcaacgucgauaucuuuaaucccaaauaugacuguaagauuaugaccuccaaaacagaugugucuagcuccgucaucaccagccugggagcgauugugucuugcuacggcaagacaaaauguacggccuccaacaagaaucgggggaucaucaagaccuucagcaacggaugcgacuauguuucuaauaaaggcguggacacagucuccgugggcaacacccuuuacuguguuaauaagcaagaggggcagagccuguaugugaaaggagagccuauuaucaacuuuuacgauccccucgucuucccuuccgacgaauuugaugcuucuauuagccaggugaacgagaagaucaaucagucccuggccuucauucgcaaaucugacgaacugcuccacaacgugaaugcuggcaagagcacaaccaacaucaugauuacgaccaucaucauuguuaucauugucauccugcuuucccugauugccguggggcuccugcuguauugcaaggccagaagcacacccgugacccuuucuaaagaucaacucuccggaaucaauaacaucgcuuucagcaauugaggacuagugaagggaacacccaaauuuaauucagccuuaagcacaauuaauuaagagugaaacguaauuguacaagcaguuggucacccaccauagggcaugaucaacaccgcaaccuuuccuuuuucccccagugauucugaaaaaccccucuucccuucagcuugcuuagauguuccaaauuuaguaagcuuaaggcggccuacagaagaaaaagaaaaaaaaggccacaaaaguucccucucacuuucaguaaauaaaauaaaagcagcaacagaaauaaagaaauaaaugaaauucaaaaugaaauaaauauuguguugugcagcauuaaaaaaucaauaaaaauuaaaaaugagcaagaucuaaaaaaaaaaaaaaaaaaaaaaaaaaaaaaaaaaaaaaaaaaaaaaaaaaaaaaaaaaaaaaaaugcaucccccccccccccccccccccccccccccccaaaggcucuuuucagagccaccagaauu

SEQ ID NO: 3335 - RNA, 2193 nt, Artificial Sequence
  mRNA product Design f-1 comprising derived and/or modified sequence from HRSV(A2)__F_DSCav1_mut3 (opt6)
gggagagcggcucggccauuuugucccagucaguccggaggcugcggcugcagaaguaccgccugcggaguaacugcaaagaagcuuaccauggaauuacucauacuaaaagccaaugccauaaccacuauucuaacagcaguaacauucuguuucgccucaggacaaaacauaacagaagaauuuuaucaauccaccuguuccgcagucucgaaaggcuaccuuggcgcacuaagaaccggaugguauacaucaguaauaaccauugaacuaucaaauaucaaagaaauaaaaugcaacggaacugacgcaaaagucaaacuaauaaaacaagaauuagacaaauacaaaaacgccguuacagacuuacaacuacuaaugcaaucaacuccagcaacaggaucaggaucugcuauaugcucaggugucgccguauguaaaguguuacaccucgaaggcgaaguaaacaaaauaaaaucagcacuacuauccacaaauaaagcaguaguaucacuauccaaugguguaucaguacucacauucaaaguacuagacuuaaaaaauuauauagauaaacaauuacuaccaauauuaaacaaacaaucaugcucaauaccaaacauagaaaccgucauugaauuucaacaaaaaaacaaucgacuucuugaaauaacacgagaauuuucaguaaaugccggaguaacaaccccagucucaacauacauguuaaccaacucugaacuccuaagccuaaucaacgacaugcccauaacuaacgaccaaaaaaaacuaauguccaauaauguccaaauaguaagacaacaauccuacucaauaaugugcauuauaaaagaagaaguccucgccuauguaguacaacuacccuuauacggaguaauugacacaccauguuggaaacuacauacaucaccacuaugcaccacuaacacaaaagaaggcuccaacauaugccuaacccgaacagaucgcggaugguauugcgacaacgcaggaaguguauccuucuuuccacaagcagaaacaugcaaaguacaauccaacagaguauucugugacaccaugaacucucuaacacuaccuuccgaaguaaauuuaugcaacguagacauauuuaaucccaaauacgacuguaaaauaaugaccucaaaaacugaugucucaucaucagucauuacaucacucggagcaauagucaguugcuauggaaaaaccaaaugcacagcuaguaacaaaaacagggguauaauaaaaacauuuucaaacggaugcgauuacguaucaaauaaaggaguagacaccguauccguaggaaauacucucuacugcguaaacaaacaagaaggacaaucccuauacguaaaaggcgaaccaaucauuaacuuuuacgacccacuuguauuuccaucagacgaauuugaugccucaauaucccaagucaaugaaaaaauaaaccaaagucuagcauucauccgaaaaucagaugaacuuuuacacaacguaaacgccggaaaaucaacaacaaacaucaugaucacaacaaucaucauaguaauaauaguuauacuacuuuccuuaauagcagucggccuacuacucuacugcaaagcacgauccacaccaguaaccuuaucuaaagaccaacucucaggcauaaacaacauagcauucucaaacuaaggacuagugaagggaacacccaaauuuaauucagccuuaagcacaauuaauuaagagugaaacguaauuguacaagcaguuggucacccaccauagggcaugaucaacaccgcaaccuuuccuuuuucccccagugauucugaaaaaccccucuucccuucagcuugcuuagauguuccaaauuuaguaagcuuaaggcggccuacagaagaaaaagaaaaaaaaggccacaaaaguucccucucacuuucaguaaauaaaauaaaagcagcaacagaaauaaagaaauaaaugaaauucaaaaugaaauaaauauuguguugugcagcauuaaaaaaucaauaaaaauuaaaaaugagcaagaucuaaaaaaaaaaaaaaaaaaaaaaaaaaaaaaaaaaaaaaaaaaaaaaaaaaaaaaaaaaaaaaaaugcaucccccccccccccccccccccccccccccccaaaggcucuuuucagagccaccagaauu

SEQ ID NO: 3336 - RNA, 2193 nt, Artificial Sequence
  mRNA product Design f-1 comprising derived and/or modified sequence from HRSV(A2)__F_DSCav1_mut3 (opt11)
gggagagcggcucggccauuuugucccagucaguccggaggcugcggcugcagaaguaccgccugcggaguaacugcaaagaagcuuaccauggaacuccucauccuuaaagcaaacgccaucacaaccauccucacagcagucacuuucugcuucgcauccggacaaaacaucacagaagaguucuaucaauccacgugcuccgcaguuuccaaaggauaccuuggagccuuacgaaccggcugguacaccuccgucaucaccauagaacucagcaacaucaaagaaaucaaaugcaacggaaccgacgcaaaagucaaacucaucaaacaagaacuagacaaauacaaaaacgcagucaccgaccuccaacuacucaugcaaucaacccccgcaaccggcuccggcuccgccaucugcuccggaguagccguaugcaaaguccuccaccucgaaggcgaaguuaacaagaucaaguccgcacuccuaucaaccaacaaagcagucgucucccuauccaacggcgucuccguauuaacauucaaaguccucgaccucaaaaacuacauagacaaacagcuacuccccauccuaaacaaacaauccugcuccauccccaacaucgaaacugucaucgaguuccaacagaaaaacaaccgccuccuagaaaucacccgagaguucuccguaaacgccggcgucacuacccccgucucuaccuauaugcuaaccaacucugaacuccuaucccuaaucaacgauaugcccauaacuaacgaccaaaagaaacuuauguccaacaacguacaaauaguccggcaacaaucauacucuaucaugugcaucaucaaagaagaaguacuugccuacguuguccaacucccacuauacggcgucauagacacuccaugcuggaaacuucacaccucaccccucugcaccacuaacacuaaagaaggcucuaacaucugccuuacccgcaccgaccgcggaugguacugcgacaacgcaggcucaguuagcuucuucccacaagccgaaaccugcaaaguccagucaaaccgugucuucugcgauaccaugaacucgcucacccucccuuccgaagucaaccucugcaacgucgacaucuucaaccccaaauacgacugcaaaaucaugaccucaaaaaccgacguaucuucuuccgucaucaccucccucggcgccaucguauccugcuacggcaaaaccaaaugcacugcaucaaacaaaaaccgaggcaucaucaaaaccuucucgaacggaugcgacuacguauccaacaagggcgucgacacagucuccguugguaacacccucuacugcgucaacaaacaagaaggccaaucccuauacguaaaaggcgaacccaucaucaacuucuacgacccccucgucuuccccagugacgaauuugacgccuccaucucccaagucaacgaaaagaucaaccaaucccuugccuucauacgcaaauccgacgaacuccuacacaacguuaacgccggaaaaucaacaaccaacaucaugaucacaaccaucauaaucgucauaaucgucauacuccucucccucauagccgucggccugcuauuguacuguaaagcccgcuccacaccagucacacuuucaaaagaccaacucuccgggaucaacaacaucgccuucuccaacuaaggacuagugaagggaacacccaaauuuaauucagccuuaagcacaauuaauuaagagugaaacguaauuguacaagcaguuggucacccaccauagggcaugaucaacaccgcaaccuuuccuuuuucccccagugauucugaaaaaccccucuucccuucagcuugcuuagauguuccaaauuuaguaagcuuaaggcggccuacagaagaaaaagaaaaaaaaggccacaaaaguucccucucacuuucaguaaauaaaauaaaagcagcaacagaaauaaagaaauaaaugaaauucaaaaugaaauaaauauuguguugugcagcauuaaaaaaucaauaaaaauuaaaaaugagcaagaucuaaaaaaaaaaaaaaaaaaaaaaaaaaaaaaaaaaaaaaaaaaaaaaaaaaaaaaaaaaaaaaaaugcaucccccccccccccccccccccccccccccccaaaggcucuuuucagagccaccagaauu

SEQ ID NO: 3337 - RNA, 1973 nt, Artificial Sequence
  mRNA product Design f-2 comprising derived and/or modified sequence from HRSV(A2)__F_DSCav1_mut3 (opt1)
gggagagcggcucggccauuuugucccagucaguccggaggcugcggcugcagaaguaccgccugcggaguaacugcaaagaagcuuaccauggagcugcucauccugaaggccaacgccaucaccaccauccugacggcggugaccuucugcuucgccagcggccagaacaucaccgaggaguucuaccaguccacgugcagcgccgucuccaagggguaccucggcgcccugcggaccggcugguacaccuccgugaucaccaucgagcugagcaacaucaaggagaucaagugcaacgggaccgacgccaaggugaagcucaucaagcaggagcuggacaaguacaagaacgcggucacggaccugcagcuccugaugcaguccaccccggcaaccggcuccggcuccgccaucugcagcggcgucgccgugugcaaggugcugcaccucgagggggaggucaacaagaucaagagcgcccugcuguccaccaacaaggccguggugagccucuccaacggcgucagcgugcugaccuucaaggugcuggaccucaagaacuacaucgacaagcagcugcugcccauccugaacaagcagagcugcuccauccccaacaucgagacggugaucgaguuccagcagaagaacaaccggcuccuggagaucacccgcgaguucagcgugaacgccggggucaccacccccguguccacguacaugcugaccaacagcgagcuccugucccugaucaacgacaugccgaucaccaacgaccagaagaagcucaugagcaacaacgugcagaucguccggcagcaguccuacagcaucaugugcaucaucaaggaggaggugcuggcguacgugguccagcugccccucuacggcgugaucgacacccccugcuggaagcugcacacgagcccccugugcaccaccaacaccaaggagggguccaacaucugccucacgcgcaccgaccggggcugguacugcgacaacgccggcagcgucuccuucuucccgcaggccgagaccugcaaggugcagagcaaccgcguguucugcgacaccaugaacucccugacgcugcccagcgagguaaaccucugcaacgucgacaucuucaaccccaaguacgacugcaagaucaugaccuccaagaccgacgugagcuccagcgugaucaccucccugggggccaucgucagcugcuacggcaagacgaagugcaccgccagcaacaagaaccgggggaucaucaagaccuucuccaacggcugcgacuacgugagcaacaagggcguggacaccguguccgucgggaacacccuguacugcgugaacaagcaggagggccagagccucuacgugaagggggagcccaucaucaacuucuacgacccgcuggucuuccccuccgacgaguucgacgcgagcaucucccaggugaacgagaagaucaaccagagccuggccuucauccgcaaguccgacgagcugcuccacaacgugaacgccggcaagagcacgaccaacaucaugaucaccaccaucaucaucgucaucaucgugauccugcugucccucaucgccguggggcugcugcucuacugcaaggcccggagcacgcccgucacccuguccaaggaccagcugagcggcaucaacaacaucgcguucuccaacugaggacuaguggaagcauuuuccuggcugauuaaaagaaauuacucagcuauggucaucuguuccuguuagaaggcuaugcagcauauuauauacuaugcgcauguuaugaaaugcauaauaaaaaauuuuaaaaaaucuaaaagaucuaaaaaaaaaaaaaaaaaaaaaaaaaaaaaaaaaaaaaaaaaaaaaaaaaaaaaaaaaaaaaaaaugcaucccccccccccccccccccccccccccccccaaaggcucuuuucagagccaccagaauu

SEQ ID NO: 3338 - RNA, 1973 nt, Artificial Sequence
  mRNA product Design f-2 comprising derived and/or modified sequence from HRSV(A2)__F_DSCav1_mut3 (opt1)
gggagagcggcucggccauuuugucccagucaguccggaggcugcggcugcagaaguaccgccugcggaguaacugcaaagaagcuuaccauggagcugcucauccugaaggccaacgccaucaccaccauccugacggcggugaccuucugcuucgccagcggccagaacaucaccgaggaguucuaccaguccacgugcagcgccgucuccaagggguaccucggcgcccugcgcaccgggugguacaccagcgugaucaccaucgagcuguccaacaucaaggagaucaagugcaacggcaccgacgccaaggugaagcucaucaagcaggagcuggacaaguacaagaacgcggucacggaccugcagcuccugaugcagagcacccccgccaccggguccggcagcgccaucugcuccggcguggccgugugcaagguccugcaccucgagggggaggugaacaagaucaagagcgcgcugcuguccaccaacaaggccguggucagccucuccaacggcgugagcgugcugacguucaagguccuggaccucaagaacuacaucgacaagcagcugcugccgauccucaacaagcaguccugcagcauccccaacaucgagaccgugaucgaguuccagcagaagaacaaccggcugcuggagaucacccgcgaguucuccgugaacgccggggucaccacgcccgugagcaccuacaugcucaccaacuccgagcugcugagccucaucaacgacaugcccaucaccaacgaccagaagaagcugaugagcaacaacgugcagaucguccggcagcaguccuacagcaucaugugcaucaucaaggaggaggugcuggccuacgugguccagcucccgcuguacggcgugaucgacacgcccugcuggaagcugcacaccagcccccucugcaccaccaacacgaaggagggguccaacaucugccugacccgcaccgaccggggcugguacugcgacaacgccggcuccgugagcuucuucccccaggcggagaccugcaagguccaguccaaccgcguguucugcgacacgaugaacagccugacccucccguccgaggucaaccugugcaacguggacaucuucaaccccaaguacgacugcaagaucaugaccagcaagaccgacguguccagcuccgucaucacgagccugggggccaucguguccugcuacggcaagaccaagugcaccgccagcaacaagaaccgggggaucaucaagaccuucuccaacggcugcgacuacgugagcaacaagggcgucgacacgguguccguggggaacacccucuacugcgucaacaagcaggagggccagagccuguacgugaagggggagcccaucaucaacuucuacgacccccugguguucccgagcgacgaguucgacgccuccaucagccaggucaacgagaagaucaaccagucccucgccuucauccgcaagagcgacgagcugcugcacaacgugaacgcgggcaaguccaccaccaacaucaugaucaccacgaucaucaucgugaucaucgucauccuccugagccugaucgccguggggcuccugcuguacugcaaggcccgguccacccccgugacccugagcaaggaccagcucuccggcaucaacaacaucgccuucagcaacugaggacuaguggaagcauuuuccuggcugauuaaaagaaauuacucagcuauggucaucuguuccuguuagaaggcuaugcagcauauuauauacuaugcgcauguuaugaaaugcauaauaaaaaauuuuaaaaaaucuaaaagaucuaaaaaaaaaaaaaaaaaaaaaaaaaaaaaaaaaaaaaaaaaaaaaaaaaaaaaaaaaaaaaaaaugcaucccccccccccccccccccccccccccccccaaaggcucuuuucagagccaccagaauu

SEQ ID NO: 3339 - RNA, 1973 nt, Artificial Sequence
  mRNA product Design f-2 comprising derived and/or modified sequence from HRSV(A2)__F_DSCav1_mut3 (opt2)
gggagagcggcucggccauuuugucccagucaguccggaggcugcggcugcagaaguaccgccugcggaguaacugcaaagaagcuuaccauggagcuccucauccucaaggccaacgccaucaccaccauccucaccgccgucaccuucugcuucgccuccggccagaacaucaccgaggaguucuaccaguccaccugcuccgccgucuccaagggcuaccucggcgcccuccgcaccggcugguacaccuccgucaucaccaucgagcucuccaacaucaaggagaucaagugcaacggcaccgacgccaaggucaagcucaucaagcaggagcucgacaaguacaagaacgccgucaccgaccuccagcuccucaugcaguccacccccgccaccggcuccggcuccgccaucugcuccggcgucgccgucugcaagguccuccaccucgagggcgaggucaacaagaucaaguccgcccuccucuccaccaacaaggccgucgucucccucuccaacggcgucuccguccucaccuucaagguccucgaccucaagaacuacaucgacaagcagcuccuccccauccucaacaagcaguccugcuccauccccaacaucgagaccgucaucgaguuccagcagaagaacaaccgccuccucgagaucacccgcgaguucuccgucaacgccggcgucaccacccccgucuccaccuacaugcucaccaacuccgagcuccucucccucaucaacgacaugcccaucaccaacgaccagaagaagcucauguccaacaacguccagaucguccgccagcaguccuacuccaucaugugcaucaucaaggaggagguccucgccuacgucguccagcucccccucuacggcgucaucgacacccccugcuggaagcuccacaccuccccccucugcaccaccaacaccaaggagggcuccaacaucugccucacccgcaccgaccgcggcugguacugcgacaacgccggcuccgucuccuucuucccccaggccgagaccugcaagguccaguccaaccgcgucuucugcgacaccaugaacucccucacccuccccuccgaggucaaccucugcaacgucgacaucuucaaccccaaguacgacugcaagaucaugaccuccaagaccgacgucuccuccuccgucaucaccucccucggcgccaucgucuccugcuacggcaagaccaagugcaccgccuccaacaagaaccgcggcaucaucaagaccuucuccaacggcugcgacuacgucuccaacaagggcgucgacaccgucuccgucggcaacacccucuacugcgucaacaagcaggagggccagucccucuacgucaagggcgagcccaucaucaacuucuacgacccccucgucuuccccuccgacgaguucgacgccuccaucucccaggucaacgagaagaucaaccagucccucgccuucauccgcaaguccgacgagcuccuccacaacgucaacgccggcaaguccaccaccaacaucaugaucaccaccaucaucaucgucaucaucgucauccuccucucccucaucgccgucggccuccuccucuacugcaaggcccgcuccacccccgucacccucuccaaggaccagcucuccggcaucaacaacaucgccuucuccaacugaggacuaguggaagcauuuuccuggcugauuaaaagaaauuacucagcuauggucaucuguuccuguuagaaggcuaugcagcauauuauauacuaugcgcauguuaugaaaugcauaauaaaaaauuuuaaaaaaucuaaaagaucuaaaaaaaaaaaaaaaaaaaaaaaaaaaaaaaaaaaaaaaaaaaaaaaaaaaaaaaaaaaaaaaaugcaucccccccccccccccccccccccccccccccaaaggcucuuuucagagccaccagaauu

SEQ ID NO: 3340 - RNA, 1973 nt, Artificial Sequence
  mRNA product Design f-2 comprising derived and/or modified sequence from HRSV(A2)__F_DSCav1_mut3 (opt3)
gggagagcggcucggccauuuugucccagucaguccggaggcugcggcugcagaaguaccgccugcggaguaacugcaaagaagcuuaccauggagcugcucauccuuaaggccaacgcuauuaccacaauacugacugcagugacguucugcuuugccagcggccagaauaucaccgaagaguucuaccaauccacauguucugcggucucaaaaggguauuugggagcuuuaagaacugguugguacaccaguguuauuacaaucgaacugagcaacauuaaggagaucaaaugcaauggcaccgacgccaaggugaaacuaauaaagcaggaacucgauaaguauaaaaacgcaguaacugaccugcagcuucugaugcaguccacacccgccaccgggucuggaucggcuaucuguucaggcguggcagucugcaagguguugcaccucgagggugagguuaauaaaauuaagagcgcccugcugaguacgaacaaagcuguggucucccucucuaauggggugagcguauuaacuuuuaagguucuggaucuuaagaacuacaucgacaaacaauugcugccuauucuaaauaagcaguccuguucaaucccaaacauagaaaccgugauugaguuccagcagaaaaauaacaggcuccuggaaaucacacgggaguuuagugucaaugccggagugacuaccccggugagcacauauaugcuuaccaacucugagcuguugucccucauuaaugauaugcccaucacgaacgaccaaaagaaacugaugucaaacaauguccagaucguucgccagcagagcuacaguauuaugugcauaaucaaggaagagguguuagcguauguagugcaacugccucucuacggcgucauugauacuccauguuggaaacuucauacaucuccccugugcaccacuaacacaaaggaaggcuccaauaucuguuugacccgaacggaccgugggugguacugcgauaacgcaggaagcgugucguucuuuccucaggccgagaccuguaagguucagucuaauagaguguucugcgacacaaugaacucccuaacucugccaucagaagucaaucucugcaacguggauauauuuaaucccaaauaugacuguaagauuaugaccaguaaaacagauguaagcuccucuguuaucacuagccugggugcuaucgugucaugcuacggcaagaccaaauguacagccaguaacaagaauagggggauuaucaagaccuucuccaacggaugcgacuaugucagcaauaaaggcguggacacugucucuguggguaacacgcuuuacuguguuaauaagcaagaggggcagucacuguaugugaaaggagagccuauuauaaacuuuuacgauccauugguauucccgagugacgaauuugaugcaagcaucucccaggucaacgagaagauuaaucagucucucgcuuucauccggaaaucggacgaacuguuacacaacgugaaugccggcaagagcacaaccaacaucaugauuacuaccauaaucauuguuaucauugugauccugcuaucccucauagcggucggccugcuuuuguauugcaaggcccgcucaacacccgugacccugaguaaagaucaacucucugggaucaauaacauugcauucagcaauugaggacuaguggaagcauuuuccuggcugauuaaaagaaauuacucagcuauggucaucuguuccuguuagaaggcuaugcagcauauuauauacuaugcgcauguuaugaaaugcauaauaaaaaauuuuaaaaaaucuaaaagaucuaaaaaaaaaaaaaaaaaaaaaaaaaaaaaaaaaaaaaaaaaaaaaaaaaaaaaaaaaaaaaaaaugcaucccccccccccccccccccccccccccccccaaaggcucuuuucagagccaccagaauu

SEQ ID NO: 3341 - RNA, 1973 nt, Artificial Sequence
  mRNA product Design f-2 comprising derived and/or modified sequence from HRSV(A2)__F_DSCav1_mut3 (opt4)
gggagagcggcucggccauuuugucccagucaguccggaggcugcggcugcagaaguaccgccugcggaguaacugcaaagaagcuuaccauggagcugcugauccugaaggccaacgccaucaccaccauccugaccgccgugaccuucugcuucgccagcggccagaacaucaccgaggaguucuaccagagcaccugcagcgccgugagcaagggcuaccugggcgcccugagaaccggcugguacaccagcgugaucaccaucgagcugagcaacaucaaggagaucaagugcaacggcaccgacgccaaggugaagcugaucaagcaggagcuggacaaguacaagaacgccgugaccgaccugcagcugcugaugcagagcacccccgccaccggcagcggcagcgccaucugcagcggcguggccgugugcaaggugcugcaccuggagggcgaggugaacaagaucaagagcgcccugcugagcaccaacaaggccguggugagccugagcaacggcgugagcgugcugaccuucaaggugcuggaccugaagaacuacaucgacaagcagcugcugcccauccugaacaagcagagcugcagcauccccaacaucgagaccgugaucgaguuccagcagaagaacaacagacugcuggagaucaccagagaguucagcgugaacgccggcgugaccacccccgugagcaccuacaugcugaccaacagcgagcugcugagccugaucaacgacaugcccaucaccaacgaccagaagaagcugaugagcaacaacgugcagaucgugagacagcagagcuacagcaucaugugcaucaucaaggaggaggugcuggccuacguggugcagcugccccuguacggcgugaucgacacccccugcuggaagcugcacaccagcccccugugcaccaccaacaccaaggagggcagcaacaucugccugaccagaaccgacagaggcugguacugcgacaacgccggcagcgugagcuucuucccccaggccgagaccugcaaggugcagagcaacagaguguucugcgacaccaugaacagccugacccugcccagcgaggugaaccugugcaacguggacaucuucaaccccaaguacgacugcaagaucaugaccagcaagaccgacgugagcagcagcgugaucaccagccugggcgccaucgugagcugcuacggcaagaccaagugcaccgccagcaacaagaacagaggcaucaucaagaccuucagcaacggcugcgacuacgugagcaacaagggcguggacaccgugagcgugggcaacacccuguacugcgugaacaagcaggagggccagagccuguacgugaagggcgagcccaucaucaacuucuacgacccccugguguuccccagcgacgaguucgacgccagcaucagccaggugaacgagaagaucaaccagagccuggccuucaucagaaagagcgacgagcugcugcacaacgugaacgccggcaagagcaccaccaacaucaugaucaccaccaucaucaucgugaucaucgugauccugcugagccugaucgccgugggccugcugcuguacugcaaggccagaagcacccccgugacccugagcaaggaccagcugagcggcaucaacaacaucgccuucagcaacugaggacuaguggaagcauuuuccuggcugauuaaaagaaauuacucagcuauggucaucuguuccuguuagaaggcuaugcagcauauuauauacuaugcgcauguuaugaaaugcauaauaaaaaauuuuaaaaaaucuaaaagaucuaaaaaaaaaaaaaaaaaaaaaaaaaaaaaaaaaaaaaaaaaaaaaaaaaaaaaaaaaaaaaaaaugcaucccccccccccccccccccccccccccccccaaaggcucuuuucagagccaccagaauu

SEQ ID NO: 3342 - RNA, 1973 nt, Artificial Sequence
  mRNA product Design f-2 comprising derived and/or modified sequence from HRSV(A2)__F_DSCav1_mut3 (opt5)
gggagagcggcucggccauuuugucccagucaguccggaggcugcggcugcagaaguaccgccugcggaguaacugcaaagaagcuuaccauggagcugcucauccugaaggccaacgcuauuaccacaauccuuacggccgugaccuucugcuuugcgagcggccagaauauuacagaagaguucuaccaauccaccuguucugcugucagcaaaggguaucugggagcccucagaacaggcugguacaccuccguuaucacaauugaacugucuaacaucaaggagaucaaaugcaaugggaccgacgccaaggugaaacuuauuaagcaggaacuggauaaguauaaaaacgcugugacggaccuccagcugcugaugcagagcacccccgccacaggauccggcucugcuaucuguagcggggucgccgugugcaagguucuccaccuggagggagaggugaauaaaauuaaguccgcgcuucugagcaccaacaaagccgucgugucucucuccaauggcguuagcgugcugacauuuaagguccuugaucugaagaacuacaucgacaaacaacuccugccuauucugaauaagcagucuuguuccaucccgaacauugaaaccgugaucgaguuccagcagaaaaauaaccggcuccuggaaaucacgcgcgaguuuagcgugaaugcuggcgucacaacccccguuucuacauauaugcuuaccaacuccgagcugcucagccugauuaaugauaugccuaucaccaacgaccaaaagaaacuuauguccaacaaugugcagauugugagacagcagucuuacagcaucaugugcauuaucaaggaagagguccuggccuaugugguucaacucccccuguacggggugaucgauacaccuuguuggaaacugcauacgagcccccucugcaccacaaacaccaaggaaggauccaauauuugucugacacggaccgaccgcggcugguacugcgauaacgcugggucugucuccuucuuuccucaggccgagacguguaaggugcagagcaauagaguuuucugcgacacaaugaacucucuuacccugccgagcgaagugaaucucugcaacgucgauaucuuuaaucccaaauaugacuguaagauuaugaccuccaaaacagaugugucuagcuccgucaucaccagccugggagcgauugugucuugcuacggcaagacaaaauguacggccuccaacaagaaucgggggaucaucaagaccuucagcaacggaugcgacuauguuucuaauaaaggcguggacacagucuccgugggcaacacccuuuacuguguuaauaagcaagaggggcagagccuguaugugaaaggagagccuauuaucaacuuuuacgauccccucgucuucccuuccgacgaauuugaugcuucuauuagccaggugaacgagaagaucaaucagucccuggccuucauucgcaaaucugacgaacugcuccacaacgugaaugcuggcaagagcacaaccaacaucaugauuacgaccaucaucauuguuaucauugucauccugcuuucccugauugccguggggcuccugcuguauugcaaggccagaagcacacccgugacccuuucuaaagaucaacucuccggaaucaauaacaucgcuuucagcaauugaggacuaguggaagcauuuuccuggcugauuaaaagaaauuacucagcuauggucaucuguuccuguuagaaggcuaugcagcauauuauauacuaugcgcauguuaugaaaugcauaauaaaaaauuuuaaaaaaucuaaaagaucuaaaaaaaaaaaaaaaaaaaaaaaaaaaaaaaaaaaaaaaaaaaaaaaaaaaaaaaaaaaaaaaaugcaucccccccccccccccccccccccccccccccaaaggcucuuuucagagccaccagaauu

SEQ ID NO: 3343 - RNA, 1973 nt, Artificial Sequence
  mRNA product Design f-2 comprising derived and/or modified sequence from HRSV(A2)__F_DSCav1_mut3 (opt6)
gggagagcggcucggccauuuugucccagucaguccggaggcugcggcugcagaaguaccgccugcggaguaacugcaaagaagcuuaccauggaauuacucauacuaaaagccaaugccauaaccacuauucuaacagcaguaacauucuguuucgccucaggacaaaacauaacagaagaauuuuaucaauccaccuguuccgcagucucgaaaggcuaccuuggcgcacuaagaaccggaugguauacaucaguaauaaccauugaacuaucaaauaucaaagaaauaaaaugcaacggaacugacgcaaaagucaaacuaauaaaacaagaauuagacaaauacaaaaacgccguuacagacuuacaacuacuaaugcaaucaacuccagcaacaggaucaggaucugcuauaugcucaggugucgccguauguaaaguguuacaccucgaaggcgaaguaaacaaaauaaaaucagcacuacuauccacaaauaaagcaguaguaucacuauccaaugguguaucaguacucacauucaaaguacuagacuuaaaaaauuauauagauaaacaauuacuaccaauauuaaacaaacaaucaugcucaauaccaaacauagaaaccgucauugaauuucaacaaaaaaacaaucgacuucuugaaauaacacgagaauuuucaguaaaugccggaguaacaaccccagucucaacauacauguuaaccaacucugaacuccuaagccuaaucaacgacaugcccauaacuaacgaccaaaaaaaacuaauguccaauaauguccaaauaguaagacaacaauccuacucaauaaugugcauuauaaaagaagaaguccucgccuauguaguacaacuacccuuauacggaguaauugacacaccauguuggaaacuacauacaucaccacuaugcaccacuaacacaaaagaaggcuccaacauaugccuaacccgaacagaucgcggaugguauugcgacaacgcaggaaguguauccuucuuuccacaagcagaaacaugcaaaguacaauccaacagaguauucugugacaccaugaacucucuaacacuaccuuccgaaguaaauuuaugcaacguagacauauuuaaucccaaauacgacuguaaaauaaugaccucaaaaacugaugucucaucaucagucauuacaucacucggagcaauagucaguugcuauggaaaaaccaaaugcacagcuaguaacaaaaacagggguauaauaaaaacauuuucaaacggaugcgauuacguaucaaauaaaggaguagacaccguauccguaggaaauacucucuacugcguaaacaaacaagaaggacaaucccuauacguaaaaggcgaaccaaucauuaacuuuuacgacccacuuguauuuccaucagacgaauuugaugccucaauaucccaagucaaugaaaaaauaaaccaaagucuagcauucauccgaaaaucagaugaacuuuuacacaacguaaacgccggaaaaucaacaacaaacaucaugaucacaacaaucaucauaguaauaauaguuauacuacuuuccuuaauagcagucggccuacuacucuacugcaaagcacgauccacaccaguaaccuuaucuaaagaccaacucucaggcauaaacaacauagcauucucaaacuaaggacuaguggaagcauuuuccuggcugauuaaaagaaauuacucagcuauggucaucuguuccuguuagaaggcuaugcagcauauuauauacuaugcgcauguuaugaaaugcauaauaaaaaauuuuaaaaaaucuaaaagaucuaaaaaaaaaaaaaaaaaaaaaaaaaaaaaaaaaaaaaaaaaaaaaaaaaaaaaaaaaaaaaaaaugcaucccccccccccccccccccccccccccccccaaaggcucuuuucagagccaccagaauu

SEQ ID NO: 3344 - RNA, 1973 nt, Artificial Sequence
  mRNA product Design f-2 comprising derived and/or modified sequence from HRSV(A2)__F_DSCav1_mut3 (opt11)
gggagagcggcucggccauuuugucccagucaguccggaggcugcggcugcagaaguaccgccugcggaguaacugcaaagaagcuuaccauggaacuccucauccuuaaagcaaacgccaucacaaccauccucacagcagucacuuucugcuucgcauccggacaaaacaucacagaagaguucuaucaauccacgugcuccgcaguuuccaaaggauaccuuggagccuuacgaaccggcugguacaccuccgucaucaccauagaacucagcaacaucaaagaaaucaaaugcaacggaaccgacgcaaaagucaaacucaucaaacaagaacuagacaaauacaaaaacgcagucaccgaccuccaacuacucaugcaaucaacccccgcaaccggcuccggcuccgccaucugcuccggaguagccguaugcaaaguccuccaccucgaaggcgaaguuaacaagaucaaguccgcacuccuaucaaccaacaaagcagucgucucccuauccaacggcgucuccguauuaacauucaaaguccucgaccucaaaaacuacauagacaaacagcuacuccccauccuaaacaaacaauccugcuccauccccaacaucgaaacugucaucgaguuccaacagaaaaacaaccgccuccuagaaaucacccgagaguucuccguaaacgccggcgucacuacccccgucucuaccuauaugcuaaccaacucugaacuccuaucccuaaucaacgauaugcccauaacuaacgaccaaaagaaacuuauguccaacaacguacaaauaguccggcaacaaucauacucuaucaugugcaucaucaaagaagaaguacuugccuacguuguccaacucccacuauacggcgucauagacacuccaugcuggaaacuucacaccucaccccucugcaccacuaacacuaaagaaggcucuaacaucugccuuacccgcaccgaccgcggaugguacugcgacaacgcaggcucaguuagcuucuucccacaagccgaaaccugcaaaguccagucaaaccgugucuucugcgauaccaugaacucgcucacccucccuuccgaagucaaccucugcaacgucgacaucuucaaccccaaauacgacugcaaaaucaugaccucaaaaaccgacguaucuucuuccgucaucaccucccucggcgccaucguauccugcuacggcaaaaccaaaugcacugcaucaaacaaaaaccgaggcaucaucaaaaccuucucgaacggaugcgacuacguauccaacaagggcgucgacacagucuccguugguaacacccucuacugcgucaacaaacaagaaggccaaucccuauacguaaaaggcgaacccaucaucaacuucuacgacccccucgucuuccccagugacgaauuugacgccuccaucucccaagucaacgaaaagaucaaccaaucccuugccuucauacgcaaauccgacgaacuccuacacaacguuaacgccggaaaaucaacaaccaacaucaugaucacaaccaucauaaucgucauaaucgucauacuccucucccucauagccgucggccugcuauuguacuguaaagcccgcuccacaccagucacacuuucaaaagaccaacucuccgggaucaacaacaucgccuucuccaacuaaggacuaguggaagcauuuuccuggcugauuaaaagaaauuacucagcuauggucaucuguuccuguuagaaggcuaugcagcauauuauauacuaugcgcauguuaugaaaugcauaauaaaaaauuuuaaaaaaucuaaaagaucuaaaaaaaaaaaaaaaaaaaaaaaaaaaaaaaaaaaaaaaaaaaaaaaaaaaaaaaaaaaaaaaaugcaucccccccccccccccccccccccccccccccaaaggcucuuuucagagccaccagaauu

SEQ ID NO: 3345 - RNA, 1964 nt, Artificial Sequence
  mRNA product Design f-3 comprising derived and/or modified sequence from HRSV(A2)__F_DSCav1_mut3 (opt1)
gggagagucccgcagucggcguccagcggcucugcuuguucgugugugugucguugcaggccuuauucaagcuuaccauggagcugcucauccugaaggccaacgccaucaccaccauccugacggcggugaccuucugcuucgccagcggccagaacaucaccgaggaguucuaccaguccacgugcagcgccgucuccaagggguaccucggcgcccugcggaccggcugguacaccuccgugaucaccaucgagcugagcaacaucaaggagaucaagugcaacgggaccgacgccaaggugaagcucaucaagcaggagcuggacaaguacaagaacgcggucacggaccugcagcuccugaugcaguccaccccggcaaccggcuccggcuccgccaucugcagcggcgucgccgugugcaaggugcugcaccucgagggggaggucaacaagaucaagagcgcccugcuguccaccaacaaggccguggugagccucuccaacggcgucagcgugcugaccuucaaggugcuggaccucaagaacuacaucgacaagcagcugcugcccauccugaacaagcagagcugcuccauccccaacaucgagacggugaucgaguuccagcagaagaacaaccggcuccuggagaucacccgcgaguucagcgugaacgccggggucaccacccccguguccacguacaugcugaccaacagcgagcuccugucccugaucaacgacaugccgaucaccaacgaccagaagaagcucaugagcaacaacgugcagaucguccggcagcaguccuacagcaucaugugcaucaucaaggaggaggugcuggcguacgugguccagcugccccucuacggcgugaucgacacccccugcuggaagcugcacacgagcccccugugcaccaccaacaccaaggagggguccaacaucugccucacgcgcaccgaccggggcugguacugcgacaacgccggcagcgucuccuucuucccgcaggccgagaccugcaaggugcagagcaaccgcguguucugcgacaccaugaacucccugacgcugcccagcgagguaaaccucugcaacgucgacaucuucaaccccaaguacgacugcaagaucaugaccuccaagaccgacgugagcuccagcgugaucaccucccugggggccaucgucagcugcuacggcaagacgaagugcaccgccagcaacaagaaccgggggaucaucaagaccuucuccaacggcugcgacuacgugagcaacaagggcguggacaccguguccgucgggaacacccuguacugcgugaacaagcaggagggccagagccucuacgugaagggggagcccaucaucaacuucuacgacccgcuggucuuccccuccgacgaguucgacgcgagcaucucccaggugaacgagaagaucaaccagagccuggccuucauccgcaaguccgacgagcugcuccacaacgugaacgccggcaagagcacgaccaacaucaugaucaccaccaucaucaucgucaucaucgugauccugcugucccucaucgccguggggcugcugcucuacugcaaggcccggagcacgcccgucacccuguccaaggaccagcugagcggcaucaacaacaucgcguucuccaacugaggacuaguacuggcugcaucucccuuuccucuguccuccauccuucucccaggauggugaagggggaccugguacccagugauccccaccccaggauccuaaaucaugacuuaccugcuaauaaaaacucauuggaaaagugagaagaucuaaaaaaaaaaaaaaaaaaaaaaaaaaaaaaaaaaaaaaaaaaaaaaaaaaaaaaaaaaaaaaaaugcaucccccccccccccccccccccccccccccccaaaggcucuuuucagagccaccagaauu

SEQ ID NO: 3346 - RNA, 1964 nt, Artificial Sequence
  mRNA product Design f-3 comprising derived and/or modified sequence from HRSV(A2)__F_DSCav1_mut3 (opt1)
gggagagucccgcagucggcguccagcggcucugcuuguucgugugugugucguugcaggccuuauucaagcuuaccauggagcugcucauccugaaggccaacgccaucaccaccauccugacggcggugaccuucugcuucgccagcggccagaacaucaccgaggaguucuaccaguccacgugcagcgccgucuccaagggguaccucggcgcccugcgcaccgggugguacaccagcgugaucaccaucgagcuguccaacaucaaggagaucaagugcaacggcaccgacgccaaggugaagcucaucaagcaggagcuggacaaguacaagaacgcggucacggaccugcagcuccugaugcagagcacccccgccaccggguccggcagcgccaucugcuccggcguggccgugugcaagguccugcaccucgagggggaggugaacaagaucaagagcgcgcugcuguccaccaacaaggccguggucagccucuccaacggcgugagcgugcugacguucaagguccuggaccucaagaacuacaucgacaagcagcugcugccgauccucaacaagcaguccugcagcauccccaacaucgagaccgugaucgaguuccagcagaagaacaaccggcugcuggagaucacccgcgaguucuccgugaacgccggggucaccacgcccgugagcaccuacaugcucaccaacuccgagcugcugagccucaucaacgacaugcccaucaccaacgaccagaagaagcugaugagcaacaacgugcagaucguccggcagcaguccuacagcaucaugugcaucaucaaggaggaggugcuggccuacgugguccagcucccgcuguacggcgugaucgacacgcccugcuggaagcugcacaccagcccccucugcaccaccaacacgaaggagggguccaacaucugccugacccgcaccgaccggggcugguacugcgacaacgccggcuccgugagcuucuucccccaggcggagaccugcaagguccaguccaaccgcguguucugcgacacgaugaacagccugacccucccguccgaggucaaccugugcaacguggacaucuucaaccccaaguacgacugcaagaucaugaccagcaagaccgacguguccagcuccgucaucacgagccugggggccaucguguccugcuacggcaagaccaagugcaccgccagcaacaagaaccgggggaucaucaagaccuucuccaacggcugcgacuacgugagcaacaagggcgucgacacgguguccguggggaacacccucuacugcgucaacaagcaggagggccagagccuguacgugaagggggagcccaucaucaacuucuacgacccccugguguucccgagcgacgaguucgacgccuccaucagccaggucaacgagaagaucaaccagucccucgccuucauccgcaagagcgacgagcugcugcacaacgugaacgcgggcaaguccaccaccaacaucaugaucaccacgaucaucaucgugaucaucgucauccuccugagccugaucgccguggggcuccugcuguacugcaaggcccgguccacccccgugacccugagcaaggaccagcucuccggcaucaacaacaucgccuucagcaacugaggacuaguacuggcugcaucucccuuuccucuguccuccauccuucucccaggauggugaagggggaccugguacccagugauccccaccccaggauccuaaaucaugacuuaccugcuaauaaaaacucauuggaaaagugagaagaucuaaaaaaaaaaaaaaaaaaaaaaaaaaaaaaaaaaaaaaaaaaaaaaaaaaaaaaaaaaaaaaaaugcaucccccccccccccccccccccccccccccccaaaggcucuuuucagagccaccagaauu

SEQ ID NO: 3347 - RNA, 1964 nt, Artificial Sequence
  mRNA product Design f-3 comprising derived and/or modified sequence from HRSV(A2)__F_DSCav1_mut3 (opt2)
gggagagucccgcagucggcguccagcggcucugcuuguucgugugugugucguugcaggccuuauucaagcuuaccauggagcuccucauccucaaggccaacgccaucaccaccauccucaccgccgucaccuucugcuucgccuccggccagaacaucaccgaggaguucuaccaguccaccugcuccgccgucuccaagggcuaccucggcgcccuccgcaccggcugguacaccuccgucaucaccaucgagcucuccaacaucaaggagaucaagugcaacggcaccgacgccaaggucaagcucaucaagcaggagcucgacaaguacaagaacgccgucaccgaccuccagcuccucaugcaguccacccccgccaccggcuccggcuccgccaucugcuccggcgucgccgucugcaagguccuccaccucgagggcgaggucaacaagaucaaguccgcccuccucuccaccaacaaggccgucgucucccucuccaacggcgucuccguccucaccuucaagguccucgaccucaagaacuacaucgacaagcagcuccuccccauccucaacaagcaguccugcuccauccccaacaucgagaccgucaucgaguuccagcagaagaacaaccgccuccucgagaucacccgcgaguucuccgucaacgccggcgucaccacccccgucuccaccuacaugcucaccaacuccgagcuccucucccucaucaacgacaugcccaucaccaacgaccagaagaagcucauguccaacaacguccagaucguccgccagcaguccuacuccaucaugugcaucaucaaggaggagguccucgccuacgucguccagcucccccucuacggcgucaucgacacccccugcuggaagcuccacaccuccccccucugcaccaccaacaccaaggagggcuccaacaucugccucacccgcaccgaccgcggcugguacugcgacaacgccggcuccgucuccuucuucccccaggccgagaccugcaagguccaguccaaccgcgucuucugcgacaccaugaacucccucacccuccccuccgaggucaaccucugcaacgucgacaucuucaaccccaaguacgacugcaagaucaugaccuccaagaccgacgucuccuccuccgucaucaccucccucggcgccaucgucuccugcuacggcaagaccaagugcaccgccuccaacaagaaccgcggcaucaucaagaccuucuccaacggcugcgacuacgucuccaacaagggcgucgacaccgucuccgucggcaacacccucuacugcgucaacaagcaggagggccagucccucuacgucaagggcgagcccaucaucaacuucuacgacccccucgucuuccccuccgacgaguucgacgccuccaucucccaggucaacgagaagaucaaccagucccucgccuucauccgcaaguccgacgagcuccuccacaacgucaacgccggcaaguccaccaccaacaucaugaucaccaccaucaucaucgucaucaucgucauccuccucucccucaucgccgucggccuccuccucuacugcaaggcccgcuccacccccgucacccucuccaaggaccagcucuccggcaucaacaacaucgccuucuccaacugaggacuaguacuggcugcaucucccuuuccucuguccuccauccuucucccaggauggugaagggggaccugguacccagugauccccaccccaggauccuaaaucaugacuuaccugcuaauaaaaacucauuggaaaagugagaagaucuaaaaaaaaaaaaaaaaaaaaaaaaaaaaaaaaaaaaaaaaaaaaaaaaaaaaaaaaaaaaaaaaugcaucccccccccccccccccccccccccccccccaaaggcucuuuucagagccaccagaauu

SEQ ID NO: 3348 - RNA, 1964 nt, Artificial Sequence
  mRNA product Design f-3 comprising derived and/or modified sequence from HRSV(A2)__F_DSCav1_mut3 (opt3)
gggagagucccgcagucggcguccagcggcucugcuuguucgugugugugucguugcaggccuuauucaagcuuaccauggagcugcucauccuuaaggccaacgcuauuaccacaauacugacugcagugacguucugcuuugccagcggccagaauaucaccgaagaguucuaccaauccacauguucugcggucucaaaaggguauuugggagcuuuaagaacugguugguacaccaguguuauuacaaucgaacugagcaacauuaaggagaucaaaugcaauggcaccgacgccaaggugaaacuaauaaagcaggaacucgauaaguauaaaaacgcaguaacugaccugcagcuucugaugcaguccacacccgccaccgggucuggaucggcuaucuguucaggcguggcagucugcaagguguugcaccucgagggugagguuaauaaaauuaagagcgcccugcugaguacgaacaaagcuguggucucccucucuaauggggugagcguauuaacuuuuaagguucuggaucuuaagaacuacaucgacaaacaauugcugccuauucuaaauaagcaguccuguucaaucccaaacauagaaaccgugauugaguuccagcagaaaaauaacaggcuccuggaaaucacacgggaguuuagugucaaugccggagugacuaccccggugagcacauauaugcuuaccaacucugagcuguugucccucauuaaugauaugcccaucacgaacgaccaaaagaaacugaugucaaacaauguccagaucguucgccagcagagcuacaguauuaugugcauaaucaaggaagagguguuagcguauguagugcaacugccucucuacggcgucauugauacuccauguuggaaacuucauacaucuccccugugcaccacuaacacaaaggaaggcuccaauaucuguuugacccgaacggaccgugggugguacugcgauaacgcaggaagcgugucguucuuuccucaggccgagaccuguaagguucagucuaauagaguguucugcgacacaaugaacucccuaacucugccaucagaagucaaucucugcaacguggauauauuuaaucccaaauaugacuguaagauuaugaccaguaaaacagauguaagcuccucuguuaucacuagccugggugcuaucgugucaugcuacggcaagaccaaauguacagccaguaacaagaauagggggauuaucaagaccuucuccaacggaugcgacuaugucagcaauaaaggcguggacacugucucuguggguaacacgcuuuacuguguuaauaagcaagaggggcagucacuguaugugaaaggagagccuauuauaaacuuuuacgauccauugguauucccgagugacgaauuugaugcaagcaucucccaggucaacgagaagauuaaucagucucucgcuuucauccggaaaucggacgaacuguuacacaacgugaaugccggcaagagcacaaccaacaucaugauuacuaccauaaucauuguuaucauugugauccugcuaucccucauagcggucggccugcuuuuguauugcaaggcccgcucaacacccgugacccugaguaaagaucaacucucugggaucaauaacauugcauucagcaauugaggacuaguacuggcugcaucucccuuuccucuguccuccauccuucucccaggauggugaagggggaccugguacccagugauccccaccccaggauccuaaaucaugacuuaccugcuaauaaaaacucauuggaaaagugagaagaucuaaaaaaaaaaaaaaaaaaaaaaaaaaaaaaaaaaaaaaaaaaaaaaaaaaaaaaaaaaaaaaaaugcaucccccccccccccccccccccccccccccccaaaggcucuuuucagagccaccagaauu

SEQ ID NO: 3349 - RNA, 1964 nt, Artificial Sequence
  mRNA product Design f-3 comprising derived and/or modified sequence from HRSV(A2)__F_DSCav1_mut3 (opt4)
gggagagucccgcagucggcguccagcggcucugcuuguucgugugugugucguugcaggccuuauucaagcuuaccauggagcugcugauccugaaggccaacgccaucaccaccauccugaccgccgugaccuucugcuucgccagcggccagaacaucaccgaggaguucuaccagagcaccugcagcgccgugagcaagggcuaccugggcgcccugagaaccggcugguacaccagcgugaucaccaucgagcugagcaacaucaaggagaucaagugcaacggcaccgacgccaaggugaagcugaucaagcaggagcuggacaaguacaagaacgccgugaccgaccugcagcugcugaugcagagcacccccgccaccggcagcggcagcgccaucugcagcggcguggccgugugcaaggugcugcaccuggagggcgaggugaacaagaucaagagcgcccugcugagcaccaacaaggccguggugagccugagcaacggcgugagcgugcugaccuucaaggugcuggaccugaagaacuacaucgacaagcagcugcugcccauccugaacaagcagagcugcagcauccccaacaucgagaccgugaucgaguuccagcagaagaacaacagacugcuggagaucaccagagaguucagcgugaacgccggcgugaccacccccgugagcaccuacaugcugaccaacagcgagcugcugagccugaucaacgacaugcccaucaccaacgaccagaagaagcugaugagcaacaacgugcagaucgugagacagcagagcuacagcaucaugugcaucaucaaggaggaggugcuggccuacguggugcagcugccccuguacggcgugaucgacacccccugcuggaagcugcacaccagcccccugugcaccaccaacaccaaggagggcagcaacaucugccugaccagaaccgacagaggcugguacugcgacaacgccggcagcgugagcuucuucccccaggccgagaccugcaaggugcagagcaacagaguguucugcgacaccaugaacagccugacccugcccagcgaggugaaccugugcaacguggacaucuucaaccccaaguacgacugcaagaucaugaccagcaagaccgacgugagcagcagcgugaucaccagccugggcgccaucgugagcugcuacggcaagaccaagugcaccgccagcaacaagaacagaggcaucaucaagaccuucagcaacggcugcgacuacgugagcaacaagggcguggacaccgugagcgugggcaacacccuguacugcgugaacaagcaggagggccagagccuguacgugaagggcgagcccaucaucaacuucuacgacccccugguguuccccagcgacgaguucgacgccagcaucagccaggugaacgagaagaucaaccagagccuggccuucaucagaaagagcgacgagcugcugcacaacgugaacgccggcaagagcaccaccaacaucaugaucaccaccaucaucaucgugaucaucgugauccugcugagccugaucgccgugggccugcugcuguacugcaaggccagaagcacccccgugacccugagcaaggaccagcugagcggcaucaacaacaucgccuucagcaacugaggacuaguacuggcugcaucucccuuuccucuguccuccauccuucucccaggauggugaagggggaccugguacccagugauccccaccccaggauccuaaaucaugacuuaccugcuaauaaaaacucauuggaaaagugagaagaucuaaaaaaaaaaaaaaaaaaaaaaaaaaaaaaaaaaaaaaaaaaaaaaaaaaaaaaaaaaaaaaaaugcaucccccccccccccccccccccccccccccccaaaggcucuuuucagagccaccagaauu

SEQ ID NO: 3350 - RNA, 1964 nt, Artificial Sequence
  mRNA product Design f-3 comprising derived and/or modified sequence from HRSV(A2)__F_DSCav1_mut3 (opt5)
gggagagucccgcagucggcguccagcggcucugcuuguucgugugugugucguugcaggccuuauucaagcuuaccauggagcugcucauccugaaggccaacgcuauuaccacaauccuuacggccgugaccuucugcuuugcgagcggccagaauauuacagaagaguucuaccaauccaccuguucugcugucagcaaaggguaucugggagcccucagaacaggcugguacaccuccguuaucacaauugaacugucuaacaucaaggagaucaaaugcaaugggaccgacgccaaggugaaacuuauuaagcaggaacuggauaaguauaaaaacgcugugacggaccuccagcugcugaugcagagcacccccgccacaggauccggcucugcuaucuguagcggggucgccgugugcaagguucuccaccuggagggagaggugaauaaaauuaaguccgcgcuucugagcaccaacaaagccgucgugucucucuccaauggcguuagcgugcugacauuuaagguccuugaucugaagaacuacaucgacaaacaacuccugccuauucugaauaagcagucuuguuccaucccgaacauugaaaccgugaucgaguuccagcagaaaaauaaccggcuccuggaaaucacgcgcgaguuuagcgugaaugcuggcgucacaacccccguuucuacauauaugcuuaccaacuccgagcugcucagccugauuaaugauaugccuaucaccaacgaccaaaagaaacuuauguccaacaaugugcagauugugagacagcagucuuacagcaucaugugcauuaucaaggaagagguccuggccuaugugguucaacucccccuguacggggugaucgauacaccuuguuggaaacugcauacgagcccccucugcaccacaaacaccaaggaaggauccaauauuugucugacacggaccgaccgcggcugguacugcgauaacgcugggucugucuccuucuuuccucaggccgagacguguaaggugcagagcaauagaguuuucugcgacacaaugaacucucuuacccugccgagcgaagugaaucucugcaacgucgauaucuuuaaucccaaauaugacuguaagauuaugaccuccaaaacagaugugucuagcuccgucaucaccagccugggagcgauugugucuugcuacggcaagacaaaauguacggccuccaacaagaaucgggggaucaucaagaccuucagcaacggaugcgacuauguuucuaauaaaggcguggacacagucuccgugggcaacacccuuuacuguguuaauaagcaagaggggcagagccuguaugugaaaggagagccuauuaucaacuuuuacgauccccucgucuucccuuccgacgaauuugaugcuucuauuagccaggugaacgagaagaucaaucagucccuggccuucauucgcaaaucugacgaacugcuccacaacgugaaugcuggcaagagcacaaccaacaucaugauuacgaccaucaucauuguuaucauugucauccugcuuucccugauugccguggggcuccugcuguauugcaaggccagaagcacacccgugacccuuucuaaagaucaacucuccggaaucaauaacaucgcuuucagcaauugaggacuaguacuggcugcaucucccuuuccucuguccuccauccuucucccaggauggugaagggggaccugguacccagugauccccaccccaggauccuaaaucaugacuuaccugcuaauaaaaacucauuggaaaagugagaagaucuaaaaaaaaaaaaaaaaaaaaaaaaaaaaaaaaaaaaaaaaaaaaaaaaaaaaaaaaaaaaaaaaugcaucccccccccccccccccccccccccccccccaaaggcucuuuucagagccaccagaauu

SEQ ID NO: 3351 - RNA, 1964 nt, Artificial Sequence
  mRNA product Design f-3 comprising derived and/or modified sequence from HRSV(A2)__F_DSCav1_mut3 (opt6)
gggagagucccgcagucggcguccagcggcucugcuuguucgugugugugucguugcaggccuuauucaagcuuaccauggaauuacucauacuaaaagccaaugccauaaccacuauucuaacagcaguaacauucuguuucgccucaggacaaaacauaacagaagaauuuuaucaauccaccuguuccgcagucucgaaaggcuaccuuggcgcacuaagaaccggaugguauacaucaguaauaaccauugaacuaucaaauaucaaagaaauaaaaugcaacggaacugacgcaaaagucaaacuaauaaaacaagaauuagacaaauacaaaaacgccguuacagacuuacaacuacuaaugcaaucaacuccagcaacaggaucaggaucugcuauaugcucaggugucgccguauguaaaguguuacaccucgaaggcgaaguaaacaaaauaaaaucagcacuacuauccacaaauaaagcaguaguaucacuauccaaugguguaucaguacucacauucaaaguacuagacuuaaaaaauuauauagauaaacaauuacuaccaauauuaaacaaacaaucaugcucaauaccaaacauagaaaccgucauugaauuucaacaaaaaaacaaucgacuucuugaaauaacacgagaauuuucaguaaaugccggaguaacaaccccagucucaacauacauguuaaccaacucugaacuccuaagccuaaucaacgacaugcccauaacuaacgaccaaaaaaaacuaauguccaauaauguccaaauaguaagacaacaauccuacucaauaaugugcauuauaaaagaagaaguccucgccuauguaguacaacuacccuuauacggaguaauugacacaccauguuggaaacuacauacaucaccacuaugcaccacuaacacaaaagaaggcuccaacauaugccuaacccgaacagaucgcggaugguauugcgacaacgcaggaaguguauccuucuuuccacaagcagaaacaugcaaaguacaauccaacagaguauucugugacaccaugaacucucuaacacuaccuuccgaaguaaauuuaugcaacguagacauauuuaaucccaaauacgacuguaaaauaaugaccucaaaaacugaugucucaucaucagucauuacaucacucggagcaauagucaguugcuauggaaaaaccaaaugcacagcuaguaacaaaaacagggguauaauaaaaacauuuucaaacggaugcgauuacguaucaaauaaaggaguagacaccguauccguaggaaauacucucuacugcguaaacaaacaagaaggacaaucccuauacguaaaaggcgaaccaaucauuaacuuuuacgacccacuuguauuuccaucagacgaauuugaugccucaauaucccaagucaaugaaaaaauaaaccaaagucuagcauucauccgaaaaucagaugaacuuuuacacaacguaaacgccggaaaaucaacaacaaacaucaugaucacaacaaucaucauaguaauaauaguuauacuacuuuccuuaauagcagucggccuacuacucuacugcaaagcacgauccacaccaguaaccuuaucuaaagaccaacucucaggcauaaacaacauagcauucucaaacuaaggacuaguacuggcugcaucucccuuuccucuguccuccauccuucucccaggauggugaagggggaccugguacccagugauccccaccccaggauccuaaaucaugacuuaccugcuaauaaaaacucauuggaaaagugagaagaucuaaaaaaaaaaaaaaaaaaaaaaaaaaaaaaaaaaaaaaaaaaaaaaaaaaaaaaaaaaaaaaaaugcaucccccccccccccccccccccccccccccccaaaggcucuuuucagagccaccagaauu

SEQ ID NO: 3352 - RNA, 1964 nt, Artificial Sequence
  mRNA product Design f-3 comprising derived and/or modified sequence from HRSV(A2)__F_DSCav1_mut3 (opt11)
gggagagucccgcagucggcguccagcggcucugcuuguucgugugugugucguugcaggccuuauucaagcuuaccauggaacuccucauccuuaaagcaaacgccaucacaaccauccucacagcagucacuuucugcuucgcauccggacaaaacaucacagaagaguucuaucaauccacgugcuccgcaguuuccaaaggauaccuuggagccuuacgaaccggcugguacaccuccgucaucaccauagaacucagcaacaucaaagaaaucaaaugcaacggaaccgacgcaaaagucaaacucaucaaacaagaacuagacaaauacaaaaacgcagucaccgaccuccaacuacucaugcaaucaacccccgcaaccggcuccggcuccgccaucugcuccggaguagccguaugcaaaguccuccaccucgaaggcgaaguuaacaagaucaaguccgcacuccuaucaaccaacaaagcagucgucucccuauccaacggcgucuccguauuaacauucaaaguccucgaccucaaaaacuacauagacaaacagcuacuccccauccuaaacaaacaauccugcuccauccccaacaucgaaacugucaucgaguuccaacagaaaaacaaccgccuccuagaaaucacccgagaguucuccguaaacgccggcgucacuacccccgucucuaccuauaugcuaaccaacucugaacuccuaucccuaaucaacgauaugcccauaacuaacgaccaaaagaaacuuauguccaacaacguacaaauaguccggcaacaaucauacucuaucaugugcaucaucaaagaagaaguacuugccuacguuguccaacucccacuauacggcgucauagacacuccaugcuggaaacuucacaccucaccccucugcaccacuaacacuaaagaaggcucuaacaucugccuuacccgcaccgaccgcggaugguacugcgacaacgcaggcucaguuagcuucuucccacaagccgaaaccugcaaaguccagucaaaccgugucuucugcgauaccaugaacucgcucacccucccuuccgaagucaaccucugcaacgucgacaucuucaaccccaaauacgacugcaaaaucaugaccucaaaaaccgacguaucuucuuccgucaucaccucccucggcgccaucguauccugcuacggcaaaaccaaaugcacugcaucaaacaaaaaccgaggcaucaucaaaaccuucucgaacggaugcgacuacguauccaacaagggcgucgacacagucuccguugguaacacccucuacugcgucaacaaacaagaaggccaaucccuauacguaaaaggcgaacccaucaucaacuucuacgacccccucgucuuccccagugacgaauuugacgccuccaucucccaagucaacgaaaagaucaaccaaucccuugccuucauacgcaaauccgacgaacuccuacacaacguuaacgccggaaaaucaacaaccaacaucaugaucacaaccaucauaaucgucauaaucgucauacuccucucccucauagccgucggccugcuauuguacuguaaagcccgcuccacaccagucacacuuucaaaagaccaacucuccgggaucaacaacaucgccuucuccaacuaaggacuaguacuggcugcaucucccuuuccucuguccuccauccuucucccaggauggugaagggggaccugguacccagugauccccaccccaggauccuaaaucaugacuuaccugcuaauaaaaacucauuggaaaagugagaagaucuaaaaaaaaaaaaaaaaaaaaaaaaaaaaaaaaaaaaaaaaaaaaaaaaaaaaaaaaaaaaaaaaugcaucccccccccccccccccccccccccccccccaaaggcucuuuucagagccaccagaauu

SEQ ID NO: 3353 - RNA, 2180 nt, Artificial Sequence
  mRNA product Design f-4 comprising derived and/or modified sequence from HRSV(A2)__F_DSCav1_mut3 (opt1)
gggagagucccgcagucggcguccagcggcucugcuuguucgugugugugucguugcaggccuuauucaagcuuaccauggagcugcucauccugaaggccaacgccaucaccaccauccugacggcggugaccuucugcuucgccagcggccagaacaucaccgaggaguucuaccaguccacgugcagcgccgucuccaagggguaccucggcgcccugcggaccggcugguacaccuccgugaucaccaucgagcugagcaacaucaaggagaucaagugcaacgggaccgacgccaaggugaagcucaucaagcaggagcuggacaaguacaagaacgcggucacggaccugcagcuccugaugcaguccaccccggcaaccggcuccggcuccgccaucugcagcggcgucgccgugugcaaggugcugcaccucgagggggaggucaacaagaucaagagcgcccugcuguccaccaacaaggccguggugagccucuccaacggcgucagcgugcugaccuucaaggugcuggaccucaagaacuacaucgacaagcagcugcugcccauccugaacaagcagagcugcuccauccccaacaucgagacggugaucgaguuccagcagaagaacaaccggcuccuggagaucacccgcgaguucagcgugaacgccggggucaccacccccguguccacguacaugcugaccaacagcgagcuccugucccugaucaacgacaugccgaucaccaacgaccagaagaagcucaugagcaacaacgugcagaucguccggcagcaguccuacagcaucaugugcaucaucaaggaggaggugcuggcguacgugguccagcugccccucuacggcgugaucgacacccccugcuggaagcugcacacgagcccccugugcaccaccaacaccaaggagggguccaacaucugccucacgcgcaccgaccggggcugguacugcgacaacgccggcagcgucuccuucuucccgcaggccgagaccugcaaggugcagagcaaccgcguguucugcgacaccaugaacucccugacgcugcccagcgagguaaaccucugcaacgucgacaucuucaaccccaaguacgacugcaagaucaugaccuccaagaccgacgugagcuccagcgugaucaccucccugggggccaucgucagcugcuacggcaagacgaagugcaccgccagcaacaagaaccgggggaucaucaagaccuucuccaacggcugcgacuacgugagcaacaagggcguggacaccguguccgucgggaacacccuguacugcgugaacaagcaggagggccagagccucuacgugaagggggagcccaucaucaacuucuacgacccgcuggucuuccccuccgacgaguucgacgcgagcaucucccaggugaacgagaagaucaaccagagccuggccuucauccgcaaguccgacgagcugcuccacaacgugaacgccggcaagagcacgaccaacaucaugaucaccaccaucaucaucgucaucaucgugauccugcugucccucaucgccguggggcugcugcucuacugcaaggcccggagcacgcccgucacccuguccaaggaccagcugagcggcaucaacaacaucgcguucuccaacugaggacuagugaagggaacacccaaauuuaauucagccuuaagcacaauuaauuaagagugaaacguaauuguacaagcaguuggucacccaccauagggcaugaucaacaccgcaaccuuuccuuuuucccccagugauucugaaaaaccccucuucccuucagcuugcuuagauguuccaaauuuaguaagcuuaaggcggccuacagaagaaaaagaaaaaaaaggccacaaaaguucccucucacuuucaguaaauaaaauaaaagcagcaacagaaauaaagaaauaaaugaaauucaaaaugaaauaaauauuguguugugcagcauuaaaaaaucaauaaaaauuaaaaaugagcaagaucuaaaaaaaaaaaaaaaaaaaaaaaaaaaaaaaaaaaaaaaaaaaaaaaaaaaaaaaaaaaaaaaaugcaucccccccccccccccccccccccccccccccaaaggcucuuuucagagccaccagaauu

SEQ ID NO: 3354 - RNA, 2180 nt, Artificial Sequence
  mRNA product Design f-4 comprising derived and/or modified sequence from HRSV(A2)__F_DSCav1_mut3 (opt1)
gggagagucccgcagucggcguccagcggcucugcuuguucgugugugugucguugcaggccuuauucaagcuuaccauggagcugcucauccugaaggccaacgccaucaccaccauccugacggcggugaccuucugcuucgccagcggccagaacaucaccgaggaguucuaccaguccacgugcagcgccgucuccaagggguaccucggcgcccugcgcaccgggugguacaccagcgugaucaccaucgagcuguccaacaucaaggagaucaagugcaacggcaccgacgccaaggugaagcucaucaagcaggagcuggacaaguacaagaacgcggucacggaccugcagcuccugaugcagagcacccccgccaccggguccggcagcgccaucugcuccggcguggccgugugcaagguccugcaccucgagggggaggugaacaagaucaagagcgcgcugcuguccaccaacaaggccguggucagccucuccaacggcgugagcgugcugacguucaagguccuggaccucaagaacuacaucgacaagcagcugcugccgauccucaacaagcaguccugcagcauccccaacaucgagaccgugaucgaguuccagcagaagaacaaccggcugcuggagaucacccgcgaguucuccgugaacgccggggucaccacgcccgugagcaccuacaugcucaccaacuccgagcugcugagccucaucaacgacaugcccaucaccaacgaccagaagaagcugaugagcaacaacgugcagaucguccggcagcaguccuacagcaucaugugcaucaucaaggaggaggugcuggccuacgugguccagcucccgcuguacggcgugaucgacacgcccugcuggaagcugcacaccagcccccucugcaccaccaacacgaaggagggguccaacaucugccugacccgcaccgaccggggcugguacugcgacaacgccggcuccgugagcuucuucccccaggcggagaccugcaagguccaguccaaccgcguguucugcgacacgaugaacagccugacccucccguccgaggucaaccugugcaacguggacaucuucaaccccaaguacgacugcaagaucaugaccagcaagaccgacguguccagcuccgucaucacgagccugggggccaucguguccugcuacggcaagaccaagugcaccgccagcaacaagaaccgggggaucaucaagaccuucuccaacggcugcgacuacgugagcaacaagggcgucgacacgguguccguggggaacacccucuacugcgucaacaagcaggagggccagagccuguacgugaagggggagcccaucaucaacuucuacgacccccugguguucccgagcgacgaguucgacgccuccaucagccaggucaacgagaagaucaaccagucccucgccuucauccgcaagagcgacgagcugcugcacaacgugaacgcgggcaaguccaccaccaacaucaugaucaccacgaucaucaucgugaucaucgucauccuccugagccugaucgccguggggcuccugcuguacugcaaggcccgguccacccccgugacccugagcaaggaccagcucuccggcaucaacaacaucgccuucagcaacugaggacuagugaagggaacacccaaauuuaauucagccuuaagcacaauuaauuaagagugaaacguaauuguacaagcaguuggucacccaccauagggcaugaucaacaccgcaaccuuuccuuuuucccccagugauucugaaaaaccccucuucccuucagcuugcuuagauguuccaaauuuaguaagcuuaaggcggccuacagaagaaaaagaaaaaaaaggccacaaaaguucccucucacuuucaguaaauaaaauaaaagcagcaacagaaauaaagaaauaaaugaaauucaaaaugaaauaaauauuguguugugcagcauuaaaaaaucaauaaaaauuaaaaaugagcaagaucuaaaaaaaaaaaaaaaaaaaaaaaaaaaaaaaaaaaaaaaaaaaaaaaaaaaaaaaaaaaaaaaaugcaucccccccccccccccccccccccccccccccaaaggcucuuuucagagccaccagaauu

SEQ ID NO: 3355 - RNA, 2180 nt, Artificial Sequence
  mRNA product Design f-4 comprising derived and/or modified sequence from HRSV(A2)__F_DSCav1_mut3 (opt2)
gggagagucccgcagucggcguccagcggcucugcuuguucgugugugugucguugcaggccuuauucaagcuuaccauggagcuccucauccucaaggccaacgccaucaccaccauccucaccgccgucaccuucugcuucgccuccggccagaacaucaccgaggaguucuaccaguccaccugcuccgccgucuccaagggcuaccucggcgcccuccgcaccggcugguacaccuccgucaucaccaucgagcucuccaacaucaaggagaucaagugcaacggcaccgacgccaaggucaagcucaucaagcaggagcucgacaaguacaagaacgccgucaccgaccuccagcuccucaugcaguccacccccgccaccggcuccggcuccgccaucugcuccggcgucgccgucugcaagguccuccaccucgagggcgaggucaacaagaucaaguccgcccuccucuccaccaacaaggccgucgucucccucuccaacggcgucuccguccucaccuucaagguccucgaccucaagaacuacaucgacaagcagcuccuccccauccucaacaagcaguccugcuccauccccaacaucgagaccgucaucgaguuccagcagaagaacaaccgccuccucgagaucacccgcgaguucuccgucaacgccggcgucaccacccccgucuccaccuacaugcucaccaacuccgagcuccucucccucaucaacgacaugcccaucaccaacgaccagaagaagcucauguccaacaacguccagaucguccgccagcaguccuacuccaucaugugcaucaucaaggaggagguccucgccuacgucguccagcucccccucuacggcgucaucgacacccccugcuggaagcuccacaccuccccccucugcaccaccaacaccaaggagggcuccaacaucugccucacccgcaccgaccgcggcugguacugcgacaacgccggcuccgucuccuucuucccccaggccgagaccugcaagguccaguccaaccgcgucuucugcgacaccaugaacucccucacccuccccuccgaggucaaccucugcaacgucgacaucuucaaccccaaguacgacugcaagaucaugaccuccaagaccgacgucuccuccuccgucaucaccucccucggcgccaucgucuccugcuacggcaagaccaagugcaccgccuccaacaagaaccgcggcaucaucaagaccuucuccaacggcugcgacuacgucuccaacaagggcgucgacaccgucuccgucggcaacacccucuacugcgucaacaagcaggagggccagucccucuacgucaagggcgagcccaucaucaacuucuacgacccccucgucuuccccuccgacgaguucgacgccuccaucucccaggucaacgagaagaucaaccagucccucgccuucauccgcaaguccgacgagcuccuccacaacgucaacgccggcaaguccaccaccaacaucaugaucaccaccaucaucaucgucaucaucgucauccuccucucccucaucgccgucggccuccuccucuacugcaaggcccgcuccacccccgucacccucuccaaggaccagcucuccggcaucaacaacaucgccuucuccaacugaggacuagugaagggaacacccaaauuuaauucagccuuaagcacaauuaauuaagagugaaacguaauuguacaagcaguuggucacccaccauagggcaugaucaacaccgcaaccuuuccuuuuucccccagugauucugaaaaaccccucuucccuucagcuugcuuagauguuccaaauuuaguaagcuuaaggcggccuacagaagaaaaagaaaaaaaaggccacaaaaguucccucucacuuucaguaaauaaaauaaaagcagcaacagaaauaaagaaauaaaugaaauucaaaaugaaauaaauauuguguugugcagcauuaaaaaaucaauaaaaauuaaaaaugagcaagaucuaaaaaaaaaaaaaaaaaaaaaaaaaaaaaaaaaaaaaaaaaaaaaaaaaaaaaaaaaaaaaaaaugcaucccccccccccccccccccccccccccccccaaaggcucuuuucagagccaccagaauu

SEQ ID NO: 3356 - RNA, 2180 nt, Artificial Sequence
  mRNA product Design f-4 comprising derived and/or modified sequence from HRSV(A2)__F_DSCav1_mut3 (opt3)
gggagagucccgcagucggcguccagcggcucugcuuguucgugugugugucguugcaggccuuauucaagcuuaccauggagcugcucauccuuaaggccaacgcuauuaccacaauacugacugcagugacguucugcuuugccagcggccagaauaucaccgaagaguucuaccaauccacauguucugcggucucaaaaggguauuugggagcuuuaagaacugguugguacaccaguguuauuacaaucgaacugagcaacauuaaggagaucaaaugcaauggcaccgacgccaaggugaaacuaauaaagcaggaacucgauaaguauaaaaacgcaguaacugaccugcagcuucugaugcaguccacacccgccaccgggucuggaucggcuaucuguucaggcguggcagucugcaagguguugcaccucgagggugagguuaauaaaauuaagagcgcccugcugaguacgaacaaagcuguggucucccucucuaauggggugagcguauuaacuuuuaagguucuggaucuuaagaacuacaucgacaaacaauugcugccuauucuaaauaagcaguccuguucaaucccaaacauagaaaccgugauugaguuccagcagaaaaauaacaggcuccuggaaaucacacgggaguuuagugucaaugccggagugacuaccccggugagcacauauaugcuuaccaacucugagcuguugucccucauuaaugauaugcccaucacgaacgaccaaaagaaacugaugucaaacaauguccagaucguucgccagcagagcuacaguauuaugugcauaaucaaggaagagguguuagcguauguagugcaacugccucucuacggcgucauugauacuccauguuggaaacuucauacaucuccccugugcaccacuaacacaaaggaaggcuccaauaucuguuugacccgaacggaccgugggugguacugcgauaacgcaggaagcgugucguucuuuccucaggccgagaccuguaagguucagucuaauagaguguucugcgacacaaugaacucccuaacucugccaucagaagucaaucucugcaacguggauauauuuaaucccaaauaugacuguaagauuaugaccaguaaaacagauguaagcuccucuguuaucacuagccugggugcuaucgugucaugcuacggcaagaccaaauguacagccaguaacaagaauagggggauuaucaagaccuucuccaacggaugcgacuaugucagcaauaaaggcguggacacugucucuguggguaacacgcuuuacuguguuaauaagcaagaggggcagucacuguaugugaaaggagagccuauuauaaacuuuuacgauccauugguauucccgagugacgaauuugaugcaagcaucucccaggucaacgagaagauuaaucagucucucgcuuucauccggaaaucggacgaacuguuacacaacgugaaugccggcaagagcacaaccaacaucaugauuacuaccauaaucauuguuaucauugugauccugcuaucccucauagcggucggccugcuuuuguauugcaaggcccgcucaacacccgugacccugaguaaagaucaacucucugggaucaauaacauugcauucagcaauugaggacuagugaagggaacacccaaauuuaauucagccuuaagcacaauuaauuaagagugaaacguaauuguacaagcaguuggucacccaccauagggcaugaucaacaccgcaaccuuuccuuuuucccccagugauucugaaaaaccccucuucccuucagcuugcuuagauguuccaaauuuaguaagcuuaaggcggccuacagaagaaaaagaaaaaaaaggccacaaaaguucccucucacuuucaguaaauaaaauaaaagcagcaacagaaauaaagaaauaaaugaaauucaaaaugaaauaaauauuguguugugcagcauuaaaaaaucaauaaaaauuaaaaaugagcaagaucuaaaaaaaaaaaaaaaaaaaaaaaaaaaaaaaaaaaaaaaaaaaaaaaaaaaaaaaaaaaaaaaaugcaucccccccccccccccccccccccccccccccaaaggcucuuuucagagccaccagaauu

SEQ ID NO: 3357 - RNA, 2180 nt, Artificial Sequence
  mRNA product Design f-4 comprising derived and/or modified sequence from HRSV(A2)__F_DSCav1_mut3 (opt4)
gggagagucccgcagucggcguccagcggcucugcuuguucgugugugugucguugcaggccuuauucaagcuuaccauggagcugcugauccugaaggccaacgccaucaccaccauccugaccgccgugaccuucugcuucgccagcggccagaacaucaccgaggaguucuaccagagcaccugcagcgccgugagcaagggcuaccugggcgcccugagaaccggcugguacaccagcgugaucaccaucgagcugagcaacaucaaggagaucaagugcaacggcaccgacgccaaggugaagcugaucaagcaggagcuggacaaguacaagaacgccgugaccgaccugcagcugcugaugcagagcacccccgccaccggcagcggcagcgccaucugcagcggcguggccgugugcaaggugcugcaccuggagggcgaggugaacaagaucaagagcgcccugcugagcaccaacaaggccguggugagccugagcaacggcgugagcgugcugaccuucaaggugcuggaccugaagaacuacaucgacaagcagcugcugcccauccugaacaagcagagcugcagcauccccaacaucgagaccgugaucgaguuccagcagaagaacaacagacugcuggagaucaccagagaguucagcgugaacgccggcgugaccacccccgugagcaccuacaugcugaccaacagcgagcugcugagccugaucaacgacaugcccaucaccaacgaccagaagaagcugaugagcaacaacgugcagaucgugagacagcagagcuacagcaucaugugcaucaucaaggaggaggugcuggccuacguggugcagcugccccuguacggcgugaucgacacccccugcuggaagcugcacaccagcccccugugcaccaccaacaccaaggagggcagcaacaucugccugaccagaaccgacagaggcugguacugcgacaacgccggcagcgugagcuucuucccccaggccgagaccugcaaggugcagagcaacagaguguucugcgacaccaugaacagccugacccugcccagcgaggugaaccugugcaacguggacaucuucaaccccaaguacgacugcaagaucaugaccagcaagaccgacgugagcagcagcgugaucaccagccugggcgccaucgugagcugcuacggcaagaccaagugcaccgccagcaacaagaacagaggcaucaucaagaccuucagcaacggcugcgacuacgugagcaacaagggcguggacaccgugagcgugggcaacacccuguacugcgugaacaagcaggagggccagagccuguacgugaagggcgagcccaucaucaacuucuacgacccccugguguuccccagcgacgaguucgacgccagcaucagccaggugaacgagaagaucaaccagagccuggccuucaucagaaagagcgacgagcugcugcacaacgugaacgccggcaagagcaccaccaacaucaugaucaccaccaucaucaucgugaucaucgugauccugcugagccugaucgccgugggccugcugcuguacugcaaggccagaagcacccccgugacccugagcaaggaccagcugagcggcaucaacaacaucgccuucagcaacugaggacuagugaagggaacacccaaauuuaauucagccuuaagcacaauuaauuaagagugaaacguaauuguacaagcaguuggucacccaccauagggcaugaucaacaccgcaaccuuuccuuuuucccccagugauucugaaaaaccccucuucccuucagcuugcuuagauguuccaaauuuaguaagcuuaaggcggccuacagaagaaaaagaaaaaaaaggccacaaaaguucccucucacuuucaguaaauaaaauaaaagcagcaacagaaauaaagaaauaaaugaaauucaaaaugaaauaaauauuguguugugcagcauuaaaaaaucaauaaaaauuaaaaaugagcaagaucuaaaaaaaaaaaaaaaaaaaaaaaaaaaaaaaaaaaaaaaaaaaaaaaaaaaaaaaaaaaaaaaaugcaucccccccccccccccccccccccccccccccaaaggcucuuuucagagccaccagaauu

SEQ ID NO: 3358 - RNA, 2180 nt, Artificial Sequence
  mRNA product Design f-4 comprising derived and/or modified sequence from HRSV(A2)__F_DSCav1_mut3 (opt5)
gggagagucccgcagucggcguccagcggcucugcuuguucgugugugugucguugcaggccuuauucaagcuuaccauggagcugcucauccugaaggccaacgcuauuaccacaauccuuacggccgugaccuucugcuuugcgagcggccagaauauuacagaagaguucuaccaauccaccuguucugcugucagcaaaggguaucugggagcccucagaacaggcugguacaccuccguuaucacaauugaacugucuaacaucaaggagaucaaaugcaaugggaccgacgccaaggugaaacuuauuaagcaggaacuggauaaguauaaaaacgcugugacggaccuccagcugcugaugcagagcacccccgccacaggauccggcucugcuaucuguagcggggucgccgugugcaagguucuccaccuggagggagaggugaauaaaauuaaguccgcgcuucugagcaccaacaaagccgucgugucucucuccaauggcguuagcgugcugacauuuaagguccuugaucugaagaacuacaucgacaaacaacuccugccuauucugaauaagcagucuuguuccaucccgaacauugaaaccgugaucgaguuccagcagaaaaauaaccggcuccuggaaaucacgcgcgaguuuagcgugaaugcuggcgucacaacccccguuucuacauauaugcuuaccaacuccgagcugcucagccugauuaaugauaugccuaucaccaacgaccaaaagaaacuuauguccaacaaugugcagauugugagacagcagucuuacagcaucaugugcauuaucaaggaagagguccuggccuaugugguucaacucccccuguacggggugaucgauacaccuuguuggaaacugcauacgagcccccucugcaccacaaacaccaaggaaggauccaauauuugucugacacggaccgaccgcggcugguacugcgauaacgcugggucugucuccuucuuuccucaggccgagacguguaaggugcagagcaauagaguuuucugcgacacaaugaacucucuuacccugccgagcgaagugaaucucugcaacgucgauaucuuuaaucccaaauaugacuguaagauuaugaccuccaaaacagaugugucuagcuccgucaucaccagccugggagcgauugugucuugcuacggcaagacaaaauguacggccuccaacaagaaucgggggaucaucaagaccuucagcaacggaugcgacuauguuucuaauaaaggcguggacacagucuccgugggcaacacccuuuacuguguuaauaagcaagaggggcagagccuguaugugaaaggagagccuauuaucaacuuuuacgauccccucgucuucccuuccgacgaauuugaugcuucuauuagccaggugaacgagaagaucaaucagucccuggccuucauucgcaaaucugacgaacugcuccacaacgugaaugcuggcaagagcacaaccaacaucaugauuacgaccaucaucauuguuaucauugucauccugcuuucccugauugccguggggcuccugcuguauugcaaggccagaagcacacccgugacccuuucuaaagaucaacucuccggaaucaauaacaucgcuuucagcaauugaggacuagugaagggaacacccaaauuuaauucagccuuaagcacaauuaauuaagagugaaacguaauuguacaagcaguuggucacccaccauagggcaugaucaacaccgcaaccuuuccuuuuucccccagugauucugaaaaaccccucuucccuucagcuugcuuagauguuccaaauuuaguaagcuuaaggcggccuacagaagaaaaagaaaaaaaaggccacaaaaguucccucucacuuucaguaaauaaaauaaaagcagcaacagaaauaaagaaauaaaugaaauucaaaaugaaauaaauauuguguugugcagcauuaaaaaaucaauaaaaauuaaaaaugagcaagaucuaaaaaaaaaaaaaaaaaaaaaaaaaaaaaaaaaaaaaaaaaaaaaaaaaaaaaaaaaaaaaaaaugcaucccccccccccccccccccccccccccccccaaaggcucuuuucagagccaccagaauu

SEQ ID NO: 3359 - RNA, 2180 nt, Artificial Sequence
  mRNA product Design f-4 comprising derived and/or modified sequence from HRSV(A2)__F_DSCav1_mut3 (opt6)
gggagagucccgcagucggcguccagcggcucugcuuguucgugugugugucguugcaggccuuauucaagcuuaccauggaauuacucauacuaaaagccaaugccauaaccacuauucuaacagcaguaacauucuguuucgccucaggacaaaacauaacagaagaauuuuaucaauccaccuguuccgcagucucgaaaggcuaccuuggcgcacuaagaaccggaugguauacaucaguaauaaccauugaacuaucaaauaucaaagaaauaaaaugcaacggaacugacgcaaaagucaaacuaauaaaacaagaauuagacaaauacaaaaacgccguuacagacuuacaacuacuaaugcaaucaacuccagcaacaggaucaggaucugcuauaugcucaggugucgccguauguaaaguguuacaccucgaaggcgaaguaaacaaaauaaaaucagcacuacuauccacaaauaaagcaguaguaucacuauccaaugguguaucaguacucacauucaaaguacuagacuuaaaaaauuauauagauaaacaauuacuaccaauauuaaacaaacaaucaugcucaauaccaaacauagaaaccgucauugaauuucaacaaaaaaacaaucgacuucuugaaauaacacgagaauuuucaguaaaugccggaguaacaaccccagucucaacauacauguuaaccaacucugaacuccuaagccuaaucaacgacaugcccauaacuaacgaccaaaaaaaacuaauguccaauaauguccaaauaguaagacaacaauccuacucaauaaugugcauuauaaaagaagaaguccucgccuauguaguacaacuacccuuauacggaguaauugacacaccauguuggaaacuacauacaucaccacuaugcaccacuaacacaaaagaaggcuccaacauaugccuaacccgaacagaucgcggaugguauugcgacaacgcaggaaguguauccuucuuuccacaagcagaaacaugcaaaguacaauccaacagaguauucugugacaccaugaacucucuaacacuaccuuccgaaguaaauuuaugcaacguagacauauuuaaucccaaauacgacuguaaaauaaugaccucaaaaacugaugucucaucaucagucauuacaucacucggagcaauagucaguugcuauggaaaaaccaaaugcacagcuaguaacaaaaacagggguauaauaaaaacauuuucaaacggaugcgauuacguaucaaauaaaggaguagacaccguauccguaggaaauacucucuacugcguaaacaaacaagaaggacaaucccuauacguaaaaggcgaaccaaucauuaacuuuuacgacccacuuguauuuccaucagacgaauuugaugccucaauaucccaagucaaugaaaaaauaaaccaaagucuagcauucauccgaaaaucagaugaacuuuuacacaacguaaacgccggaaaaucaacaacaaacaucaugaucacaacaaucaucauaguaauaauaguuauacuacuuuccuuaauagcagucggccuacuacucuacugcaaagcacgauccacaccaguaaccuuaucuaaagaccaacucucaggcauaaacaacauagcauucucaaacuaaggacuagugaagggaacacccaaauuuaauucagccuuaagcacaauuaauuaagagugaaacguaauuguacaagcaguuggucacccaccauagggcaugaucaacaccgcaaccuuuccuuuuucccccagugauucugaaaaaccccucuucccuucagcuugcuuagauguuccaaauuuaguaagcuuaaggcggccuacagaagaaaaagaaaaaaaaggccacaaaaguucccucucacuuucaguaaauaaaauaaaagcagcaacagaaauaaagaaauaaaugaaauucaaaaugaaauaaauauuguguugugcagcauuaaaaaaucaauaaaaauuaaaaaugagcaagaucuaaaaaaaaaaaaaaaaaaaaaaaaaaaaaaaaaaaaaaaaaaaaaaaaaaaaaaaaaaaaaaaaugcaucccccccccccccccccccccccccccccccaaaggcucuuuucagagccaccagaauu

SEQ ID NO: 3360 - RNA, 2180 nt, Artificial Sequence
  mRNA product Design f-4 comprising derived and/or modified sequence from HRSV(A2)__F_DSCav1_mut3 (opt11)
gggagagucccgcagucggcguccagcggcucugcuuguucgugugugugucguugcaggccuuauucaagcuuaccauggaacuccucauccuuaaagcaaacgccaucacaaccauccucacagcagucacuuucugcuucgcauccggacaaaacaucacagaagaguucuaucaauccacgugcuccgcaguuuccaaaggauaccuuggagccuuacgaaccggcugguacaccuccgucaucaccauagaacucagcaacaucaaagaaaucaaaugcaacggaaccgacgcaaaagucaaacucaucaaacaagaacuagacaaauacaaaaacgcagucaccgaccuccaacuacucaugcaaucaacccccgcaaccggcuccggcuccgccaucugcuccggaguagccguaugcaaaguccuccaccucgaaggcgaaguuaacaagaucaaguccgcacuccuaucaaccaacaaagcagucgucucccuauccaacggcgucuccguauuaacauucaaaguccucgaccucaaaaacuacauagacaaacagcuacuccccauccuaaacaaacaauccugcuccauccccaacaucgaaacugucaucgaguuccaacagaaaaacaaccgccuccuagaaaucacccgagaguucuccguaaacgccggcgucacuacccccgucucuaccuauaugcuaaccaacucugaacuccuaucccuaaucaacgauaugcccauaacuaacgaccaaaagaaacuuauguccaacaacguacaaauaguccggcaacaaucauacucuaucaugugcaucaucaaagaagaaguacuugccuacguuguccaacucccacuauacggcgucauagacacuccaugcuggaaacuucacaccucaccccucugcaccacuaacacuaaagaaggcucuaacaucugccuuacccgcaccgaccgcggaugguacugcgacaacgcaggcucaguuagcuucuucccacaagccgaaaccugcaaaguccagucaaaccgugucuucugcgauaccaugaacucgcucacccucccuuccgaagucaaccucugcaacgucgacaucuucaaccccaaauacgacugcaaaaucaugaccucaaaaaccgacguaucuucuuccgucaucaccucccucggcgccaucguauccugcuacggcaaaaccaaaugcacugcaucaaacaaaaaccgaggcaucaucaaaaccuucucgaacggaugcgacuacguauccaacaagggcgucgacacagucuccguugguaacacccucuacugcgucaacaaacaagaaggccaaucccuauacguaaaaggcgaacccaucaucaacuucuacgacccccucgucuuccccagugacgaauuugacgccuccaucucccaagucaacgaaaagaucaaccaaucccuugccuucauacgcaaauccgacgaacuccuacacaacguuaacgccggaaaaucaacaaccaacaucaugaucacaaccaucauaaucgucauaaucgucauacuccucucccucauagccgucggccugcuauuguacuguaaagcccgcuccacaccagucacacuuucaaaagaccaacucuccgggaucaacaacaucgccuucuccaacuaaggacuagugaagggaacacccaaauuuaauucagccuuaagcacaauuaauuaagagugaaacguaauuguacaagcaguuggucacccaccauagggcaugaucaacaccgcaaccuuuccuuuuucccccagugauucugaaaaaccccucuucccuucagcuugcuuagauguuccaaauuuaguaagcuuaaggcggccuacagaagaaaaagaaaaaaaaggccacaaaaguucccucucacuuucaguaaauaaaauaaaagcagcaacagaaauaaagaaauaaaugaaauucaaaaugaaauaaauauuguguugugcagcauuaaaaaaucaauaaaaauuaaaaaugagcaagaucuaaaaaaaaaaaaaaaaaaaaaaaaaaaaaaaaaaaaaaaaaaaaaaaaaaaaaaaaaaaaaaaaugcaucccccccccccccccccccccccccccccccaaaggcucuuuucagagccaccagaauu

SEQ ID NO: 3361 - RNA, 1956 nt, Artificial Sequence
  mRNA product Design f-5 comprising derived and/or modified sequence from HRSV(A2)__F_DSCav1_mut3 (opt1)
gggagacuuucccauucuguagcagaauuugguguugccuguggucuuggucccgcggagaagcuuaccauggagcugcucauccugaaggccaacgccaucaccaccauccugacggcggugaccuucugcuucgccagcggccagaacaucaccgaggaguucuaccaguccacgugcagcgccgucuccaagggguaccucggcgcccugcggaccggcugguacaccuccgugaucaccaucgagcugagcaacaucaaggagaucaagugcaacgggaccgacgccaaggugaagcucaucaagcaggagcuggacaaguacaagaacgcggucacggaccugcagcuccugaugcaguccaccccggcaaccggcuccggcuccgccaucugcagcggcgucgccgugugcaaggugcugcaccucgagggggaggucaacaagaucaagagcgcccugcuguccaccaacaaggccguggugagccucuccaacggcgucagcgugcugaccuucaaggugcuggaccucaagaacuacaucgacaagcagcugcugcccauccugaacaagcagagcugcuccauccccaacaucgagacggugaucgaguuccagcagaagaacaaccggcuccuggagaucacccgcgaguucagcgugaacgccggggucaccacccccguguccacguacaugcugaccaacagcgagcuccugucccugaucaacgacaugccgaucaccaacgaccagaagaagcucaugagcaacaacgugcagaucguccggcagcaguccuacagcaucaugugcaucaucaaggaggaggugcuggcguacgugguccagcugccccucuacggcgugaucgacacccccugcuggaagcugcacacgagcccccugugcaccaccaacaccaaggagggguccaacaucugccucacgcgcaccgaccggggcugguacugcgacaacgccggcagcgucuccuucuucccgcaggccgagaccugcaaggugcagagcaaccgcguguucugcgacaccaugaacucccugacgcugcccagcgagguaaaccucugcaacgucgacaucuucaaccccaaguacgacugcaagaucaugaccuccaagaccgacgugagcuccagcgugaucaccucccugggggccaucgucagcugcuacggcaagacgaagugcaccgccagcaacaagaaccgggggaucaucaagaccuucuccaacggcugcgacuacgugagcaacaagggcguggacaccguguccgucgggaacacccuguacugcgugaacaagcaggagggccagagccucuacgugaagggggagcccaucaucaacuucuacgacccgcuggucuuccccuccgacgaguucgacgcgagcaucucccaggugaacgagaagaucaaccagagccuggccuucauccgcaaguccgacgagcugcuccacaacgugaacgccggcaagagcacgaccaacaucaugaucaccaccaucaucaucgucaucaucgugauccugcugucccucaucgccguggggcugcugcucuacugcaaggcccggagcacgcccgucacccuguccaaggaccagcugagcggcaucaacaacaucgcguucuccaacugaggacuaguacuggcugcaucucccuuuccucuguccuccauccuucucccaggauggugaagggggaccugguacccagugauccccaccccaggauccuaaaucaugacuuaccugcuaauaaaaacucauuggaaaagugagaagaucuaaaaaaaaaaaaaaaaaaaaaaaaaaaaaaaaaaaaaaaaaaaaaaaaaaaaaaaaaaaaaaaaugcaucccccccccccccccccccccccccccccccaaaggcucuuuucagagccaccagaauu

SEQ ID NO: 3362 - RNA, 1956 nt, Artificial Sequence
  mRNA product Design f-5 comprising derived and/or modified sequence from HRSV(A2)__F_DSCav1_mut3 (opt1)
gggagacuuucccauucuguagcagaauuugguguugccuguggucuuggucccgcggagaagcuuaccauggagcugcucauccugaaggccaacgccaucaccaccauccugacggcggugaccuucugcuucgccagcggccagaacaucaccgaggaguucuaccaguccacgugcagcgccgucuccaagggguaccucggcgcccugcgcaccgggugguacaccagcgugaucaccaucgagcuguccaacaucaaggagaucaagugcaacggcaccgacgccaaggugaagcucaucaagcaggagcuggacaaguacaagaacgcggucacggaccugcagcuccugaugcagagcacccccgccaccggguccggcagcgccaucugcuccggcguggccgugugcaagguccugcaccucgagggggaggugaacaagaucaagagcgcgcugcuguccaccaacaaggccguggucagccucuccaacggcgugagcgugcugacguucaagguccuggaccucaagaacuacaucgacaagcagcugcugccgauccucaacaagcaguccugcagcauccccaacaucgagaccgugaucgaguuccagcagaagaacaaccggcugcuggagaucacccgcgaguucuccgugaacgccggggucaccacgcccgugagcaccuacaugcucaccaacuccgagcugcugagccucaucaacgacaugcccaucaccaacgaccagaagaagcugaugagcaacaacgugcagaucguccggcagcaguccuacagcaucaugugcaucaucaaggaggaggugcuggccuacgugguccagcucccgcuguacggcgugaucgacacgcccugcuggaagcugcacaccagcccccucugcaccaccaacacgaaggagggguccaacaucugccugacccgcaccgaccggggcugguacugcgacaacgccggcuccgugagcuucuucccccaggcggagaccugcaagguccaguccaaccgcguguucugcgacacgaugaacagccugacccucccguccgaggucaaccugugcaacguggacaucuucaaccccaaguacgacugcaagaucaugaccagcaagaccgacguguccagcuccgucaucacgagccugggggccaucguguccugcuacggcaagaccaagugcaccgccagcaacaagaaccgggggaucaucaagaccuucuccaacggcugcgacuacgugagcaacaagggcgucgacacgguguccguggggaacacccucuacugcgucaacaagcaggagggccagagccuguacgugaagggggagcccaucaucaacuucuacgacccccugguguucccgagcgacgaguucgacgccuccaucagccaggucaacgagaagaucaaccagucccucgccuucauccgcaagagcgacgagcugcugcacaacgugaacgcgggcaaguccaccaccaacaucaugaucaccacgaucaucaucgugaucaucgucauccuccugagccugaucgccguggggcuccugcuguacugcaaggcccgguccacccccgugacccugagcaaggaccagcucuccggcaucaacaacaucgccuucagcaacugaggacuaguacuggcugcaucucccuuuccucuguccuccauccuucucccaggauggugaagggggaccugguacccagugauccccaccccaggauccuaaaucaugacuuaccugcuaauaaaaacucauuggaaaagugagaagaucuaaaaaaaaaaaaaaaaaaaaaaaaaaaaaaaaaaaaaaaaaaaaaaaaaaaaaaaaaaaaaaaaugcaucccccccccccccccccccccccccccccccaaaggcucuuuucagagccaccagaauu

SEQ ID NO: 3363 - RNA, 1956 nt, Artificial Sequence
  mRNA product Design f-5 comprising derived and/or modified sequence from HRSV(A2)__F_DSCav1_mut3 (opt2)
gggagacuuucccauucuguagcagaauuugguguugccuguggucuuggucccgcggagaagcuuaccauggagcuccucauccucaaggccaacgccaucaccaccauccucaccgccgucaccuucugcuucgccuccggccagaacaucaccgaggaguucuaccaguccaccugcuccgccgucuccaagggcuaccucggcgcccuccgcaccggcugguacaccuccgucaucaccaucgagcucuccaacaucaaggagaucaagugcaacggcaccgacgccaaggucaagcucaucaagcaggagcucgacaaguacaagaacgccgucaccgaccuccagcuccucaugcaguccacccccgccaccggcuccggcuccgccaucugcuccggcgucgccgucugcaagguccuccaccucgagggcgaggucaacaagaucaaguccgcccuccucuccaccaacaaggccgucgucucccucuccaacggcgucuccguccucaccuucaagguccucgaccucaagaacuacaucgacaagcagcuccuccccauccucaacaagcaguccugcuccauccccaacaucgagaccgucaucgaguuccagcagaagaacaaccgccuccucgagaucacccgcgaguucuccgucaacgccggcgucaccacccccgucuccaccuacaugcucaccaacuccgagcuccucucccucaucaacgacaugcccaucaccaacgaccagaagaagcucauguccaacaacguccagaucguccgccagcaguccuacuccaucaugugcaucaucaaggaggagguccucgccuacgucguccagcucccccucuacggcgucaucgacacccccugcuggaagcuccacaccuccccccucugcaccaccaacaccaaggagggcuccaacaucugccucacccgcaccgaccgcggcugguacugcgacaacgccggcuccgucuccuucuucccccaggccgagaccugcaagguccaguccaaccgcgucuucugcgacaccaugaacucccucacccuccccuccgaggucaaccucugcaacgucgacaucuucaaccccaaguacgacugcaagaucaugaccuccaagaccgacgucuccuccuccgucaucaccucccucggcgccaucgucuccugcuacggcaagaccaagugcaccgccuccaacaagaaccgcggcaucaucaagaccuucuccaacggcugcgacuacgucuccaacaagggcgucgacaccgucuccgucggcaacacccucuacugcgucaacaagcaggagggccagucccucuacgucaagggcgagcccaucaucaacuucuacgacccccucgucuuccccuccgacgaguucgacgccuccaucucccaggucaacgagaagaucaaccagucccucgccuucauccgcaaguccgacgagcuccuccacaacgucaacgccggcaaguccaccaccaacaucaugaucaccaccaucaucaucgucaucaucgucauccuccucucccucaucgccgucggccuccuccucuacugcaaggcccgcuccacccccgucacccucuccaaggaccagcucuccggcaucaacaacaucgccuucuccaacugaggacuaguacuggcugcaucucccuuuccucuguccuccauccuucucccaggauggugaagggggaccugguacccagugauccccaccccaggauccuaaaucaugacuuaccugcuaauaaaaacucauuggaaaagugagaagaucuaaaaaaaaaaaaaaaaaaaaaaaaaaaaaaaaaaaaaaaaaaaaaaaaaaaaaaaaaaaaaaaaugcaucccccccccccccccccccccccccccccccaaaggcucuuuucagagccaccagaauu

SEQ ID NO: 3364 - RNA, 1956 nt, Artificial Sequence
  mRNA product Design f-5 comprising derived and/or modified sequence from HRSV(A2)__F_DSCav1_mut3 (opt3)
gggagacuuucccauucuguagcagaauuugguguugccuguggucuuggucccgcggagaagcuuaccauggagcugcucauccuuaaggccaacgcuauuaccacaauacugacugcagugacguucugcuuugccagcggccagaauaucaccgaagaguucuaccaauccacauguucugcggucucaaaaggguauuugggagcuuuaagaacugguugguacaccaguguuauuacaaucgaacugagcaacauuaaggagaucaaaugcaauggcaccgacgccaaggugaaacuaauaaagcaggaacucgauaaguauaaaaacgcaguaacugaccugcagcuucugaugcaguccacacccgccaccgggucuggaucggcuaucuguucaggcguggcagucugcaagguguugcaccucgagggugagguuaauaaaauuaagagcgcccugcugaguacgaacaaagcuguggucucccucucuaauggggugagcguauuaacuuuuaagguucuggaucuuaagaacuacaucgacaaacaauugcugccuauucuaaauaagcaguccuguucaaucccaaacauagaaaccgugauugaguuccagcagaaaaauaacaggcuccuggaaaucacacgggaguuuagugucaaugccggagugacuaccccggugagcacauauaugcuuaccaacucugagcuguugucccucauuaaugauaugcccaucacgaacgaccaaaagaaacugaugucaaacaauguccagaucguucgccagcagagcuacaguauuaugugcauaaucaaggaagagguguuagcguauguagugcaacugccucucuacggcgucauugauacuccauguuggaaacuucauacaucuccccugugcaccacuaacacaaaggaaggcuccaauaucuguuugacccgaacggaccgugggugguacugcgauaacgcaggaagcgugucguucuuuccucaggccgagaccuguaagguucagucuaauagaguguucugcgacacaaugaacucccuaacucugccaucagaagucaaucucugcaacguggauauauuuaaucccaaauaugacuguaagauuaugaccaguaaaacagauguaagcuccucuguuaucacuagccugggugcuaucgugucaugcuacggcaagaccaaauguacagccaguaacaagaauagggggauuaucaagaccuucuccaacggaugcgacuaugucagcaauaaaggcguggacacugucucuguggguaacacgcuuuacuguguuaauaagcaagaggggcagucacuguaugugaaaggagagccuauuauaaacuuuuacgauccauugguauucccgagugacgaauuugaugcaagcaucucccaggucaacgagaagauuaaucagucucucgcuuucauccggaaaucggacgaacuguuacacaacgugaaugccggcaagagcacaaccaacaucaugauuacuaccauaaucauuguuaucauugugauccugcuaucccucauagcggucggccugcuuuuguauugcaaggcccgcucaacacccgugacccugaguaaagaucaacucucugggaucaauaacauugcauucagcaauugaggacuaguacuggcugcaucucccuuuccucuguccuccauccuucucccaggauggugaagggggaccugguacccagugauccccaccccaggauccuaaaucaugacuuaccugcuaauaaaaacucauuggaaaagugagaagaucuaaaaaaaaaaaaaaaaaaaaaaaaaaaaaaaaaaaaaaaaaaaaaaaaaaaaaaaaaaaaaaaaugcaucccccccccccccccccccccccccccccccaaaggcucuuuucagagccaccagaauu

SEQ ID NO: 3365 - RNA, 1956 nt, Artificial Sequence
  mRNA product Design f-5 comprising derived and/or modified sequence from HRSV(A2)__F_DSCav1_mut3 (opt4)
gggagacuuucccauucuguagcagaauuugguguugccuguggucuuggucccgcggagaagcuuaccauggagcugcugauccugaaggccaacgccaucaccaccauccugaccgccgugaccuucugcuucgccagcggccagaacaucaccgaggaguucuaccagagcaccugcagcgccgugagcaagggcuaccugggcgcccugagaaccggcugguacaccagcgugaucaccaucgagcugagcaacaucaaggagaucaagugcaacggcaccgacgccaaggugaagcugaucaagcaggagcuggacaaguacaagaacgccgugaccgaccugcagcugcugaugcagagcacccccgccaccggcagcggcagcgccaucugcagcggcguggccgugugcaaggugcugcaccuggagggcgaggugaacaagaucaagagcgcccugcugagcaccaacaaggccguggugagccugagcaacggcgugagcgugcugaccuucaaggugcuggaccugaagaacuacaucgacaagcagcugcugcccauccugaacaagcagagcugcagcauccccaacaucgagaccgugaucgaguuccagcagaagaacaacagacugcuggagaucaccagagaguucagcgugaacgccggcgugaccacccccgugagcaccuacaugcugaccaacagcgagcugcugagccugaucaacgacaugcccaucaccaacgaccagaagaagcugaugagcaacaacgugcagaucgugagacagcagagcuacagcaucaugugcaucaucaaggaggaggugcuggccuacguggugcagcugccccuguacggcgugaucgacacccccugcuggaagcugcacaccagcccccugugcaccaccaacaccaaggagggcagcaacaucugccugaccagaaccgacagaggcugguacugcgacaacgccggcagcgugagcuucuucccccaggccgagaccugcaaggugcagagcaacagaguguucugcgacaccaugaacagccugacccugcccagcgaggugaaccugugcaacguggacaucuucaaccccaaguacgacugcaagaucaugaccagcaagaccgacgugagcagcagcgugaucaccagccugggcgccaucgugagcugcuacggcaagaccaagugcaccgccagcaacaagaacagaggcaucaucaagaccuucagcaacggcugcgacuacgugagcaacaagggcguggacaccgugagcgugggcaacacccuguacugcgugaacaagcaggagggccagagccuguacgugaagggcgagcccaucaucaacuucuacgacccccugguguuccccagcgacgaguucgacgccagcaucagccaggugaacgagaagaucaaccagagccuggccuucaucagaaagagcgacgagcugcugcacaacgugaacgccggcaagagcaccaccaacaucaugaucaccaccaucaucaucgugaucaucgugauccugcugagccugaucgccgugggccugcugcuguacugcaaggccagaagcacccccgugacccugagcaaggaccagcugagcggcaucaacaacaucgccuucagcaacugaggacuaguacuggcugcaucucccuuuccucuguccuccauccuucucccaggauggugaagggggaccugguacccagugauccccaccccaggauccuaaaucaugacuuaccugcuaauaaaaacucauuggaaaagugagaagaucuaaaaaaaaaaaaaaaaaaaaaaaaaaaaaaaaaaaaaaaaaaaaaaaaaaaaaaaaaaaaaaaaugcaucccccccccccccccccccccccccccccccaaaggcucuuuucagagccaccagaauu

SEQ ID NO: 3366 - RNA, 1956 nt, Artificial Sequence
  mRNA product Design f-5 comprising derived and/or modified sequence from HRSV(A2)__F_DSCav1_mut3 (opt5)
gggagacuuucccauucuguagcagaauuugguguugccuguggucuuggucccgcggagaagcuuaccauggagcugcucauccugaaggccaacgcuauuaccacaauccuuacggccgugaccuucugcuuugcgagcggccagaauauuacagaagaguucuaccaauccaccuguucugcugucagcaaaggguaucugggagcccucagaacaggcugguacaccuccguuaucacaauugaacugucuaacaucaaggagaucaaaugcaaugggaccgacgccaaggugaaacuuauuaagcaggaacuggauaaguauaaaaacgcugugacggaccuccagcugcugaugcagagcacccccgccacaggauccggcucugcuaucuguagcggggucgccgugugcaagguucuccaccuggagggagaggugaauaaaauuaaguccgcgcuucugagcaccaacaaagccgucgugucucucuccaauggcguuagcgugcugacauuuaagguccuugaucugaagaacuacaucgacaaacaacuccugccuauucugaauaagcagucuuguuccaucccgaacauugaaaccgugaucgaguuccagcagaaaaauaaccggcuccuggaaaucacgcgcgaguuuagcgugaaugcuggcgucacaacccccguuucuacauauaugcuuaccaacuccgagcugcucagccugauuaaugauaugccuaucaccaacgaccaaaagaaacuuauguccaacaaugugcagauugugagacagcagucuuacagcaucaugugcauuaucaaggaagagguccuggccuaugugguucaacucccccuguacggggugaucgauacaccuuguuggaaacugcauacgagcccccucugcaccacaaacaccaaggaaggauccaauauuugucugacacggaccgaccgcggcugguacugcgauaacgcugggucugucuccuucuuuccucaggccgagacguguaaggugcagagcaauagaguuuucugcgacacaaugaacucucuuacccugccgagcgaagugaaucucugcaacgucgauaucuuuaaucccaaauaugacuguaagauuaugaccuccaaaacagaugugucuagcuccgucaucaccagccugggagcgauugugucuugcuacggcaagacaaaauguacggccuccaacaagaaucgggggaucaucaagaccuucagcaacggaugcgacuauguuucuaauaaaggcguggacacagucuccgugggcaacacccuuuacuguguuaauaagcaagaggggcagagccuguaugugaaaggagagccuauuaucaacuuuuacgauccccucgucuucccuuccgacgaauuugaugcuucuauuagccaggugaacgagaagaucaaucagucccuggccuucauucgcaaaucugacgaacugcuccacaacgugaaugcuggcaagagcacaaccaacaucaugauuacgaccaucaucauuguuaucauugucauccugcuuucccugauugccguggggcuccugcuguauugcaaggccagaagcacacccgugacccuuucuaaagaucaacucuccggaaucaauaacaucgcuuucagcaauugaggacuaguacuggcugcaucucccuuuccucuguccuccauccuucucccaggauggugaagggggaccugguacccagugauccccaccccaggauccuaaaucaugacuuaccugcuaauaaaaacucauuggaaaagugagaagaucuaaaaaaaaaaaaaaaaaaaaaaaaaaaaaaaaaaaaaaaaaaaaaaaaaaaaaaaaaaaaaaaaugcaucccccccccccccccccccccccccccccccaaaggcucuuuucagagccaccagaauu

SEQ ID NO: 3367 - RNA, 1956 nt, Artificial Sequence
  mRNA product Design f-5 comprising derived and/or modified sequence from HRSV(A2)__F_DSCav1_mut3 (opt6)
gggagacuuucccauucuguagcagaauuugguguugccuguggucuuggucccgcggagaagcuuaccauggaauuacucauacuaaaagccaaugccauaaccacuauucuaacagcaguaacauucuguuucgccucaggacaaaacauaacagaagaauuuuaucaauccaccuguuccgcagucucgaaaggcuaccuuggcgcacuaagaaccggaugguauacaucaguaauaaccauugaacuaucaaauaucaaagaaauaaaaugcaacggaacugacgcaaaagucaaacuaauaaaacaagaauuagacaaauacaaaaacgccguuacagacuuacaacuacuaaugcaaucaacuccagcaacaggaucaggaucugcuauaugcucaggugucgccguauguaaaguguuacaccucgaaggcgaaguaaacaaaauaaaaucagcacuacuauccacaaauaaagcaguaguaucacuauccaaugguguaucaguacucacauucaaaguacuagacuuaaaaaauuauauagauaaacaauuacuaccaauauuaaacaaacaaucaugcucaauaccaaacauagaaaccgucauugaauuucaacaaaaaaacaaucgacuucuugaaauaacacgagaauuuucaguaaaugccggaguaacaaccccagucucaacauacauguuaaccaacucugaacuccuaagccuaaucaacgacaugcccauaacuaacgaccaaaaaaaacuaauguccaauaauguccaaauaguaagacaacaauccuacucaauaaugugcauuauaaaagaagaaguccucgccuauguaguacaacuacccuuauacggaguaauugacacaccauguuggaaacuacauacaucaccacuaugcaccacuaacacaaaagaaggcuccaacauaugccuaacccgaacagaucgcggaugguauugcgacaacgcaggaaguguauccuucuuuccacaagcagaaacaugcaaaguacaauccaacagaguauucugugacaccaugaacucucuaacacuaccuuccgaaguaaauuuaugcaacguagacauauuuaaucccaaauacgacuguaaaauaaugaccucaaaaacugaugucucaucaucagucauuacaucacucggagcaauagucaguugcuauggaaaaaccaaaugcacagcuaguaacaaaaacagggguauaauaaaaacauuuucaaacggaugcgauuacguaucaaauaaaggaguagacaccguauccguaggaaauacucucuacugcguaaacaaacaagaaggacaaucccuauacguaaaaggcgaaccaaucauuaacuuuuacgacccacuuguauuuccaucagacgaauuugaugccucaauaucccaagucaaugaaaaaauaaaccaaagucuagcauucauccgaaaaucagaugaacuuuuacacaacguaaacgccggaaaaucaacaacaaacaucaugaucacaacaaucaucauaguaauaauaguuauacuacuuuccuuaauagcagucggccuacuacucuacugcaaagcacgauccacaccaguaaccuuaucuaaagaccaacucucaggcauaaacaacauagcauucucaaacuaaggacuaguacuggcugcaucucccuuuccucuguccuccauccuucucccaggauggugaagggggaccugguacccagugauccccaccccaggauccuaaaucaugacuuaccugcuaauaaaaacucauuggaaaagugagaagaucuaaaaaaaaaaaaaaaaaaaaaaaaaaaaaaaaaaaaaaaaaaaaaaaaaaaaaaaaaaaaaaaaugcaucccccccccccccccccccccccccccccccaaaggcucuuuucagagccaccagaauu

SEQ ID NO: 3368 - RNA, 1956 nt, Artificial Sequence
  mRNA product Design f-5 comprising derived and/or modified sequence from HRSV(A2)__F_DSCav1_mut3 (opt11)
gggagacuuucccauucuguagcagaauuugguguugccuguggucuuggucccgcggagaagcuuaccauggaacuccucauccuuaaagcaaacgccaucacaaccauccucacagcagucacuuucugcuucgcauccggacaaaacaucacagaagaguucuaucaauccacgugcuccgcaguuuccaaaggauaccuuggagccuuacgaaccggcugguacaccuccgucaucaccauagaacucagcaacaucaaagaaaucaaaugcaacggaaccgacgcaaaagucaaacucaucaaacaagaacuagacaaauacaaaaacgcagucaccgaccuccaacuacucaugcaaucaacccccgcaaccggcuccggcuccgccaucugcuccggaguagccguaugcaaaguccuccaccucgaaggcgaaguuaacaagaucaaguccgcacuccuaucaaccaacaaagcagucgucucccuauccaacggcgucuccguauuaacauucaaaguccucgaccucaaaaacuacauagacaaacagcuacuccccauccuaaacaaacaauccugcuccauccccaacaucgaaacugucaucgaguuccaacagaaaaacaaccgccuccuagaaaucacccgagaguucuccguaaacgccggcgucacuacccccgucucuaccuauaugcuaaccaacucugaacuccuaucccuaaucaacgauaugcccauaacuaacgaccaaaagaaacuuauguccaacaacguacaaauaguccggcaacaaucauacucuaucaugugcaucaucaaagaagaaguacuugccuacguuguccaacucccacuauacggcgucauagacacuccaugcuggaaacuucacaccucaccccucugcaccacuaacacuaaagaaggcucuaacaucugccuuacccgcaccgaccgcggaugguacugcgacaacgcaggcucaguuagcuucuucccacaagccgaaaccugcaaaguccagucaaaccgugucuucugcgauaccaugaacucgcucacccucccuuccgaagucaaccucugcaacgucgacaucuucaaccccaaauacgacugcaaaaucaugaccucaaaaaccgacguaucuucuuccgucaucaccucccucggcgccaucguauccugcuacggcaaaaccaaaugcacugcaucaaacaaaaaccgaggcaucaucaaaaccuucucgaacggaugcgacuacguauccaacaagggcgucgacacagucuccguugguaacacccucuacugcgucaacaaacaagaaggccaaucccuauacguaaaaggcgaacccaucaucaacuucuacgacccccucgucuuccccagugacgaauuugacgccuccaucucccaagucaacgaaaagaucaaccaaucccuugccuucauacgcaaauccgacgaacuccuacacaacguuaacgccggaaaaucaacaaccaacaucaugaucacaaccaucauaaucgucauaaucgucauacuccucucccucauagccgucggccugcuauuguacuguaaagcccgcuccacaccagucacacuuucaaaagaccaacucuccgggaucaacaacaucgccuucuccaacuaaggacuaguacuggcugcaucucccuuuccucuguccuccauccuucucccaggauggugaagggggaccugguacccagugauccccaccccaggauccuaaaucaugacuuaccugcuaauaaaaacucauuggaaaagugagaagaucuaaaaaaaaaaaaaaaaaaaaaaaaaaaaaaaaaaaaaaaaaaaaaaaaaaaaaaaaaaaaaaaaugcaucccccccccccccccccccccccccccccccaaaggcucuuuucagagccaccagaauu

SEQ ID NO: 3369 - RNA, 1952 nt, Artificial Sequence
  mRNA product Design g-1 comprising derived and/or modified sequence from HRSV(A2)__F_DSCav1_mut3 (opt1)
gggagacuuucccauucuguagcagaauuugguguugccuguggucuuggucccgcggagaagcuuaccauggagcugcucauccugaaggccaacgccaucaccaccauccugacggcggugaccuucugcuucgccagcggccagaacaucaccgaggaguucuaccaguccacgugcagcgccgucuccaagggguaccucggcgcccugcggaccggcugguacaccuccgugaucaccaucgagcugagcaacaucaaggagaucaagugcaacgggaccgacgccaaggugaagcucaucaagcaggagcuggacaaguacaagaacgcggucacggaccugcagcuccugaugcaguccaccccggcaaccggcuccggcuccgccaucugcagcggcgucgccgugugcaaggugcugcaccucgagggggaggucaacaagaucaagagcgcccugcuguccaccaacaaggccguggugagccucuccaacggcgucagcgugcugaccuucaaggugcuggaccucaagaacuacaucgacaagcagcugcugcccauccugaacaagcagagcugcuccauccccaacaucgagacggugaucgaguuccagcagaagaacaaccggcuccuggagaucacccgcgaguucagcgugaacgccggggucaccacccccguguccacguacaugcugaccaacagcgagcuccugucccugaucaacgacaugccgaucaccaacgaccagaagaagcucaugagcaacaacgugcagaucguccggcagcaguccuacagcaucaugugcaucaucaaggaggaggugcuggcguacgugguccagcugccccucuacggcgugaucgacacccccugcuggaagcugcacacgagcccccugugcaccaccaacaccaaggagggguccaacaucugccucacgcgcaccgaccggggcugguacugcgacaacgccggcagcgucuccuucuucccgcaggccgagaccugcaaggugcagagcaaccgcguguucugcgacaccaugaacucccugacgcugcccagcgagguaaaccucugcaacgucgacaucuucaaccccaaguacgacugcaagaucaugaccuccaagaccgacgugagcuccagcgugaucaccucccugggggccaucgucagcugcuacggcaagacgaagugcaccgccagcaacaagaaccgggggaucaucaagaccuucuccaacggcugcgacuacgugagcaacaagggcguggacaccguguccgucgggaacacccuguacugcgugaacaagcaggagggccagagccucuacgugaagggggagcccaucaucaacuucuacgacccgcuggucuuccccuccgacgaguucgacgcgagcaucucccaggugaacgagaagaucaaccagagccuggccuucauccgcaaguccgacgagcugcuccacaacgugaacgccggcaagagcacgaccaacaucaugaucaccaccaucaucaucgucaucaucgugauccugcugucccucaucgccguggggcugcugcucuacugcaaggcccggagcacgcccgucacccuguccaaggaccagcugagcggcaucaacaacaucgcguucuccaacugaggacuaguggaagcauuuuccuggcugauuaaaagaaauuacucagcuauggucaucuguuccuguuagaaggcuaugcagcauauuauauacuaugcgcauguuaugaaaugcauaauaaaaaauuuuaaaaaaucuaaaagaucuaaaaaaaaaaaaaaaaaaaaaaaaaaaaaaaaaaaaaaaaaaaaaaaaaaaaaaaaaaaaaaaaugcaucccccccccccccccccccccccccccccccaaaggcucuuuucagagccaccagaauu

SEQ ID NO: 3370 - RNA, 1952 nt, Artificial Sequence
  mRNA product Design g-1 comprising derived and/or modified sequence from HRSV(A2)__F_DSCav1_mut3 (opt1)
gggagacuuucccauucuguagcagaauuugguguugccuguggucuuggucccgcggagaagcuuaccauggagcugcucauccugaaggccaacgccaucaccaccauccugacggcggugaccuucugcuucgccagcggccagaacaucaccgaggaguucuaccaguccacgugcagcgccgucuccaagggguaccucggcgcccugcgcaccgggugguacaccagcgugaucaccaucgagcuguccaacaucaaggagaucaagugcaacggcaccgacgccaaggugaagcucaucaagcaggagcuggacaaguacaagaacgcggucacggaccugcagcuccugaugcagagcacccccgccaccggguccggcagcgccaucugcuccggcguggccgugugcaagguccugcaccucgagggggaggugaacaagaucaagagcgcgcugcuguccaccaacaaggccguggucagccucuccaacggcgugagcgugcugacguucaagguccuggaccucaagaacuacaucgacaagcagcugcugccgauccucaacaagcaguccugcagcauccccaacaucgagaccgugaucgaguuccagcagaagaacaaccggcugcuggagaucacccgcgaguucuccgugaacgccggggucaccacgcccgugagcaccuacaugcucaccaacuccgagcugcugagccucaucaacgacaugcccaucaccaacgaccagaagaagcugaugagcaacaacgugcagaucguccggcagcaguccuacagcaucaugugcaucaucaaggaggaggugcuggccuacgugguccagcucccgcuguacggcgugaucgacacgcccugcuggaagcugcacaccagcccccucugcaccaccaacacgaaggagggguccaacaucugccugacccgcaccgaccggggcugguacugcgacaacgccggcuccgugagcuucuucccccaggcggagaccugcaagguccaguccaaccgcguguucugcgacacgaugaacagccugacccucccguccgaggucaaccugugcaacguggacaucuucaaccccaaguacgacugcaagaucaugaccagcaagaccgacguguccagcuccgucaucacgagccugggggccaucguguccugcuacggcaagaccaagugcaccgccagcaacaagaaccgggggaucaucaagaccuucuccaacggcugcgacuacgugagcaacaagggcgucgacacgguguccguggggaacacccucuacugcgucaacaagcaggagggccagagccuguacgugaagggggagcccaucaucaacuucuacgacccccugguguucccgagcgacgaguucgacgccuccaucagccaggucaacgagaagaucaaccagucccucgccuucauccgcaagagcgacgagcugcugcacaacgugaacgcgggcaaguccaccaccaacaucaugaucaccacgaucaucaucgugaucaucgucauccuccugagccugaucgccguggggcuccugcuguacugcaaggcccgguccacccccgugacccugagcaaggaccagcucuccggcaucaacaacaucgccuucagcaacugaggacuaguggaagcauuuuccuggcugauuaaaagaaauuacucagcuauggucaucuguuccuguuagaaggcuaugcagcauauuauauacuaugcgcauguuaugaaaugcauaauaaaaaauuuuaaaaaaucuaaaagaucuaaaaaaaaaaaaaaaaaaaaaaaaaaaaaaaaaaaaaaaaaaaaaaaaaaaaaaaaaaaaaaaaugcaucccccccccccccccccccccccccccccccaaaggcucuuuucagagccaccagaauu

SEQ ID NO: 3371 - RNA, 1952 nt, Artificial Sequence
  mRNA product Design g-1 comprising derived and/or modified sequence from HRSV(A2)__F_DSCav1_mut3 (opt2)
gggagacuuucccauucuguagcagaauuugguguugccuguggucuuggucccgcggagaagcuuaccauggagcuccucauccucaaggccaacgccaucaccaccauccucaccgccgucaccuucugcuucgccuccggccagaacaucaccgaggaguucuaccaguccaccugcuccgccgucuccaagggcuaccucggcgcccuccgcaccggcugguacaccuccgucaucaccaucgagcucuccaacaucaaggagaucaagugcaacggcaccgacgccaaggucaagcucaucaagcaggagcucgacaaguacaagaacgccgucaccgaccuccagcuccucaugcaguccacccccgccaccggcuccggcuccgccaucugcuccggcgucgccgucugcaagguccuccaccucgagggcgaggucaacaagaucaaguccgcccuccucuccaccaacaaggccgucgucucccucuccaacggcgucuccguccucaccuucaagguccucgaccucaagaacuacaucgacaagcagcuccuccccauccucaacaagcaguccugcuccauccccaacaucgagaccgucaucgaguuccagcagaagaacaaccgccuccucgagaucacccgcgaguucuccgucaacgccggcgucaccacccccgucuccaccuacaugcucaccaacuccgagcuccucucccucaucaacgacaugcccaucaccaacgaccagaagaagcucauguccaacaacguccagaucguccgccagcaguccuacuccaucaugugcaucaucaaggaggagguccucgccuacgucguccagcucccccucuacggcgucaucgacacccccugcuggaagcuccacaccuccccccucugcaccaccaacaccaaggagggcuccaacaucugccucacccgcaccgaccgcggcugguacugcgacaacgccggcuccgucuccuucuucccccaggccgagaccugcaagguccaguccaaccgcgucuucugcgacaccaugaacucccucacccuccccuccgaggucaaccucugcaacgucgacaucuucaaccccaaguacgacugcaagaucaugaccuccaagaccgacgucuccuccuccgucaucaccucccucggcgccaucgucuccugcuacggcaagaccaagugcaccgccuccaacaagaaccgcggcaucaucaagaccuucuccaacggcugcgacuacgucuccaacaagggcgucgacaccgucuccgucggcaacacccucuacugcgucaacaagcaggagggccagucccucuacgucaagggcgagcccaucaucaacuucuacgacccccucgucuuccccuccgacgaguucgacgccuccaucucccaggucaacgagaagaucaaccagucccucgccuucauccgcaaguccgacgagcuccuccacaacgucaacgccggcaaguccaccaccaacaucaugaucaccaccaucaucaucgucaucaucgucauccuccucucccucaucgccgucggccuccuccucuacugcaaggcccgcuccacccccgucacccucuccaaggaccagcucuccggcaucaacaacaucgccuucuccaacugaggacuaguggaagcauuuuccuggcugauuaaaagaaauuacucagcuauggucaucuguuccuguuagaaggcuaugcagcauauuauauacuaugcgcauguuaugaaaugcauaauaaaaaauuuuaaaaaaucuaaaagaucuaaaaaaaaaaaaaaaaaaaaaaaaaaaaaaaaaaaaaaaaaaaaaaaaaaaaaaaaaaaaaaaaugcaucccccccccccccccccccccccccccccccaaaggcucuuuucagagccaccagaauu

SEQ ID NO: 3372 - RNA, 1952 nt, Artificial Sequence
  mRNA product Design g-1 comprising derived and/or modified sequence from HRSV(A2)__F_DSCav1_mut3 (opt3)
gggagacuuucccauucuguagcagaauuugguguugccuguggucuuggucccgcggagaagcuuaccauggagcugcucauccuuaaggccaacgcuauuaccacaauacugacugcagugacguucugcuuugccagcggccagaauaucaccgaagaguucuaccaauccacauguucugcggucucaaaaggguauuugggagcuuuaagaacugguugguacaccaguguuauuacaaucgaacugagcaacauuaaggagaucaaaugcaauggcaccgacgccaaggugaaacuaauaaagcaggaacucgauaaguauaaaaacgcaguaacugaccugcagcuucugaugcaguccacacccgccaccgggucuggaucggcuaucuguucaggcguggcagucugcaagguguugcaccucgagggugagguuaauaaaauuaagagcgcccugcugaguacgaacaaagcuguggucucccucucuaauggggugagcguauuaacuuuuaagguucuggaucuuaagaacuacaucgacaaacaauugcugccuauucuaaauaagcaguccuguucaaucccaaacauagaaaccgugauugaguuccagcagaaaaauaacaggcuccuggaaaucacacgggaguuuagugucaaugccggagugacuaccccggugagcacauauaugcuuaccaacucugagcuguugucccucauuaaugauaugcccaucacgaacgaccaaaagaaacugaugucaaacaauguccagaucguucgccagcagagcuacaguauuaugugcauaaucaaggaagagguguuagcguauguagugcaacugccucucuacggcgucauugauacuccauguuggaaacuucauacaucuccccugugcaccacuaacacaaaggaaggcuccaauaucuguuugacccgaacggaccgugggugguacugcgauaacgcaggaagcgugucguucuuuccucaggccgagaccuguaagguucagucuaauagaguguucugcgacacaaugaacucccuaacucugccaucagaagucaaucucugcaacguggauauauuuaaucccaaauaugacuguaagauuaugaccaguaaaacagauguaagcuccucuguuaucacuagccugggugcuaucgugucaugcuacggcaagaccaaauguacagccaguaacaagaauagggggauuaucaagaccuucuccaacggaugcgacuaugucagcaauaaaggcguggacacugucucuguggguaacacgcuuuacuguguuaauaagcaagaggggcagucacuguaugugaaaggagagccuauuauaaacuuuuacgauccauugguauucccgagugacgaauuugaugcaagcaucucccaggucaacgagaagauuaaucagucucucgcuuucauccggaaaucggacgaacuguuacacaacgugaaugccggcaagagcacaaccaacaucaugauuacuaccauaaucauuguuaucauugugauccugcuaucccucauagcggucggccugcuuuuguauugcaaggcccgcucaacacccgugacccugaguaaagaucaacucucugggaucaauaacauugcauucagcaauugaggacuaguggaagcauuuuccuggcugauuaaaagaaauuacucagcuauggucaucuguuccuguuagaaggcuaugcagcauauuauauacuaugcgcauguuaugaaaugcauaauaaaaaauuuuaaaaaaucuaaaagaucuaaaaaaaaaaaaaaaaaaaaaaaaaaaaaaaaaaaaaaaaaaaaaaaaaaaaaaaaaaaaaaaaugcaucccccccccccccccccccccccccccccccaaaggcucuuuucagagccaccagaauu

SEQ ID NO: 3373 - RNA, 1952 nt, Artificial Sequence
  mRNA product Design g-1 comprising derived and/or modified sequence from HRSV(A2)__F_DSCav1_mut3 (opt4)
gggagacuuucccauucuguagcagaauuugguguugccuguggucuuggucccgcggagaagcuuaccauggagcugcugauccugaaggccaacgccaucaccaccauccugaccgccgugaccuucugcuucgccagcggccagaacaucaccgaggaguucuaccagagcaccugcagcgccgugagcaagggcuaccugggcgcccugagaaccggcugguacaccagcgugaucaccaucgagcugagcaacaucaaggagaucaagugcaacggcaccgacgccaaggugaagcugaucaagcaggagcuggacaaguacaagaacgccgugaccgaccugcagcugcugaugcagagcacccccgccaccggcagcggcagcgccaucugcagcggcguggccgugugcaaggugcugcaccuggagggcgaggugaacaagaucaagagcgcccugcugagcaccaacaaggccguggugagccugagcaacggcgugagcgugcugaccuucaaggugcuggaccugaagaacuacaucgacaagcagcugcugcccauccugaacaagcagagcugcagcauccccaacaucgagaccgugaucgaguuccagcagaagaacaacagacugcuggagaucaccagagaguucagcgugaacgccggcgugaccacccccgugagcaccuacaugcugaccaacagcgagcugcugagccugaucaacgacaugcccaucaccaacgaccagaagaagcugaugagcaacaacgugcagaucgugagacagcagagcuacagcaucaugugcaucaucaaggaggaggugcuggccuacguggugcagcugccccuguacggcgugaucgacacccccugcuggaagcugcacaccagcccccugugcaccaccaacaccaaggagggcagcaacaucugccugaccagaaccgacagaggcugguacugcgacaacgccggcagcgugagcuucuucccccaggccgagaccugcaaggugcagagcaacagaguguucugcgacaccaugaacagccugacccugcccagcgaggugaaccugugcaacguggacaucuucaaccccaaguacgacugcaagaucaugaccagcaagaccgacgugagcagcagcgugaucaccagccugggcgccaucgugagcugcuacggcaagaccaagugcaccgccagcaacaagaacagaggcaucaucaagaccuucagcaacggcugcgacuacgugagcaacaagggcguggacaccgugagcgugggcaacacccuguacugcgugaacaagcaggagggccagagccuguacgugaagggcgagcccaucaucaacuucuacgacccccugguguuccccagcgacgaguucgacgccagcaucagccaggugaacgagaagaucaaccagagccuggccuucaucagaaagagcgacgagcugcugcacaacgugaacgccggcaagagcaccaccaacaucaugaucaccaccaucaucaucgugaucaucgugauccugcugagccugaucgccgugggccugcugcuguacugcaaggccagaagcacccccgugacccugagcaaggaccagcugagcggcaucaacaacaucgccuucagcaacugaggacuaguggaagcauuuuccuggcugauuaaaagaaauuacucagcuauggucaucuguuccuguuagaaggcuaugcagcauauuauauacuaugcgcauguuaugaaaugcauaauaaaaaauuuuaaaaaaucuaaaagaucuaaaaaaaaaaaaaaaaaaaaaaaaaaaaaaaaaaaaaaaaaaaaaaaaaaaaaaaaaaaaaaaaugcaucccccccccccccccccccccccccccccccaaaggcucuuuucagagccaccagaauu

SEQ ID NO: 3374 - RNA, 1952 nt, Artificial Sequence
  mRNA product Design g-1 comprising derived and/or modified sequence from HRSV(A2)__F_DSCav1_mut3 (opt5)
gggagacuuucccauucuguagcagaauuugguguugccuguggucuuggucccgcggagaagcuuaccauggagcugcucauccugaaggccaacgcuauuaccacaauccuuacggccgugaccuucugcuuugcgagcggccagaauauuacagaagaguucuaccaauccaccuguucugcugucagcaaaggguaucugggagcccucagaacaggcugguacaccuccguuaucacaauugaacugucuaacaucaaggagaucaaaugcaaugggaccgacgccaaggugaaacuuauuaagcaggaacuggauaaguauaaaaacgcugugacggaccuccagcugcugaugcagagcacccccgccacaggauccggcucugcuaucuguagcggggucgccgugugcaagguucuccaccuggagggagaggugaauaaaauuaaguccgcgcuucugagcaccaacaaagccgucgugucucucuccaauggcguuagcgugcugacauuuaagguccuugaucugaagaacuacaucgacaaacaacuccugccuauucugaauaagcagucuuguuccaucccgaacauugaaaccgugaucgaguuccagcagaaaaauaaccggcuccuggaaaucacgcgcgaguuuagcgugaaugcuggcgucacaacccccguuucuacauauaugcuuaccaacuccgagcugcucagccugauuaaugauaugccuaucaccaacgaccaaaagaaacuuauguccaacaaugugcagauugugagacagcagucuuacagcaucaugugcauuaucaaggaagagguccuggccuaugugguucaacucccccuguacggggugaucgauacaccuuguuggaaacugcauacgagcccccucugcaccacaaacaccaaggaaggauccaauauuugucugacacggaccgaccgcggcugguacugcgauaacgcugggucugucuccuucuuuccucaggccgagacguguaaggugcagagcaauagaguuuucugcgacacaaugaacucucuuacccugccgagcgaagugaaucucugcaacgucgauaucuuuaaucccaaauaugacuguaagauuaugaccuccaaaacagaugugucuagcuccgucaucaccagccugggagcgauugugucuugcuacggcaagacaaaauguacggccuccaacaagaaucgggggaucaucaagaccuucagcaacggaugcgacuauguuucuaauaaaggcguggacacagucuccgugggcaacacccuuuacuguguuaauaagcaagaggggcagagccuguaugugaaaggagagccuauuaucaacuuuuacgauccccucgucuucccuuccgacgaauuugaugcuucuauuagccaggugaacgagaagaucaaucagucccuggccuucauucgcaaaucugacgaacugcuccacaacgugaaugcuggcaagagcacaaccaacaucaugauuacgaccaucaucauuguuaucauugucauccugcuuucccugauugccguggggcuccugcuguauugcaaggccagaagcacacccgugacccuuucuaaagaucaacucuccggaaucaauaacaucgcuuucagcaauugaggacuaguggaagcauuuuccuggcugauuaaaagaaauuacucagcuauggucaucuguuccuguuagaaggcuaugcagcauauuauauacuaugcgcauguuaugaaaugcauaauaaaaaauuuuaaaaaaucuaaaagaucuaaaaaaaaaaaaaaaaaaaaaaaaaaaaaaaaaaaaaaaaaaaaaaaaaaaaaaaaaaaaaaaaugcaucccccccccccccccccccccccccccccccaaaggcucuuuucagagccaccagaauu

SEQ ID NO: 3375 - RNA, 1952 nt, Artificial Sequence
  mRNA product Design g-1 comprising derived and/or modified sequence from HRSV(A2)__F_DSCav1_mut3 (opt6)
gggagacuuucccauucuguagcagaauuugguguugccuguggucuuggucccgcggagaagcuuaccauggaauuacucauacuaaaagccaaugccauaaccacuauucuaacagcaguaacauucuguuucgccucaggacaaaacauaacagaagaauuuuaucaauccaccuguuccgcagucucgaaaggcuaccuuggcgcacuaagaaccggaugguauacaucaguaauaaccauugaacuaucaaauaucaaagaaauaaaaugcaacggaacugacgcaaaagucaaacuaauaaaacaagaauuagacaaauacaaaaacgccguuacagacuuacaacuacuaaugcaaucaacuccagcaacaggaucaggaucugcuauaugcucaggugucgccguauguaaaguguuacaccucgaaggcgaaguaaacaaaauaaaaucagcacuacuauccacaaauaaagcaguaguaucacuauccaaugguguaucaguacucacauucaaaguacuagacuuaaaaaauuauauagauaaacaauuacuaccaauauuaaacaaacaaucaugcucaauaccaaacauagaaaccgucauugaauuucaacaaaaaaacaaucgacuucuugaaauaacacgagaauuuucaguaaaugccggaguaacaaccccagucucaacauacauguuaaccaacucugaacuccuaagccuaaucaacgacaugcccauaacuaacgaccaaaaaaaacuaauguccaauaauguccaaauaguaagacaacaauccuacucaauaaugugcauuauaaaagaagaaguccucgccuauguaguacaacuacccuuauacggaguaauugacacaccauguuggaaacuacauacaucaccacuaugcaccacuaacacaaaagaaggcuccaacauaugccuaacccgaacagaucgcggaugguauugcgacaacgcaggaaguguauccuucuuuccacaagcagaaacaugcaaaguacaauccaacagaguauucugugacaccaugaacucucuaacacuaccuuccgaaguaaauuuaugcaacguagacauauuuaaucccaaauacgacuguaaaauaaugaccucaaaaacugaugucucaucaucagucauuacaucacucggagcaauagucaguugcuauggaaaaaccaaaugcacagcuaguaacaaaaacagggguauaauaaaaacauuuucaaacggaugcgauuacguaucaaauaaaggaguagacaccguauccguaggaaauacucucuacugcguaaacaaacaagaaggacaaucccuauacguaaaaggcgaaccaaucauuaacuuuuacgacccacuuguauuuccaucagacgaauuugaugccucaauaucccaagucaaugaaaaaauaaaccaaagucuagcauucauccgaaaaucagaugaacuuuuacacaacguaaacgccggaaaaucaacaacaaacaucaugaucacaacaaucaucauaguaauaauaguuauacuacuuuccuuaauagcagucggccuacuacucuacugcaaagcacgauccacaccaguaaccuuaucuaaagaccaacucucaggcauaaacaacauagcauucucaaacuaaggacuaguggaagcauuuuccuggcugauuaaaagaaauuacucagcuauggucaucuguuccuguuagaaggcuaugcagcauauuauauacuaugcgcauguuaugaaaugcauaauaaaaaauuuuaaaaaaucuaaaagaucuaaaaaaaaaaaaaaaaaaaaaaaaaaaaaaaaaaaaaaaaaaaaaaaaaaaaaaaaaaaaaaaaugcaucccccccccccccccccccccccccccccccaaaggcucuuuucagagccaccagaauu

SEQ ID NO: 3376 - RNA, 1952 nt, Artificial Sequence
  mRNA product Design g-1 comprising derived and/or modified sequence from HRSV(A2)__F_DSCav1_mut3 (opt11)
gggagacuuucccauucuguagcagaauuugguguugccuguggucuuggucccgcggagaagcuuaccauggaacuccucauccuuaaagcaaacgccaucacaaccauccucacagcagucacuuucugcuucgcauccggacaaaacaucacagaagaguucuaucaauccacgugcuccgcaguuuccaaaggauaccuuggagccuuacgaaccggcugguacaccuccgucaucaccauagaacucagcaacaucaaagaaaucaaaugcaacggaaccgacgcaaaagucaaacucaucaaacaagaacuagacaaauacaaaaacgcagucaccgaccuccaacuacucaugcaaucaacccccgcaaccggcuccggcuccgccaucugcuccggaguagccguaugcaaaguccuccaccucgaaggcgaaguuaacaagaucaaguccgcacuccuaucaaccaacaaagcagucgucucccuauccaacggcgucuccguauuaacauucaaaguccucgaccucaaaaacuacauagacaaacagcuacuccccauccuaaacaaacaauccugcuccauccccaacaucgaaacugucaucgaguuccaacagaaaaacaaccgccuccuagaaaucacccgagaguucuccguaaacgccggcgucacuacccccgucucuaccuauaugcuaaccaacucugaacuccuaucccuaaucaacgauaugcccauaacuaacgaccaaaagaaacuuauguccaacaacguacaaauaguccggcaacaaucauacucuaucaugugcaucaucaaagaagaaguacuugccuacguuguccaacucccacuauacggcgucauagacacuccaugcuggaaacuucacaccucaccccucugcaccacuaacacuaaagaaggcucuaacaucugccuuacccgcaccgaccgcggaugguacugcgacaacgcaggcucaguuagcuucuucccacaagccgaaaccugcaaaguccagucaaaccgugucuucugcgauaccaugaacucgcucacccucccuuccgaagucaaccucugcaacgucgacaucuucaaccccaaauacgacugcaaaaucaugaccucaaaaaccgacguaucuucuuccgucaucaccucccucggcgccaucguauccugcuacggcaaaaccaaaugcacugcaucaaacaaaaaccgaggcaucaucaaaaccuucucgaacggaugcgacuacguauccaacaagggcgucgacacagucuccguugguaacacccucuacugcgucaacaaacaagaaggccaaucccuauacguaaaaggcgaacccaucaucaacuucuacgacccccucgucuuccccagugacgaauuugacgccuccaucucccaagucaacgaaaagaucaaccaaucccuugccuucauacgcaaauccgacgaacuccuacacaacguuaacgccggaaaaucaacaaccaacaucaugaucacaaccaucauaaucgucauaaucgucauacuccucucccucauagccgucggccugcuauuguacuguaaagcccgcuccacaccagucacacuuucaaaagaccaacucuccgggaucaacaacaucgccuucuccaacuaaggacuaguggaagcauuuuccuggcugauuaaaagaaauuacucagcuauggucaucuguuccuguuagaaggcuaugcagcauauuauauacuaugcgcauguuaugaaaugcauaauaaaaaauuuuaaaaaaucuaaaagaucuaaaaaaaaaaaaaaaaaaaaaaaaaaaaaaaaaaaaaaaaaaaaaaaaaaaaaaaaaaaaaaaaugcaucccccccccccccccccccccccccccccccaaaggcucuuuucagagccaccagaauu

SEQ ID NO: 3377 - RNA, 1967 nt, Artificial Sequence
  mRNA product Design g-2 comprising derived and/or modified sequence from HRSV(A2)__F_DSCav1_mut3 (opt1)
gggagaguccgcucagccagguugcagaagcggcuuagcguguguccuaaucuucucucugcguguagguaggccugugccgcaaacaagcuuaccauggagcugcucauccugaaggccaacgccaucaccaccauccugacggcggugaccuucugcuucgccagcggccagaacaucaccgaggaguucuaccaguccacgugcagcgccgucuccaagggguaccucggcgcccugcggaccggcugguacaccuccgugaucaccaucgagcugagcaacaucaaggagaucaagugcaacgggaccgacgccaaggugaagcucaucaagcaggagcuggacaaguacaagaacgcggucacggaccugcagcuccugaugcaguccaccccggcaaccggcuccggcuccgccaucugcagcggcgucgccgugugcaaggugcugcaccucgagggggaggucaacaagaucaagagcgcccugcuguccaccaacaaggccguggugagccucuccaacggcgucagcgugcugaccuucaaggugcuggaccucaagaacuacaucgacaagcagcugcugcccauccugaacaagcagagcugcuccauccccaacaucgagacggugaucgaguuccagcagaagaacaaccggcuccuggagaucacccgcgaguucagcgugaacgccggggucaccacccccguguccacguacaugcugaccaacagcgagcuccugucccugaucaacgacaugccgaucaccaacgaccagaagaagcucaugagcaacaacgugcagaucguccggcagcaguccuacagcaucaugugcaucaucaaggaggaggugcuggcguacgugguccagcugccccucuacggcgugaucgacacccccugcuggaagcugcacacgagcccccugugcaccaccaacaccaaggagggguccaacaucugccucacgcgcaccgaccggggcugguacugcgacaacgccggcagcgucuccuucuucccgcaggccgagaccugcaaggugcagagcaaccgcguguucugcgacaccaugaacucccugacgcugcccagcgagguaaaccucugcaacgucgacaucuucaaccccaaguacgacugcaagaucaugaccuccaagaccgacgugagcuccagcgugaucaccucccugggggccaucgucagcugcuacggcaagacgaagugcaccgccagcaacaagaaccgggggaucaucaagaccuucuccaacggcugcgacuacgugagcaacaagggcguggacaccguguccgucgggaacacccuguacugcgugaacaagcaggagggccagagccucuacgugaagggggagcccaucaucaacuucuacgacccgcuggucuuccccuccgacgaguucgacgcgagcaucucccaggugaacgagaagaucaaccagagccuggccuucauccgcaaguccgacgagcugcuccacaacgugaacgccggcaagagcacgaccaacaucaugaucaccaccaucaucaucgucaucaucgugauccugcugucccucaucgccguggggcugcugcucuacugcaaggcccggagcacgcccgucacccuguccaaggaccagcugagcggcaucaacaacaucgcguucuccaacugaggacuaguaauaaggaaacuguaugaaugucugugggcaggaagugaagagauccuucuguaaagguuuuuggaauuaugucugcugaauaauaaacuuuuuugaaauaauaaaucugguagaaaaaugagaucuaaaaaaaaaaaaaaaaaaaaaaaaaaaaaaaaaaaaaaaaaaaaaaaaaaaaaaaaaaaaaaaaugcaucccccccccccccccccccccccccccccccaaaggcucuuuucagagccaccagaauu

SEQ ID NO: 3378 - RNA, 1967 nt, Artificial Sequence
  mRNA product Design g-2 comprising derived and/or modified sequence from HRSV(A2)__F_DSCav1_mut3 (opt1)
gggagaguccgcucagccagguugcagaagcggcuuagcguguguccuaaucuucucucugcguguagguaggccugugccgcaaacaagcuuaccauggagcugcucauccugaaggccaacgccaucaccaccauccugacggcggugaccuucugcuucgccagcggccagaacaucaccgaggaguucuaccaguccacgugcagcgccgucuccaagggguaccucggcgcccugcgcaccgggugguacaccagcgugaucaccaucgagcuguccaacaucaaggagaucaagugcaacggcaccgacgccaaggugaagcucaucaagcaggagcuggacaaguacaagaacgcggucacggaccugcagcuccugaugcagagcacccccgccaccggguccggcagcgccaucugcuccggcguggccgugugcaagguccugcaccucgagggggaggugaacaagaucaagagcgcgcugcuguccaccaacaaggccguggucagccucuccaacggcgugagcgugcugacguucaagguccuggaccucaagaacuacaucgacaagcagcugcugccgauccucaacaagcaguccugcagcauccccaacaucgagaccgugaucgaguuccagcagaagaacaaccggcugcuggagaucacccgcgaguucuccgugaacgccggggucaccacgcccgugagcaccuacaugcucaccaacuccgagcugcugagccucaucaacgacaugcccaucaccaacgaccagaagaagcugaugagcaacaacgugcagaucguccggcagcaguccuacagcaucaugugcaucaucaaggaggaggugcuggccuacgugguccagcucccgcuguacggcgugaucgacacgcccugcuggaagcugcacaccagcccccucugcaccaccaacacgaaggagggguccaacaucugccugacccgcaccgaccggggcugguacugcgacaacgccggcuccgugagcuucuucccccaggcggagaccugcaagguccaguccaaccgcguguucugcgacacgaugaacagccugacccucccguccgaggucaaccugugcaacguggacaucuucaaccccaaguacgacugcaagaucaugaccagcaagaccgacguguccagcuccgucaucacgagccugggggccaucguguccugcuacggcaagaccaagugcaccgccagcaacaagaaccgggggaucaucaagaccuucuccaacggcugcgacuacgugagcaacaagggcgucgacacgguguccguggggaacacccucuacugcgucaacaagcaggagggccagagccuguacgugaagggggagcccaucaucaacuucuacgacccccugguguucccgagcgacgaguucgacgccuccaucagccaggucaacgagaagaucaaccagucccucgccuucauccgcaagagcgacgagcugcugcacaacgugaacgcgggcaaguccaccaccaacaucaugaucaccacgaucaucaucgugaucaucgucauccuccugagccugaucgccguggggcuccugcuguacugcaaggcccgguccacccccgugacccugagcaaggaccagcucuccggcaucaacaacaucgccuucagcaacugaggacuaguaauaaggaaacuguaugaaugucugugggcaggaagugaagagauccuucuguaaagguuuuuggaauuaugucugcugaauaauaaacuuuuuugaaauaauaaaucugguagaaaaaugagaucuaaaaaaaaaaaaaaaaaaaaaaaaaaaaaaaaaaaaaaaaaaaaaaaaaaaaaaaaaaaaaaaaugcaucccccccccccccccccccccccccccccccaaaggcucuuuucagagccaccagaauu

SEQ ID NO: 3379 - RNA, 1967 nt, Artificial Sequence
  mRNA product Design g-2 comprising derived and/or modified sequence from HRSV(A2)__F_DSCav1_mut3 (opt2)
gggagaguccgcucagccagguugcagaagcggcuuagcguguguccuaaucuucucucugcguguagguaggccugugccgcaaacaagcuuaccauggagcuccucauccucaaggccaacgccaucaccaccauccucaccgccgucaccuucugcuucgccuccggccagaacaucaccgaggaguucuaccaguccaccugcuccgccgucuccaagggcuaccucggcgcccuccgcaccggcugguacaccuccgucaucaccaucgagcucuccaacaucaaggagaucaagugcaacggcaccgacgccaaggucaagcucaucaagcaggagcucgacaaguacaagaacgccgucaccgaccuccagcuccucaugcaguccacccccgccaccggcuccggcuccgccaucugcuccggcgucgccgucugcaagguccuccaccucgagggcgaggucaacaagaucaaguccgcccuccucuccaccaacaaggccgucgucucccucuccaacggcgucuccguccucaccuucaagguccucgaccucaagaacuacaucgacaagcagcuccuccccauccucaacaagcaguccugcuccauccccaacaucgagaccgucaucgaguuccagcagaagaacaaccgccuccucgagaucacccgcgaguucuccgucaacgccggcgucaccacccccgucuccaccuacaugcucaccaacuccgagcuccucucccucaucaacgacaugcccaucaccaacgaccagaagaagcucauguccaacaacguccagaucguccgccagcaguccuacuccaucaugugcaucaucaaggaggagguccucgccuacgucguccagcucccccucuacggcgucaucgacacccccugcuggaagcuccacaccuccccccucugcaccaccaacaccaaggagggcuccaacaucugccucacccgcaccgaccgcggcugguacugcgacaacgccggcuccgucuccuucuucccccaggccgagaccugcaagguccaguccaaccgcgucuucugcgacaccaugaacucccucacccuccccuccgaggucaaccucugcaacgucgacaucuucaaccccaaguacgacugcaagaucaugaccuccaagaccgacgucuccuccuccgucaucaccucccucggcgccaucgucuccugcuacggcaagaccaagugcaccgccuccaacaagaaccgcggcaucaucaagaccuucuccaacggcugcgacuacgucuccaacaagggcgucgacaccgucuccgucggcaacacccucuacugcgucaacaagcaggagggccagucccucuacgucaagggcgagcccaucaucaacuucuacgacccccucgucuuccccuccgacgaguucgacgccuccaucucccaggucaacgagaagaucaaccagucccucgccuucauccgcaaguccgacgagcuccuccacaacgucaacgccggcaaguccaccaccaacaucaugaucaccaccaucaucaucgucaucaucgucauccuccucucccucaucgccgucggccuccuccucuacugcaaggcccgcuccacccccgucacccucuccaaggaccagcucuccggcaucaacaacaucgccuucuccaacugaggacuaguaauaaggaaacuguaugaaugucugugggcaggaagugaagagauccuucuguaaagguuuuuggaauuaugucugcugaauaauaaacuuuuuugaaauaauaaaucugguagaaaaaugagaucuaaaaaaaaaaaaaaaaaaaaaaaaaaaaaaaaaaaaaaaaaaaaaaaaaaaaaaaaaaaaaaaaugcaucccccccccccccccccccccccccccccccaaaggcucuuuucagagccaccagaauu

SEQ ID NO: 3380 - RNA, 1967 nt, Artificial Sequence
  mRNA product Design g-2 comprising derived and/or modified sequence from HRSV(A2)__F_DSCav1_mut3 (opt3)
gggagaguccgcucagccagguugcagaagcggcuuagcguguguccuaaucuucucucugcguguagguaggccugugccgcaaacaagcuuaccauggagcugcucauccuuaaggccaacgcuauuaccacaauacugacugcagugacguucugcuuugccagcggccagaauaucaccgaagaguucuaccaauccacauguucugcggucucaaaaggguauuugggagcuuuaagaacugguugguacaccaguguuauuacaaucgaacugagcaacauuaaggagaucaaaugcaauggcaccgacgccaaggugaaacuaauaaagcaggaacucgauaaguauaaaaacgcaguaacugaccugcagcuucugaugcaguccacacccgccaccgggucuggaucggcuaucuguucaggcguggcagucugcaagguguugcaccucgagggugagguuaauaaaauuaagagcgcccugcugaguacgaacaaagcuguggucucccucucuaauggggugagcguauuaacuuuuaagguucuggaucuuaagaacuacaucgacaaacaauugcugccuauucuaaauaagcaguccuguucaaucccaaacauagaaaccgugauugaguuccagcagaaaaauaacaggcuccuggaaaucacacgggaguuuagugucaaugccggagugacuaccccggugagcacauauaugcuuaccaacucugagcuguugucccucauuaaugauaugcccaucacgaacgaccaaaagaaacugaugucaaacaauguccagaucguucgccagcagagcuacaguauuaugugcauaaucaaggaagagguguuagcguauguagugcaacugccucucuacggcgucauugauacuccauguuggaaacuucauacaucuccccugugcaccacuaacacaaaggaaggcuccaauaucuguuugacccgaacggaccgugggugguacugcgauaacgcaggaagcgugucguucuuuccucaggccgagaccuguaagguucagucuaauagaguguucugcgacacaaugaacucccuaacucugccaucagaagucaaucucugcaacguggauauauuuaaucccaaauaugacuguaagauuaugaccaguaaaacagauguaagcuccucuguuaucacuagccugggugcuaucgugucaugcuacggcaagaccaaauguacagccaguaacaagaauagggggauuaucaagaccuucuccaacggaugcgacuaugucagcaauaaaggcguggacacugucucuguggguaacacgcuuuacuguguuaauaagcaagaggggcagucacuguaugugaaaggagagccuauuauaaacuuuuacgauccauugguauucccgagugacgaauuugaugcaagcaucucccaggucaacgagaagauuaaucagucucucgcuuucauccggaaaucggacgaacuguuacacaacgugaaugccggcaagagcacaaccaacaucaugauuacuaccauaaucauuguuaucauugugauccugcuaucccucauagcggucggccugcuuuuguauugcaaggcccgcucaacacccgugacccugaguaaagaucaacucucugggaucaauaacauugcauucagcaauugaggacuaguaauaaggaaacuguaugaaugucugugggcaggaagugaagagauccuucuguaaagguuuuuggaauuaugucugcugaauaauaaacuuuuuugaaauaauaaaucugguagaaaaaugagaucuaaaaaaaaaaaaaaaaaaaaaaaaaaaaaaaaaaaaaaaaaaaaaaaaaaaaaaaaaaaaaaaaugcaucccccccccccccccccccccccccccccccaaaggcucuuuucagagccaccagaauu

SEQ ID NO: 3381 - RNA, 1967 nt, Artificial Sequence
  mRNA product Design g-2 comprising derived and/or modified sequence from HRSV(A2)__F_DSCav1_mut3 (opt4)
gggagaguccgcucagccagguugcagaagcggcuuagcguguguccuaaucuucucucugcguguagguaggccugugccgcaaacaagcuuaccauggagcugcugauccugaaggccaacgccaucaccaccauccugaccgccgugaccuucugcuucgccagcggccagaacaucaccgaggaguucuaccagagcaccugcagcgccgugagcaagggcuaccugggcgcccugagaaccggcugguacaccagcgugaucaccaucgagcugagcaacaucaaggagaucaagugcaacggcaccgacgccaaggugaagcugaucaagcaggagcuggacaaguacaagaacgccgugaccgaccugcagcugcugaugcagagcacccccgccaccggcagcggcagcgccaucugcagcggcguggccgugugcaaggugcugcaccuggagggcgaggugaacaagaucaagagcgcccugcugagcaccaacaaggccguggugagccugagcaacggcgugagcgugcugaccuucaaggugcuggaccugaagaacuacaucgacaagcagcugcugcccauccugaacaagcagagcugcagcauccccaacaucgagaccgugaucgaguuccagcagaagaacaacagacugcuggagaucaccagagaguucagcgugaacgccggcgugaccacccccgugagcaccuacaugcugaccaacagcgagcugcugagccugaucaacgacaugcccaucaccaacgaccagaagaagcugaugagcaacaacgugcagaucgugagacagcagagcuacagcaucaugugcaucaucaaggaggaggugcuggccuacguggugcagcugccccuguacggcgugaucgacacccccugcuggaagcugcacaccagcccccugugcaccaccaacaccaaggagggcagcaacaucugccugaccagaaccgacagaggcugguacugcgacaacgccggcagcgugagcuucuucccccaggccgagaccugcaaggugcagagcaacagaguguucugcgacaccaugaacagccugacccugcccagcgaggugaaccugugcaacguggacaucuucaaccccaaguacgacugcaagaucaugaccagcaagaccgacgugagcagcagcgugaucaccagccugggcgccaucgugagcugcuacggcaagaccaagugcaccgccagcaacaagaacagaggcaucaucaagaccuucagcaacggcugcgacuacgugagcaacaagggcguggacaccgugagcgugggcaacacccuguacugcgugaacaagcaggagggccagagccuguacgugaagggcgagcccaucaucaacuucuacgacccccugguguuccccagcgacgaguucgacgccagcaucagccaggugaacgagaagaucaaccagagccuggccuucaucagaaagagcgacgagcugcugcacaacgugaacgccggcaagagcaccaccaacaucaugaucaccaccaucaucaucgugaucaucgugauccugcugagccugaucgccgugggccugcugcuguacugcaaggccagaagcacccccgugacccugagcaaggaccagcugagcggcaucaacaacaucgccuucagcaacugaggacuaguaauaaggaaacuguaugaaugucugugggcaggaagugaagagauccuucuguaaagguuuuuggaauuaugucugcugaauaauaaacuuuuuugaaauaauaaaucugguagaaaaaugagaucuaaaaaaaaaaaaaaaaaaaaaaaaaaaaaaaaaaaaaaaaaaaaaaaaaaaaaaaaaaaaaaaaugcaucccccccccccccccccccccccccccccccaaaggcucuuuucagagccaccagaauu

SEQ ID NO: 3382 - RNA, 1967 nt, Artificial Sequence
  mRNA product Design g-2 comprising derived and/or modified sequence from HRSV(A2)__F_DSCav1_mut3 (opt5)
gggagaguccgcucagccagguugcagaagcggcuuagcguguguccuaaucuucucucugcguguagguaggccugugccgcaaacaagcuuaccauggagcugcucauccugaaggccaacgcuauuaccacaauccuuacggccgugaccuucugcuuugcgagcggccagaauauuacagaagaguucuaccaauccaccuguucugcugucagcaaaggguaucugggagcccucagaacaggcugguacaccuccguuaucacaauugaacugucuaacaucaaggagaucaaaugcaaugggaccgacgccaaggugaaacuuauuaagcaggaacuggauaaguauaaaaacgcugugacggaccuccagcugcugaugcagagcacccccgccacaggauccggcucugcuaucuguagcggggucgccgugugcaagguucuccaccuggagggagaggugaauaaaauuaaguccgcgcuucugagcaccaacaaagccgucgugucucucuccaauggcguuagcgugcugacauuuaagguccuugaucugaagaacuacaucgacaaacaacuccugccuauucugaauaagcagucuuguuccaucccgaacauugaaaccgugaucgaguuccagcagaaaaauaaccggcuccuggaaaucacgcgcgaguuuagcgugaaugcuggcgucacaacccccguuucuacauauaugcuuaccaacuccgagcugcucagccugauuaaugauaugccuaucaccaacgaccaaaagaaacuuauguccaacaaugugcagauugugagacagcagucuuacagcaucaugugcauuaucaaggaagagguccuggccuaugugguucaacucccccuguacggggugaucgauacaccuuguuggaaacugcauacgagcccccucugcaccacaaacaccaaggaaggauccaauauuugucugacacggaccgaccgcggcugguacugcgauaacgcugggucugucuccuucuuuccucaggccgagacguguaaggugcagagcaauagaguuuucugcgacacaaugaacucucuuacccugccgagcgaagugaaucucugcaacgucgauaucuuuaaucccaaauaugacuguaagauuaugaccuccaaaacagaugugucuagcuccgucaucaccagccugggagcgauugugucuugcuacggcaagacaaaauguacggccuccaacaagaaucgggggaucaucaagaccuucagcaacggaugcgacuauguuucuaauaaaggcguggacacagucuccgugggcaacacccuuuacuguguuaauaagcaagaggggcagagccuguaugugaaaggagagccuauuaucaacuuuuacgauccccucgucuucccuuccgacgaauuugaugcuucuauuagccaggugaacgagaagaucaaucagucccuggccuucauucgcaaaucugacgaacugcuccacaacgugaaugcuggcaagagcacaaccaacaucaugauuacgaccaucaucauuguuaucauugucauccugcuuucccugauugccguggggcuccugcuguauugcaaggccagaagcacacccgugacccuuucuaaagaucaacucuccggaaucaauaacaucgcuuucagcaauugaggacuaguaauaaggaaacuguaugaaugucugugggcaggaagugaagagauccuucuguaaagguuuuuggaauuaugucugcugaauaauaaacuuuuuugaaauaauaaaucugguagaaaaaugagaucuaaaaaaaaaaaaaaaaaaaaaaaaaaaaaaaaaaaaaaaaaaaaaaaaaaaaaaaaaaaaaaaaugcaucccccccccccccccccccccccccccccccaaaggcucuuuucagagccaccagaauu

SEQ ID NO: 3383 - RNA, 1967 nt, Artificial Sequence
  mRNA product Design g-2 comprising derived and/or modified sequence from HRSV(A2)__F_DSCav1_mut3 (opt6)
gggagaguccgcucagccagguugcagaagcggcuuagcguguguccuaaucuucucucugcguguagguaggccugugccgcaaacaagcuuaccauggaauuacucauacuaaaagccaaugccauaaccacuauucuaacagcaguaacauucuguuucgccucaggacaaaacauaacagaagaauuuuaucaauccaccuguuccgcagucucgaaaggcuaccuuggcgcacuaagaaccggaugguauacaucaguaauaaccauugaacuaucaaauaucaaagaaauaaaaugcaacggaacugacgcaaaagucaaacuaauaaaacaagaauuagacaaauacaaaaacgccguuacagacuuacaacuacuaaugcaaucaacuccagcaacaggaucaggaucugcuauaugcucaggugucgccguauguaaaguguuacaccucgaaggcgaaguaaacaaaauaaaaucagcacuacuauccacaaauaaagcaguaguaucacuauccaaugguguaucaguacucacauucaaaguacuagacuuaaaaaauuauauagauaaacaauuacuaccaauauuaaacaaacaaucaugcucaauaccaaacauagaaaccgucauugaauuucaacaaaaaaacaaucgacuucuugaaauaacacgagaauuuucaguaaaugccggaguaacaaccccagucucaacauacauguuaaccaacucugaacuccuaagccuaaucaacgacaugcccauaacuaacgaccaaaaaaaacuaauguccaauaauguccaaauaguaagacaacaauccuacucaauaaugugcauuauaaaagaagaaguccucgccuauguaguacaacuacccuuauacggaguaauugacacaccauguuggaaacuacauacaucaccacuaugcaccacuaacacaaaagaaggcuccaacauaugccuaacccgaacagaucgcggaugguauugcgacaacgcaggaaguguauccuucuuuccacaagcagaaacaugcaaaguacaauccaacagaguauucugugacaccaugaacucucuaacacuaccuuccgaaguaaauuuaugcaacguagacauauuuaaucccaaauacgacuguaaaauaaugaccucaaaaacugaugucucaucaucagucauuacaucacucggagcaauagucaguugcuauggaaaaaccaaaugcacagcuaguaacaaaaacagggguauaauaaaaacauuuucaaacggaugcgauuacguaucaaauaaaggaguagacaccguauccguaggaaauacucucuacugcguaaacaaacaagaaggacaaucccuauacguaaaaggcgaaccaaucauuaacuuuuacgacccacuuguauuuccaucagacgaauuugaugccucaauaucccaagucaaugaaaaaauaaaccaaagucuagcauucauccgaaaaucagaugaacuuuuacacaacguaaacgccggaaaaucaacaacaaacaucaugaucacaacaaucaucauaguaauaauaguuauacuacuuuccuuaauagcagucggccuacuacucuacugcaaagcacgauccacaccaguaaccuuaucuaaagaccaacucucaggcauaaacaacauagcauucucaaacuaaggacuaguaauaaggaaacuguaugaaugucugugggcaggaagugaagagauccuucuguaaagguuuuuggaauuaugucugcugaauaauaaacuuuuuugaaauaauaaaucugguagaaaaaugagaucuaaaaaaaaaaaaaaaaaaaaaaaaaaaaaaaaaaaaaaaaaaaaaaaaaaaaaaaaaaaaaaaaugcaucccccccccccccccccccccccccccccccaaaggcucuuuucagagccaccagaauu

SEQ ID NO: 3384 - RNA, 1967 nt, Artificial Sequence
  mRNA product Design g-2 comprising derived and/or modified sequence from HRSV(A2)__F_DSCav1_mut3 (opt11)
gggagaguccgcucagccagguugcagaagcggcuuagcguguguccuaaucuucucucugcguguagguaggccugugccgcaaacaagcuuaccauggaacuccucauccuuaaagcaaacgccaucacaaccauccucacagcagucacuuucugcuucgcauccggacaaaacaucacagaagaguucuaucaauccacgugcuccgcaguuuccaaaggauaccuuggagccuuacgaaccggcugguacaccuccgucaucaccauagaacucagcaacaucaaagaaaucaaaugcaacggaaccgacgcaaaagucaaacucaucaaacaagaacuagacaaauacaaaaacgcagucaccgaccuccaacuacucaugcaaucaacccccgcaaccggcuccggcuccgccaucugcuccggaguagccguaugcaaaguccuccaccucgaaggcgaaguuaacaagaucaaguccgcacuccuaucaaccaacaaagcagucgucucccuauccaacggcgucuccguauuaacauucaaaguccucgaccucaaaaacuacauagacaaacagcuacuccccauccuaaacaaacaauccugcuccauccccaacaucgaaacugucaucgaguuccaacagaaaaacaaccgccuccuagaaaucacccgagaguucuccguaaacgccggcgucacuacccccgucucuaccuauaugcuaaccaacucugaacuccuaucccuaaucaacgauaugcccauaacuaacgaccaaaagaaacuuauguccaacaacguacaaauaguccggcaacaaucauacucuaucaugugcaucaucaaagaagaaguacuugccuacguuguccaacucccacuauacggcgucauagacacuccaugcuggaaacuucacaccucaccccucugcaccacuaacacuaaagaaggcucuaacaucugccuuacccgcaccgaccgcggaugguacugcgacaacgcaggcucaguuagcuucuucccacaagccgaaaccugcaaaguccagucaaaccgugucuucugcgauaccaugaacucgcucacccucccuuccgaagucaaccucugcaacgucgacaucuucaaccccaaauacgacugcaaaaucaugaccucaaaaaccgacguaucuucuuccgucaucaccucccucggcgccaucguauccugcuacggcaaaaccaaaugcacugcaucaaacaaaaaccgaggcaucaucaaaaccuucucgaacggaugcgacuacguauccaacaagggcgucgacacagucuccguugguaacacccucuacugcgucaacaaacaagaaggccaaucccuauacguaaaaggcgaacccaucaucaacuucuacgacccccucgucuuccccagugacgaauuugacgccuccaucucccaagucaacgaaaagaucaaccaaucccuugccuucauacgcaaauccgacgaacuccuacacaacguuaacgccggaaaaucaacaaccaacaucaugaucacaaccaucauaaucgucauaaucgucauacuccucucccucauagccgucggccugcuauuguacuguaaagcccgcuccacaccagucacacuuucaaaagaccaacucuccgggaucaacaacaucgccuucuccaacuaaggacuaguaauaaggaaacuguaugaaugucugugggcaggaagugaagagauccuucuguaaagguuuuuggaauuaugucugcugaauaauaaacuuuuuugaaauaauaaaucugguagaaaaaugagaucuaaaaaaaaaaaaaaaaaaaaaaaaaaaaaaaaaaaaaaaaaaaaaaaaaaaaaaaaaaaaaaaaugcaucccccccccccccccccccccccccccccccaaaggcucuuuucagagccaccagaauu

SEQ ID NO: 3385 - RNA, 2199 nt, Artificial Sequence
  mRNA product Design g-3 comprising derived and/or modified sequence from HRSV(A2)__F_DSCav1_mut3 (opt1)
gggagaguccgcucagccagguugcagaagcggcuuagcguguguccuaaucuucucucugcguguagguaggccugugccgcaaacaagcuuaccauggagcugcucauccugaaggccaacgccaucaccaccauccugacggcggugaccuucugcuucgccagcggccagaacaucaccgaggaguucuaccaguccacgugcagcgccgucuccaagggguaccucggcgcccugcggaccggcugguacaccuccgugaucaccaucgagcugagcaacaucaaggagaucaagugcaacgggaccgacgccaaggugaagcucaucaagcaggagcuggacaaguacaagaacgcggucacggaccugcagcuccugaugcaguccaccccggcaaccggcuccggcuccgccaucugcagcggcgucgccgugugcaaggugcugcaccucgagggggaggucaacaagaucaagagcgcccugcuguccaccaacaaggccguggugagccucuccaacggcgucagcgugcugaccuucaaggugcuggaccucaagaacuacaucgacaagcagcugcugcccauccugaacaagcagagcugcuccauccccaacaucgagacggugaucgaguuccagcagaagaacaaccggcuccuggagaucacccgcgaguucagcgugaacgccggggucaccacccccguguccacguacaugcugaccaacagcgagcuccugucccugaucaacgacaugccgaucaccaacgaccagaagaagcucaugagcaacaacgugcagaucguccggcagcaguccuacagcaucaugugcaucaucaaggaggaggugcuggcguacgugguccagcugccccucuacggcgugaucgacacccccugcuggaagcugcacacgagcccccugugcaccaccaacaccaaggagggguccaacaucugccucacgcgcaccgaccggggcugguacugcgacaacgccggcagcgucuccuucuucccgcaggccgagaccugcaaggugcagagcaaccgcguguucugcgacaccaugaacucccugacgcugcccagcgagguaaaccucugcaacgucgacaucuucaaccccaaguacgacugcaagaucaugaccuccaagaccgacgugagcuccagcgugaucaccucccugggggccaucgucagcugcuacggcaagacgaagugcaccgccagcaacaagaaccgggggaucaucaagaccuucuccaacggcugcgacuacgugagcaacaagggcguggacaccguguccgucgggaacacccuguacugcgugaacaagcaggagggccagagccucuacgugaagggggagcccaucaucaacuucuacgacccgcuggucuuccccuccgacgaguucgacgcgagcaucucccaggugaacgagaagaucaaccagagccuggccuucauccgcaaguccgacgagcugcuccacaacgugaacgccggcaagagcacgaccaacaucaugaucaccaccaucaucaucgucaucaucgugauccugcugucccucaucgccguggggcugcugcucuacugcaaggcccggagcacgcccgucacccuguccaaggaccagcugagcggcaucaacaacaucgcguucuccaacugaggacuagugaagggaacacccaaauuuaauucagccuuaagcacaauuaauuaagagugaaacguaauuguacaagcaguuggucacccaccauagggcaugaucaacaccgcaaccuuuccuuuuucccccagugauucugaaaaaccccucuucccuucagcuugcuuagauguuccaaauuuaguaagcuuaaggcggccuacagaagaaaaagaaaaaaaaggccacaaaaguucccucucacuuucaguaaauaaaauaaaagcagcaacagaaauaaagaaauaaaugaaauucaaaaugaaauaaauauuguguugugcagcauuaaaaaaucaauaaaaauuaaaaaugagcaagaucuaaaaaaaaaaaaaaaaaaaaaaaaaaaaaaaaaaaaaaaaaaaaaaaaaaaaaaaaaaaaaaaaugcaucccccccccccccccccccccccccccccccaaaggcucuuuucagagccaccagaauu

SEQ ID NO: 3386 - RNA, 2199 nt, Artificial Sequence
  mRNA product Design g-3 comprising derived and/or modified sequence from HRSV(A2)__F_DSCav1_mut3 (opt1)
gggagaguccgcucagccagguugcagaagcggcuuagcguguguccuaaucuucucucugcguguagguaggccugugccgcaaacaagcuuaccauggagcugcucauccugaaggccaacgccaucaccaccauccugacggcggugaccuucugcuucgccagcggccagaacaucaccgaggaguucuaccaguccacgugcagcgccgucuccaagggguaccucggcgcccugcgcaccgggugguacaccagcgugaucaccaucgagcuguccaacaucaaggagaucaagugcaacggcaccgacgccaaggugaagcucaucaagcaggagcuggacaaguacaagaacgcggucacggaccugcagcuccugaugcagagcacccccgccaccggguccggcagcgccaucugcuccggcguggccgugugcaagguccugcaccucgagggggaggugaacaagaucaagagcgcgcugcuguccaccaacaaggccguggucagccucuccaacggcgugagcgugcugacguucaagguccuggaccucaagaacuacaucgacaagcagcugcugccgauccucaacaagcaguccugcagcauccccaacaucgagaccgugaucgaguuccagcagaagaacaaccggcugcuggagaucacccgcgaguucuccgugaacgccggggucaccacgcccgugagcaccuacaugcucaccaacuccgagcugcugagccucaucaacgacaugcccaucaccaacgaccagaagaagcugaugagcaacaacgugcagaucguccggcagcaguccuacagcaucaugugcaucaucaaggaggaggugcuggccuacgugguccagcucccgcuguacggcgugaucgacacgcccugcuggaagcugcacaccagcccccucugcaccaccaacacgaaggagggguccaacaucugccugacccgcaccgaccggggcugguacugcgacaacgccggcuccgugagcuucuucccccaggcggagaccugcaagguccaguccaaccgcguguucugcgacacgaugaacagccugacccucccguccgaggucaaccugugcaacguggacaucuucaaccccaaguacgacugcaagaucaugaccagcaagaccgacguguccagcuccgucaucacgagccugggggccaucguguccugcuacggcaagaccaagugcaccgccagcaacaagaaccgggggaucaucaagaccuucuccaacggcugcgacuacgugagcaacaagggcgucgacacgguguccguggggaacacccucuacugcgucaacaagcaggagggccagagccuguacgugaagggggagcccaucaucaacuucuacgacccccugguguucccgagcgacgaguucgacgccuccaucagccaggucaacgagaagaucaaccagucccucgccuucauccgcaagagcgacgagcugcugcacaacgugaacgcgggcaaguccaccaccaacaucaugaucaccacgaucaucaucgugaucaucgucauccuccugagccugaucgccguggggcuccugcuguacugcaaggcccgguccacccccgugacccugagcaaggaccagcucuccggcaucaacaacaucgccuucagcaacugaggacuagugaagggaacacccaaauuuaauucagccuuaagcacaauuaauuaagagugaaacguaauuguacaagcaguuggucacccaccauagggcaugaucaacaccgcaaccuuuccuuuuucccccagugauucugaaaaaccccucuucccuucagcuugcuuagauguuccaaauuuaguaagcuuaaggcggccuacagaagaaaaagaaaaaaaaggccacaaaaguucccucucacuuucaguaaauaaaauaaaagcagcaacagaaauaaagaaauaaaugaaauucaaaaugaaauaaauauuguguugugcagcauuaaaaaaucaauaaaaauuaaaaaugagcaagaucuaaaaaaaaaaaaaaaaaaaaaaaaaaaaaaaaaaaaaaaaaaaaaaaaaaaaaaaaaaaaaaaaugcaucccccccccccccccccccccccccccccccaaaggcucuuuucagagccaccagaauu

SEQ ID NO: 3387 - RNA, 2199 nt, Artificial Sequence
  mRNA product Design g-3 comprising derived and/or modified sequence from HRSV(A2)__F_DSCav1_mut3 (opt2)
gggagaguccgcucagccagguugcagaagcggcuuagcguguguccuaaucuucucucugcguguagguaggccugugccgcaaacaagcuuaccauggagcuccucauccucaaggccaacgccaucaccaccauccucaccgccgucaccuucugcuucgccuccggccagaacaucaccgaggaguucuaccaguccaccugcuccgccgucuccaagggcuaccucggcgcccuccgcaccggcugguacaccuccgucaucaccaucgagcucuccaacaucaaggagaucaagugcaacggcaccgacgccaaggucaagcucaucaagcaggagcucgacaaguacaagaacgccgucaccgaccuccagcuccucaugcaguccacccccgccaccggcuccggcuccgccaucugcuccggcgucgccgucugcaagguccuccaccucgagggcgaggucaacaagaucaaguccgcccuccucuccaccaacaaggccgucgucucccucuccaacggcgucuccguccucaccuucaagguccucgaccucaagaacuacaucgacaagcagcuccuccccauccucaacaagcaguccugcuccauccccaacaucgagaccgucaucgaguuccagcagaagaacaaccgccuccucgagaucacccgcgaguucuccgucaacgccggcgucaccacccccgucuccaccuacaugcucaccaacuccgagcuccucucccucaucaacgacaugcccaucaccaacgaccagaagaagcucauguccaacaacguccagaucguccgccagcaguccuacuccaucaugugcaucaucaaggaggagguccucgccuacgucguccagcucccccucuacggcgucaucgacacccccugcuggaagcuccacaccuccccccucugcaccaccaacaccaaggagggcuccaacaucugccucacccgcaccgaccgcggcugguacugcgacaacgccggcuccgucuccuucuucccccaggccgagaccugcaagguccaguccaaccgcgucuucugcgacaccaugaacucccucacccuccccuccgaggucaaccucugcaacgucgacaucuucaaccccaaguacgacugcaagaucaugaccuccaagaccgacgucuccuccuccgucaucaccucccucggcgccaucgucuccugcuacggcaagaccaagugcaccgccuccaacaagaaccgcggcaucaucaagaccuucuccaacggcugcgacuacgucuccaacaagggcgucgacaccgucuccgucggcaacacccucuacugcgucaacaagcaggagggccagucccucuacgucaagggcgagcccaucaucaacuucuacgacccccucgucuuccccuccgacgaguucgacgccuccaucucccaggucaacgagaagaucaaccagucccucgccuucauccgcaaguccgacgagcuccuccacaacgucaacgccggcaaguccaccaccaacaucaugaucaccaccaucaucaucgucaucaucgucauccuccucucccucaucgccgucggccuccuccucuacugcaaggcccgcuccacccccgucacccucuccaaggaccagcucuccggcaucaacaacaucgccuucuccaacugaggacuagugaagggaacacccaaauuuaauucagccuuaagcacaauuaauuaagagugaaacguaauuguacaagcaguuggucacccaccauagggcaugaucaacaccgcaaccuuuccuuuuucccccagugauucugaaaaaccccucuucccuucagcuugcuuagauguuccaaauuuaguaagcuuaaggcggccuacagaagaaaaagaaaaaaaaggccacaaaaguucccucucacuuucaguaaauaaaauaaaagcagcaacagaaauaaagaaauaaaugaaauucaaaaugaaauaaauauuguguugugcagcauuaaaaaaucaauaaaaauuaaaaaugagcaagaucuaaaaaaaaaaaaaaaaaaaaaaaaaaaaaaaaaaaaaaaaaaaaaaaaaaaaaaaaaaaaaaaaugcaucccccccccccccccccccccccccccccccaaaggcucuuuucagagccaccagaauu

SEQ ID NO: 3388 - RNA, 2199 nt, Artificial Sequence
  mRNA product Design g-3 comprising derived and/or modified sequence from HRSV(A2)__F_DSCav1_mut3 (opt3)
gggagaguccgcucagccagguugcagaagcggcuuagcguguguccuaaucuucucucugcguguagguaggccugugccgcaaacaagcuuaccauggagcugcucauccuuaaggccaacgcuauuaccacaauacugacugcagugacguucugcuuugccagcggccagaauaucaccgaagaguucuaccaauccacauguucugcggucucaaaaggguauuugggagcuuuaagaacugguugguacaccaguguuauuacaaucgaacugagcaacauuaaggagaucaaaugcaauggcaccgacgccaaggugaaacuaauaaagcaggaacucgauaaguauaaaaacgcaguaacugaccugcagcuucugaugcaguccacacccgccaccgggucuggaucggcuaucuguucaggcguggcagucugcaagguguugcaccucgagggugagguuaauaaaauuaagagcgcccugcugaguacgaacaaagcuguggucucccucucuaauggggugagcguauuaacuuuuaagguucuggaucuuaagaacuacaucgacaaacaauugcugccuauucuaaauaagcaguccuguucaaucccaaacauagaaaccgugauugaguuccagcagaaaaauaacaggcuccuggaaaucacacgggaguuuagugucaaugccggagugacuaccccggugagcacauauaugcuuaccaacucugagcuguugucccucauuaaugauaugcccaucacgaacgaccaaaagaaacugaugucaaacaauguccagaucguucgccagcagagcuacaguauuaugugcauaaucaaggaagagguguuagcguauguagugcaacugccucucuacggcgucauugauacuccauguuggaaacuucauacaucuccccugugcaccacuaacacaaaggaaggcuccaauaucuguuugacccgaacggaccgugggugguacugcgauaacgcaggaagcgugucguucuuuccucaggccgagaccuguaagguucagucuaauagaguguucugcgacacaaugaacucccuaacucugccaucagaagucaaucucugcaacguggauauauuuaaucccaaauaugacuguaagauuaugaccaguaaaacagauguaagcuccucuguuaucacuagccugggugcuaucgugucaugcuacggcaagaccaaauguacagccaguaacaagaauagggggauuaucaagaccuucuccaacggaugcgacuaugucagcaauaaaggcguggacacugucucuguggguaacacgcuuuacuguguuaauaagcaagaggggcagucacuguaugugaaaggagagccuauuauaaacuuuuacgauccauugguauucccgagugacgaauuugaugcaagcaucucccaggucaacgagaagauuaaucagucucucgcuuucauccggaaaucggacgaacuguuacacaacgugaaugccggcaagagcacaaccaacaucaugauuacuaccauaaucauuguuaucauugugauccugcuaucccucauagcggucggccugcuuuuguauugcaaggcccgcucaacacccgugacccugaguaaagaucaacucucugggaucaauaacauugcauucagcaauugaggacuagugaagggaacacccaaauuuaauucagccuuaagcacaauuaauuaagagugaaacguaauuguacaagcaguuggucacccaccauagggcaugaucaacaccgcaaccuuuccuuuuucccccagugauucugaaaaaccccucuucccuucagcuugcuuagauguuccaaauuuaguaagcuuaaggcggccuacagaagaaaaagaaaaaaaaggccacaaaaguucccucucacuuucaguaaauaaaauaaaagcagcaacagaaauaaagaaauaaaugaaauucaaaaugaaauaaauauuguguugugcagcauuaaaaaaucaauaaaaauuaaaaaugagcaagaucuaaaaaaaaaaaaaaaaaaaaaaaaaaaaaaaaaaaaaaaaaaaaaaaaaaaaaaaaaaaaaaaaugcaucccccccccccccccccccccccccccccccaaaggcucuuuucagagccaccagaauu

SEQ ID NO: 3389 - RNA, 2199 nt, Artificial Sequence
  mRNA product Design g-3 comprising derived and/or modified sequence from HRSV(A2)__F_DSCav1_mut3 (opt4)
gggagaguccgcucagccagguugcagaagcggcuuagcguguguccuaaucuucucucugcguguagguaggccugugccgcaaacaagcuuaccauggagcugcugauccugaaggccaacgccaucaccaccauccugaccgccgugaccuucugcuucgccagcggccagaacaucaccgaggaguucuaccagagcaccugcagcgccgugagcaagggcuaccugggcgcccugagaaccggcugguacaccagcgugaucaccaucgagcugagcaacaucaaggagaucaagugcaacggcaccgacgccaaggugaagcugaucaagcaggagcuggacaaguacaagaacgccgugaccgaccugcagcugcugaugcagagcacccccgccaccggcagcggcagcgccaucugcagcggcguggccgugugcaaggugcugcaccuggagggcgaggugaacaagaucaagagcgcccugcugagcaccaacaaggccguggugagccugagcaacggcgugagcgugcugaccuucaaggugcuggaccugaagaacuacaucgacaagcagcugcugcccauccugaacaagcagagcugcagcauccccaacaucgagaccgugaucgaguuccagcagaagaacaacagacugcuggagaucaccagagaguucagcgugaacgccggcgugaccacccccgugagcaccuacaugcugaccaacagcgagcugcugagccugaucaacgacaugcccaucaccaacgaccagaagaagcugaugagcaacaacgugcagaucgugagacagcagagcuacagcaucaugugcaucaucaaggaggaggugcuggccuacguggugcagcugccccuguacggcgugaucgacacccccugcuggaagcugcacaccagcccccugugcaccaccaacaccaaggagggcagcaacaucugccugaccagaaccgacagaggcugguacugcgacaacgccggcagcgugagcuucuucccccaggccgagaccugcaaggugcagagcaacagaguguucugcgacaccaugaacagccugacccugcccagcgaggugaaccugugcaacguggacaucuucaaccccaaguacgacugcaagaucaugaccagcaagaccgacgugagcagcagcgugaucaccagccugggcgccaucgugagcugcuacggcaagaccaagugcaccgccagcaacaagaacagaggcaucaucaagaccuucagcaacggcugcgacuacgugagcaacaagggcguggacaccgugagcgugggcaacacccuguacugcgugaacaagcaggagggccagagccuguacgugaagggcgagcccaucaucaacuucuacgacccccugguguuccccagcgacgaguucgacgccagcaucagccaggugaacgagaagaucaaccagagccuggccuucaucagaaagagcgacgagcugcugcacaacgugaacgccggcaagagcaccaccaacaucaugaucaccaccaucaucaucgugaucaucgugauccugcugagccugaucgccgugggccugcugcuguacugcaaggccagaagcacccccgugacccugagcaaggaccagcugagcggcaucaacaacaucgccuucagcaacugaggacuagugaagggaacacccaaauuuaauucagccuuaagcacaauuaauuaagagugaaacguaauuguacaagcaguuggucacccaccauagggcaugaucaacaccgcaaccuuuccuuuuucccccagugauucugaaaaaccccucuucccuucagcuugcuuagauguuccaaauuuaguaagcuuaaggcggccuacagaagaaaaagaaaaaaaaggccacaaaaguucccucucacuuucaguaaauaaaauaaaagcagcaacagaaauaaagaaauaaaugaaauucaaaaugaaauaaauauuguguugugcagcauuaaaaaaucaauaaaaauuaaaaaugagcaagaucuaaaaaaaaaaaaaaaaaaaaaaaaaaaaaaaaaaaaaaaaaaaaaaaaaaaaaaaaaaaaaaaaugcaucccccccccccccccccccccccccccccccaaaggcucuuuucagagccaccagaauu

SEQ ID NO: 3390 - RNA, 2199 nt, Artificial Sequence
  mRNA product Design g-3 comprising derived and/or modified sequence from HRSV(A2)__F_DSCav1_mut3 (opt5)
gggagaguccgcucagccagguugcagaagcggcuuagcguguguccuaaucuucucucugcguguagguaggccugugccgcaaacaagcuuaccauggagcugcucauccugaaggccaacgcuauuaccacaauccuuacggccgugaccuucugcuuugcgagcggccagaauauuacagaagaguucuaccaauccaccuguucugcugucagcaaaggguaucugggagcccucagaacaggcugguacaccuccguuaucacaauugaacugucuaacaucaaggagaucaaaugcaaugggaccgacgccaaggugaaacuuauuaagcaggaacuggauaaguauaaaaacgcugugacggaccuccagcugcugaugcagagcacccccgccacaggauccggcucugcuaucuguagcggggucgccgugugcaagguucuccaccuggagggagaggugaauaaaauuaaguccgcgcuucugagcaccaacaaagccgucgugucucucuccaauggcguuagcgugcugacauuuaagguccuugaucugaagaacuacaucgacaaacaacuccugccuauucugaauaagcagucuuguuccaucccgaacauugaaaccgugaucgaguuccagcagaaaaauaaccggcuccuggaaaucacgcgcgaguuuagcgugaaugcuggcgucacaacccccguuucuacauauaugcuuaccaacuccgagcugcucagccugauuaaugauaugccuaucaccaacgaccaaaagaaacuuauguccaacaaugugcagauugugagacagcagucuuacagcaucaugugcauuaucaaggaagagguccuggccuaugugguucaacucccccuguacggggugaucgauacaccuuguuggaaacugcauacgagcccccucugcaccacaaacaccaaggaaggauccaauauuugucugacacggaccgaccgcggcugguacugcgauaacgcugggucugucuccuucuuuccucaggccgagacguguaaggugcagagcaauagaguuuucugcgacacaaugaacucucuuacccugccgagcgaagugaaucucugcaacgucgauaucuuuaaucccaaauaugacuguaagauuaugaccuccaaaacagaugugucuagcuccgucaucaccagccugggagcgauugugucuugcuacggcaagacaaaauguacggccuccaacaagaaucgggggaucaucaagaccuucagcaacggaugcgacuauguuucuaauaaaggcguggacacagucuccgugggcaacacccuuuacuguguuaauaagcaagaggggcagagccuguaugugaaaggagagccuauuaucaacuuuuacgauccccucgucuucccuuccgacgaauuugaugcuucuauuagccaggugaacgagaagaucaaucagucccuggccuucauucgcaaaucugacgaacugcuccacaacgugaaugcuggcaagagcacaaccaacaucaugauuacgaccaucaucauuguuaucauugucauccugcuuucccugauugccguggggcuccugcuguauugcaaggccagaagcacacccgugacccuuucuaaagaucaacucuccggaaucaauaacaucgcuuucagcaauugaggacuagugaagggaacacccaaauuuaauucagccuuaagcacaauuaauuaagagugaaacguaauuguacaagcaguuggucacccaccauagggcaugaucaacaccgcaaccuuuccuuuuucccccagugauucugaaaaaccccucuucccuucagcuugcuuagauguuccaaauuuaguaagcuuaaggcggccuacagaagaaaaagaaaaaaaaggccacaaaaguucccucucacuuucaguaaauaaaauaaaagcagcaacagaaauaaagaaauaaaugaaauucaaaaugaaauaaauauuguguugugcagcauuaaaaaaucaauaaaaauuaaaaaugagcaagaucuaaaaaaaaaaaaaaaaaaaaaaaaaaaaaaaaaaaaaaaaaaaaaaaaaaaaaaaaaaaaaaaaugcaucccccccccccccccccccccccccccccccaaaggcucuuuucagagccaccagaauu

SEQ ID NO: 3391 - RNA, 2199 nt, Artificial Sequence
  mRNA product Design g-3 comprising derived and/or modified sequence from HRSV(A2)__F_DSCav1_mut3 (opt6)
gggagaguccgcucagccagguugcagaagcggcuuagcguguguccuaaucuucucucugcguguagguaggccugugccgcaaacaagcuuaccauggaauuacucauacuaaaagccaaugccauaaccacuauucuaacagcaguaacauucuguuucgccucaggacaaaacauaacagaagaauuuuaucaauccaccuguuccgcagucucgaaaggcuaccuuggcgcacuaagaaccggaugguauacaucaguaauaaccauugaacuaucaaauaucaaagaaauaaaaugcaacggaacugacgcaaaagucaaacuaauaaaacaagaauuagacaaauacaaaaacgccguuacagacuuacaacuacuaaugcaaucaacuccagcaacaggaucaggaucugcuauaugcucaggugucgccguauguaaaguguuacaccucgaaggcgaaguaaacaaaauaaaaucagcacuacuauccacaaauaaagcaguaguaucacuauccaaugguguaucaguacucacauucaaaguacuagacuuaaaaaauuauauagauaaacaauuacuaccaauauuaaacaaacaaucaugcucaauaccaaacauagaaaccgucauugaauuucaacaaaaaaacaaucgacuucuugaaauaacacgagaauuuucaguaaaugccggaguaacaaccccagucucaacauacauguuaaccaacucugaacuccuaagccuaaucaacgacaugcccauaacuaacgaccaaaaaaaacuaauguccaauaauguccaaauaguaagacaacaauccuacucaauaaugugcauuauaaaagaagaaguccucgccuauguaguacaacuacccuuauacggaguaauugacacaccauguuggaaacuacauacaucaccacuaugcaccacuaacacaaaagaaggcuccaacauaugccuaacccgaacagaucgcggaugguauugcgacaacgcaggaaguguauccuucuuuccacaagcagaaacaugcaaaguacaauccaacagaguauucugugacaccaugaacucucuaacacuaccuuccgaaguaaauuuaugcaacguagacauauuuaaucccaaauacgacuguaaaauaaugaccucaaaaacugaugucucaucaucagucauuacaucacucggagcaauagucaguugcuauggaaaaaccaaaugcacagcuaguaacaaaaacagggguauaauaaaaacauuuucaaacggaugcgauuacguaucaaauaaaggaguagacaccguauccguaggaaauacucucuacugcguaaacaaacaagaaggacaaucccuauacguaaaaggcgaaccaaucauuaacuuuuacgacccacuuguauuuccaucagacgaauuugaugccucaauaucccaagucaaugaaaaaauaaaccaaagucuagcauucauccgaaaaucagaugaacuuuuacacaacguaaacgccggaaaaucaacaacaaacaucaugaucacaacaaucaucauaguaauaauaguuauacuacuuuccuuaauagcagucggccuacuacucuacugcaaagcacgauccacaccaguaaccuuaucuaaagaccaacucucaggcauaaacaacauagcauucucaaacuaaggacuagugaagggaacacccaaauuuaauucagccuuaagcacaauuaauuaagagugaaacguaauuguacaagcaguuggucacccaccauagggcaugaucaacaccgcaaccuuuccuuuuucccccagugauucugaaaaaccccucuucccuucagcuugcuuagauguuccaaauuuaguaagcuuaaggcggccuacagaagaaaaagaaaaaaaaggccacaaaaguucccucucacuuucaguaaauaaaauaaaagcagcaacagaaauaaagaaauaaaugaaauucaaaaugaaauaaauauuguguugugcagcauuaaaaaaucaauaaaaauuaaaaaugagcaagaucuaaaaaaaaaaaaaaaaaaaaaaaaaaaaaaaaaaaaaaaaaaaaaaaaaaaaaaaaaaaaaaaaugcaucccccccccccccccccccccccccccccccaaaggcucuuuucagagccaccagaauu

SEQ ID NO: 3392 - RNA, 2199 nt, Artificial Sequence
  mRNA product Design g-3 comprising derived and/or modified sequence from HRSV(A2)__F_DSCav1_mut3 (opt11)
gggagaguccgcucagccagguugcagaagcggcuuagcguguguccuaaucuucucucugcguguagguaggccugugccgcaaacaagcuuaccauggaacuccucauccuuaaagcaaacgccaucacaaccauccucacagcagucacuuucugcuucgcauccggacaaaacaucacagaagaguucuaucaauccacgugcuccgcaguuuccaaaggauaccuuggagccuuacgaaccggcugguacaccuccgucaucaccauagaacucagcaacaucaaagaaaucaaaugcaacggaaccgacgcaaaagucaaacucaucaaacaagaacuagacaaauacaaaaacgcagucaccgaccuccaacuacucaugcaaucaacccccgcaaccggcuccggcuccgccaucugcuccggaguagccguaugcaaaguccuccaccucgaaggcgaaguuaacaagaucaaguccgcacuccuaucaaccaacaaagcagucgucucccuauccaacggcgucuccguauuaacauucaaaguccucgaccucaaaaacuacauagacaaacagcuacuccccauccuaaacaaacaauccugcuccauccccaacaucgaaacugucaucgaguuccaacagaaaaacaaccgccuccuagaaaucacccgagaguucuccguaaacgccggcgucacuacccccgucucuaccuauaugcuaaccaacucugaacuccuaucccuaaucaacgauaugcccauaacuaacgaccaaaagaaacuuauguccaacaacguacaaauaguccggcaacaaucauacucuaucaugugcaucaucaaagaagaaguacuugccuacguuguccaacucccacuauacggcgucauagacacuccaugcuggaaacuucacaccucaccccucugcaccacuaacacuaaagaaggcucuaacaucugccuuacccgcaccgaccgcggaugguacugcgacaacgcaggcucaguuagcuucuucccacaagccgaaaccugcaaaguccagucaaaccgugucuucugcgauaccaugaacucgcucacccucccuuccgaagucaaccucugcaacgucgacaucuucaaccccaaauacgacugcaaaaucaugaccucaaaaaccgacguaucuucuuccgucaucaccucccucggcgccaucguauccugcuacggcaaaaccaaaugcacugcaucaaacaaaaaccgaggcaucaucaaaaccuucucgaacggaugcgacuacguauccaacaagggcgucgacacagucuccguugguaacacccucuacugcgucaacaaacaagaaggccaaucccuauacguaaaaggcgaacccaucaucaacuucuacgacccccucgucuuccccagugacgaauuugacgccuccaucucccaagucaacgaaaagaucaaccaaucccuugccuucauacgcaaauccgacgaacuccuacacaacguuaacgccggaaaaucaacaaccaacaucaugaucacaaccaucauaaucgucauaaucgucauacuccucucccucauagccgucggccugcuauuguacuguaaagcccgcuccacaccagucacacuuucaaaagaccaacucuccgggaucaacaacaucgccuucuccaacuaaggacuagugaagggaacacccaaauuuaauucagccuuaagcacaauuaauuaagagugaaacguaauuguacaagcaguuggucacccaccauagggcaugaucaacaccgcaaccuuuccuuuuucccccagugauucugaaaaaccccucuucccuucagcuugcuuagauguuccaaauuuaguaagcuuaaggcggccuacagaagaaaaagaaaaaaaaggccacaaaaguucccucucacuuucaguaaauaaaauaaaagcagcaacagaaauaaagaaauaaaugaaauucaaaaugaaauaaauauuguguugugcagcauuaaaaaaucaauaaaaauuaaaaaugagcaagaucuaaaaaaaaaaaaaaaaaaaaaaaaaaaaaaaaaaaaaaaaaaaaaaaaaaaaaaaaaaaaaaaaugcaucccccccccccccccccccccccccccccccaaaggcucuuuucagagccaccagaauu

SEQ ID NO: 3393 - RNA, 1994 nt, Artificial Sequence
  mRNA product Design g-4 comprising derived and/or modified sequence from HRSV(A2)__F_DSCav1_mut3 (opt1)
gggagacuccugucgggcggaaguaggaggaguagaguuuaaaaacaguacucuuuuuccgguucgggacguaguugaagcaacgacaagccggauaaccgcucuugagacaggaagcuuaccauggagcugcucauccugaaggccaacgccaucaccaccauccugacggcggugaccuucugcuucgccagcggccagaacaucaccgaggaguucuaccaguccacgugcagcgccgucuccaagggguaccucggcgcccugcggaccggcugguacaccuccgugaucaccaucgagcugagcaacaucaaggagaucaagugcaacgggaccgacgccaaggugaagcucaucaagcaggagcuggacaaguacaagaacgcggucacggaccugcagcuccugaugcaguccaccccggcaaccggcuccggcuccgccaucugcagcggcgucgccgugugcaaggugcugcaccucgagggggaggucaacaagaucaagagcgcccugcuguccaccaacaaggccguggugagccucuccaacggcgucagcgugcugaccuucaaggugcuggaccucaagaacuacaucgacaagcagcugcugcccauccugaacaagcagagcugcuccauccccaacaucgagacggugaucgaguuccagcagaagaacaaccggcuccuggagaucacccgcgaguucagcgugaacgccggggucaccacccccguguccacguacaugcugaccaacagcgagcuccugucccugaucaacgacaugccgaucaccaacgaccagaagaagcucaugagcaacaacgugcagaucguccggcagcaguccuacagcaucaugugcaucaucaaggaggaggugcuggcguacgugguccagcugccccucuacggcgugaucgacacccccugcuggaagcugcacacgagcccccugugcaccaccaacaccaaggagggguccaacaucugccucacgcgcaccgaccggggcugguacugcgacaacgccggcagcgucuccuucuucccgcaggccgagaccugcaaggugcagagcaaccgcguguucugcgacaccaugaacucccugacgcugcccagcgagguaaaccucugcaacgucgacaucuucaaccccaaguacgacugcaagaucaugaccuccaagaccgacgugagcuccagcgugaucaccucccugggggccaucgucagcugcuacggcaagacgaagugcaccgccagcaacaagaaccgggggaucaucaagaccuucuccaacggcugcgacuacgugagcaacaagggcguggacaccguguccgucgggaacacccuguacugcgugaacaagcaggagggccagagccucuacgugaagggggagcccaucaucaacuucuacgacccgcuggucuuccccuccgacgaguucgacgcgagcaucucccaggugaacgagaagaucaaccagagccuggccuucauccgcaaguccgacgagcugcuccacaacgugaacgccggcaagagcacgaccaacaucaugaucaccaccaucaucaucgucaucaucgugauccugcugucccucaucgccguggggcugcugcucuacugcaaggcccggagcacgcccgucacccuguccaaggaccagcugagcggcaucaacaacaucgcguucuccaacugaggacuaguaauaaggaaacuguaugaaugucugugggcaggaagugaagagauccuucuguaaagguuuuuggaauuaugucugcugaauaauaaacuuuuuugaaauaauaaaucugguagaaaaaugagaucuaaaaaaaaaaaaaaaaaaaaaaaaaaaaaaaaaaaaaaaaaaaaaaaaaaaaaaaaaaaaaaaaugcaucccccccccccccccccccccccccccccccaaaggcucuuuucagagccaccagaauu

SEQ ID NO: 3394 - RNA, 1994 nt, Artificial Sequence
  mRNA product Design g-4 comprising derived and/or modified sequence from HRSV(A2)__F_DSCav1_mut3 (opt1)
gggagacuccugucgggcggaaguaggaggaguagaguuuaaaaacaguacucuuuuuccgguucgggacguaguugaagcaacgacaagccggauaaccgcucuugagacaggaagcuuaccauggagcugcucauccugaaggccaacgccaucaccaccauccugacggcggugaccuucugcuucgccagcggccagaacaucaccgaggaguucuaccaguccacgugcagcgccgucuccaagggguaccucggcgcccugcgcaccgggugguacaccagcgugaucaccaucgagcuguccaacaucaaggagaucaagugcaacggcaccgacgccaaggugaagcucaucaagcaggagcuggacaaguacaagaacgcggucacggaccugcagcuccugaugcagagcacccccgccaccggguccggcagcgccaucugcuccggcguggccgugugcaagguccugcaccucgagggggaggugaacaagaucaagagcgcgcugcuguccaccaacaaggccguggucagccucuccaacggcgugagcgugcugacguucaagguccuggaccucaagaacuacaucgacaagcagcugcugccgauccucaacaagcaguccugcagcauccccaacaucgagaccgugaucgaguuccagcagaagaacaaccggcugcuggagaucacccgcgaguucuccgugaacgccggggucaccacgcccgugagcaccuacaugcucaccaacuccgagcugcugagccucaucaacgacaugcccaucaccaacgaccagaagaagcugaugagcaacaacgugcagaucguccggcagcaguccuacagcaucaugugcaucaucaaggaggaggugcuggccuacgugguccagcucccgcuguacggcgugaucgacacgcccugcuggaagcugcacaccagcccccucugcaccaccaacacgaaggagggguccaacaucugccugacccgcaccgaccggggcugguacugcgacaacgccggcuccgugagcuucuucccccaggcggagaccugcaagguccaguccaaccgcguguucugcgacacgaugaacagccugacccucccguccgaggucaaccugugcaacguggacaucuucaaccccaaguacgacugcaagaucaugaccagcaagaccgacguguccagcuccgucaucacgagccugggggccaucguguccugcuacggcaagaccaagugcaccgccagcaacaagaaccgggggaucaucaagaccuucuccaacggcugcgacuacgugagcaacaagggcgucgacacgguguccguggggaacacccucuacugcgucaacaagcaggagggccagagccuguacgugaagggggagcccaucaucaacuucuacgacccccugguguucccgagcgacgaguucgacgccuccaucagccaggucaacgagaagaucaaccagucccucgccuucauccgcaagagcgacgagcugcugcacaacgugaacgcgggcaaguccaccaccaacaucaugaucaccacgaucaucaucgugaucaucgucauccuccugagccugaucgccguggggcuccugcuguacugcaaggcccgguccacccccgugacccugagcaaggaccagcucuccggcaucaacaacaucgccuucagcaacugaggacuaguaauaaggaaacuguaugaaugucugugggcaggaagugaagagauccuucuguaaagguuuuuggaauuaugucugcugaauaauaaacuuuuuugaaauaauaaaucugguagaaaaaugagaucuaaaaaaaaaaaaaaaaaaaaaaaaaaaaaaaaaaaaaaaaaaaaaaaaaaaaaaaaaaaaaaaaugcaucccccccccccccccccccccccccccccccaaaggcucuuuucagagccaccagaauu

SEQ ID NO: 3395 - RNA, 1994 nt, Artificial Sequence
  mRNA product Design g-4 comprising derived and/or modified sequence from HRSV(A2)__F_DSCav1_mut3 (opt2)
gggagacuccugucgggcggaaguaggaggaguagaguuuaaaaacaguacucuuuuuccgguucgggacguaguugaagcaacgacaagccggauaaccgcucuugagacaggaagcuuaccauggagcuccucauccucaaggccaacgccaucaccaccauccucaccgccgucaccuucugcuucgccuccggccagaacaucaccgaggaguucuaccaguccaccugcuccgccgucuccaagggcuaccucggcgcccuccgcaccggcugguacaccuccgucaucaccaucgagcucuccaacaucaaggagaucaagugcaacggcaccgacgccaaggucaagcucaucaagcaggagcucgacaaguacaagaacgccgucaccgaccuccagcuccucaugcaguccacccccgccaccggcuccggcuccgccaucugcuccggcgucgccgucugcaagguccuccaccucgagggcgaggucaacaagaucaaguccgcccuccucuccaccaacaaggccgucgucucccucuccaacggcgucuccguccucaccuucaagguccucgaccucaagaacuacaucgacaagcagcuccuccccauccucaacaagcaguccugcuccauccccaacaucgagaccgucaucgaguuccagcagaagaacaaccgccuccucgagaucacccgcgaguucuccgucaacgccggcgucaccacccccgucuccaccuacaugcucaccaacuccgagcuccucucccucaucaacgacaugcccaucaccaacgaccagaagaagcucauguccaacaacguccagaucguccgccagcaguccuacuccaucaugugcaucaucaaggaggagguccucgccuacgucguccagcucccccucuacggcgucaucgacacccccugcuggaagcuccacaccuccccccucugcaccaccaacaccaaggagggcuccaacaucugccucacccgcaccgaccgcggcugguacugcgacaacgccggcuccgucuccuucuucccccaggccgagaccugcaagguccaguccaaccgcgucuucugcgacaccaugaacucccucacccuccccuccgaggucaaccucugcaacgucgacaucuucaaccccaaguacgacugcaagaucaugaccuccaagaccgacgucuccuccuccgucaucaccucccucggcgccaucgucuccugcuacggcaagaccaagugcaccgccuccaacaagaaccgcggcaucaucaagaccuucuccaacggcugcgacuacgucuccaacaagggcgucgacaccgucuccgucggcaacacccucuacugcgucaacaagcaggagggccagucccucuacgucaagggcgagcccaucaucaacuucuacgacccccucgucuuccccuccgacgaguucgacgccuccaucucccaggucaacgagaagaucaaccagucccucgccuucauccgcaaguccgacgagcuccuccacaacgucaacgccggcaaguccaccaccaacaucaugaucaccaccaucaucaucgucaucaucgucauccuccucucccucaucgccgucggccuccuccucuacugcaaggcccgcuccacccccgucacccucuccaaggaccagcucuccggcaucaacaacaucgccuucuccaacugaggacuaguaauaaggaaacuguaugaaugucugugggcaggaagugaagagauccuucuguaaagguuuuuggaauuaugucugcugaauaauaaacuuuuuugaaauaauaaaucugguagaaaaaugagaucuaaaaaaaaaaaaaaaaaaaaaaaaaaaaaaaaaaaaaaaaaaaaaaaaaaaaaaaaaaaaaaaaugcaucccccccccccccccccccccccccccccccaaaggcucuuuucagagccaccagaauu

SEQ ID NO: 3396 - RNA, 1994 nt, Artificial Sequence
  mRNA product Design g-4 comprising derived and/or modified sequence from HRSV(A2)__F_DSCav1_mut3 (opt3)
gggagacuccugucgggcggaaguaggaggaguagaguuuaaaaacaguacucuuuuuccgguucgggacguaguugaagcaacgacaagccggauaaccgcucuugagacaggaagcuuaccauggagcugcucauccuuaaggccaacgcuauuaccacaauacugacugcagugacguucugcuuugccagcggccagaauaucaccgaagaguucuaccaauccacauguucugcggucucaaaaggguauuugggagcuuuaagaacugguugguacaccaguguuauuacaaucgaacugagcaacauuaaggagaucaaaugcaauggcaccgacgccaaggugaaacuaauaaagcaggaacucgauaaguauaaaaacgcaguaacugaccugcagcuucugaugcaguccacacccgccaccgggucuggaucggcuaucuguucaggcguggcagucugcaagguguugcaccucgagggugagguuaauaaaauuaagagcgcccugcugaguacgaacaaagcuguggucucccucucuaauggggugagcguauuaacuuuuaagguucuggaucuuaagaacuacaucgacaaacaauugcugccuauucuaaauaagcaguccuguucaaucccaaacauagaaaccgugauugaguuccagcagaaaaauaacaggcuccuggaaaucacacgggaguuuagugucaaugccggagugacuaccccggugagcacauauaugcuuaccaacucugagcuguugucccucauuaaugauaugcccaucacgaacgaccaaaagaaacugaugucaaacaauguccagaucguucgccagcagagcuacaguauuaugugcauaaucaaggaagagguguuagcguauguagugcaacugccucucuacggcgucauugauacuccauguuggaaacuucauacaucuccccugugcaccacuaacacaaaggaaggcuccaauaucuguuugacccgaacggaccgugggugguacugcgauaacgcaggaagcgugucguucuuuccucaggccgagaccuguaagguucagucuaauagaguguucugcgacacaaugaacucccuaacucugccaucagaagucaaucucugcaacguggauauauuuaaucccaaauaugacuguaagauuaugaccaguaaaacagauguaagcuccucuguuaucacuagccugggugcuaucgugucaugcuacggcaagaccaaauguacagccaguaacaagaauagggggauuaucaagaccuucuccaacggaugcgacuaugucagcaauaaaggcguggacacugucucuguggguaacacgcuuuacuguguuaauaagcaagaggggcagucacuguaugugaaaggagagccuauuauaaacuuuuacgauccauugguauucccgagugacgaauuugaugcaagcaucucccaggucaacgagaagauuaaucagucucucgcuuucauccggaaaucggacgaacuguuacacaacgugaaugccggcaagagcacaaccaacaucaugauuacuaccauaaucauuguuaucauugugauccugcuaucccucauagcggucggccugcuuuuguauugcaaggcccgcucaacacccgugacccugaguaaagaucaacucucugggaucaauaacauugcauucagcaauugaggacuaguaauaaggaaacuguaugaaugucugugggcaggaagugaagagauccuucuguaaagguuuuuggaauuaugucugcugaauaauaaacuuuuuugaaauaauaaaucugguagaaaaaugagaucuaaaaaaaaaaaaaaaaaaaaaaaaaaaaaaaaaaaaaaaaaaaaaaaaaaaaaaaaaaaaaaaaugcaucccccccccccccccccccccccccccccccaaaggcucuuuucagagccaccagaauu

SEQ ID NO: 3397 - RNA, 1994 nt, Artificial Sequence
  mRNA product Design g-4 comprising derived and/or modified sequence from HRSV(A2)__F_DSCav1_mut3 (opt4)
gggagacuccugucgggcggaaguaggaggaguagaguuuaaaaacaguacucuuuuuccgguucgggacguaguugaagcaacgacaagccggauaaccgcucuugagacaggaagcuuaccauggagcugcugauccugaaggccaacgccaucaccaccauccugaccgccgugaccuucugcuucgccagcggccagaacaucaccgaggaguucuaccagagcaccugcagcgccgugagcaagggcuaccugggcgcccugagaaccggcugguacaccagcgugaucaccaucgagcugagcaacaucaaggagaucaagugcaacggcaccgacgccaaggugaagcugaucaagcaggagcuggacaaguacaagaacgccgugaccgaccugcagcugcugaugcagagcacccccgccaccggcagcggcagcgccaucugcagcggcguggccgugugcaaggugcugcaccuggagggcgaggugaacaagaucaagagcgcccugcugagcaccaacaaggccguggugagccugagcaacggcgugagcgugcugaccuucaaggugcuggaccugaagaacuacaucgacaagcagcugcugcccauccugaacaagcagagcugcagcauccccaacaucgagaccgugaucgaguuccagcagaagaacaacagacugcuggagaucaccagagaguucagcgugaacgccggcgugaccacccccgugagcaccuacaugcugaccaacagcgagcugcugagccugaucaacgacaugcccaucaccaacgaccagaagaagcugaugagcaacaacgugcagaucgugagacagcagagcuacagcaucaugugcaucaucaaggaggaggugcuggccuacguggugcagcugccccuguacggcgugaucgacacccccugcuggaagcugcacaccagcccccugugcaccaccaacaccaaggagggcagcaacaucugccugaccagaaccgacagaggcugguacugcgacaacgccggcagcgugagcuucuucccccaggccgagaccugcaaggugcagagcaacagaguguucugcgacaccaugaacagccugacccugcccagcgaggugaaccugugcaacguggacaucuucaaccccaaguacgacugcaagaucaugaccagcaagaccgacgugagcagcagcgugaucaccagccugggcgccaucgugagcugcuacggcaagaccaagugcaccgccagcaacaagaacagaggcaucaucaagaccuucagcaacggcugcgacuacgugagcaacaagggcguggacaccgugagcgugggcaacacccuguacugcgugaacaagcaggagggccagagccuguacgugaagggcgagcccaucaucaacuucuacgacccccugguguuccccagcgacgaguucgacgccagcaucagccaggugaacgagaagaucaaccagagccuggccuucaucagaaagagcgacgagcugcugcacaacgugaacgccggcaagagcaccaccaacaucaugaucaccaccaucaucaucgugaucaucgugauccugcugagccugaucgccgugggccugcugcuguacugcaaggccagaagcacccccgugacccugagcaaggaccagcugagcggcaucaacaacaucgccuucagcaacugaggacuaguaauaaggaaacuguaugaaugucugugggcaggaagugaagagauccuucuguaaagguuuuuggaauuaugucugcugaauaauaaacuuuuuugaaauaauaaaucugguagaaaaaugagaucuaaaaaaaaaaaaaaaaaaaaaaaaaaaaaaaaaaaaaaaaaaaaaaaaaaaaaaaaaaaaaaaaugcaucccccccccccccccccccccccccccccccaaaggcucuuuucagagccaccagaauu

SEQ ID NO: 3398 - RNA, 1994 nt, Artificial Sequence
  mRNA product Design g-4 comprising derived and/or modified sequence from HRSV(A2)__F_DSCav1_mut3 (opt5)
gggagacuccugucgggcggaaguaggaggaguagaguuuaaaaacaguacucuuuuuccgguucgggacguaguugaagcaacgacaagccggauaaccgcucuugagacaggaagcuuaccauggagcugcucauccugaaggccaacgcuauuaccacaauccuuacggccgugaccuucugcuuugcgagcggccagaauauuacagaagaguucuaccaauccaccuguucugcugucagcaaaggguaucugggagcccucagaacaggcugguacaccuccguuaucacaauugaacugucuaacaucaaggagaucaaaugcaaugggaccgacgccaaggugaaacuuauuaagcaggaacuggauaaguauaaaaacgcugugacggaccuccagcugcugaugcagagcacccccgccacaggauccggcucugcuaucuguagcggggucgccgugugcaagguucuccaccuggagggagaggugaauaaaauuaaguccgcgcuucugagcaccaacaaagccgucgugucucucuccaauggcguuagcgugcugacauuuaagguccuugaucugaagaacuacaucgacaaacaacuccugccuauucugaauaagcagucuuguuccaucccgaacauugaaaccgugaucgaguuccagcagaaaaauaaccggcuccuggaaaucacgcgcgaguuuagcgugaaugcuggcgucacaacccccguuucuacauauaugcuuaccaacuccgagcugcucagccugauuaaugauaugccuaucaccaacgaccaaaagaaacuuauguccaacaaugugcagauugugagacagcagucuuacagcaucaugugcauuaucaaggaagagguccuggccuaugugguucaacucccccuguacggggugaucgauacaccuuguuggaaacugcauacgagcccccucugcaccacaaacaccaaggaaggauccaauauuugucugacacggaccgaccgcggcugguacugcgauaacgcugggucugucuccuucuuuccucaggccgagacguguaaggugcagagcaauagaguuuucugcgacacaaugaacucucuuacccugccgagcgaagugaaucucugcaacgucgauaucuuuaaucccaaauaugacuguaagauuaugaccuccaaaacagaugugucuagcuccgucaucaccagccugggagcgauugugucuugcuacggcaagacaaaauguacggccuccaacaagaaucgggggaucaucaagaccuucagcaacggaugcgacuauguuucuaauaaaggcguggacacagucuccgugggcaacacccuuuacuguguuaauaagcaagaggggcagagccuguaugugaaaggagagccuauuaucaacuuuuacgauccccucgucuucccuuccgacgaauuugaugcuucuauuagccaggugaacgagaagaucaaucagucccuggccuucauucgcaaaucugacgaacugcuccacaacgugaaugcuggcaagagcacaaccaacaucaugauuacgaccaucaucauuguuaucauugucauccugcuuucccugauugccguggggcuccugcuguauugcaaggccagaagcacacccgugacccuuucuaaagaucaacucuccggaaucaauaacaucgcuuucagcaauugaggacuaguaauaaggaaacuguaugaaugucugugggcaggaagugaagagauccuucuguaaagguuuuuggaauuaugucugcugaauaauaaacuuuuuugaaauaauaaaucugguagaaaaaugagaucuaaaaaaaaaaaaaaaaaaaaaaaaaaaaaaaaaaaaaaaaaaaaaaaaaaaaaaaaaaaaaaaaugcaucccccccccccccccccccccccccccccccaaaggcucuuuucagagccaccagaauu

SEQ ID NO: 3399 - RNA, 1994 nt, Artificial Sequence
  mRNA product Design g-4 comprising derived and/or modified sequence from HRSV(A2)__F_DSCav1_mut3 (opt6)
gggagacuccugucgggcggaaguaggaggaguagaguuuaaaaacaguacucuuuuuccgguucgggacguaguugaagcaacgacaagccggauaaccgcucuugagacaggaagcuuaccauggaauuacucauacuaaaagccaaugccauaaccacuauucuaacagcaguaacauucuguuucgccucaggacaaaacauaacagaagaauuuuaucaauccaccuguuccgcagucucgaaaggcuaccuuggcgcacuaagaaccggaugguauacaucaguaauaaccauugaacuaucaaauaucaaagaaauaaaaugcaacggaacugacgcaaaagucaaacuaauaaaacaagaauuagacaaauacaaaaacgccguuacagacuuacaacuacuaaugcaaucaacuccagcaacaggaucaggaucugcuauaugcucaggugucgccguauguaaaguguuacaccucgaaggcgaaguaaacaaaauaaaaucagcacuacuauccacaaauaaagcaguaguaucacuauccaaugguguaucaguacucacauucaaaguacuagacuuaaaaaauuauauagauaaacaauuacuaccaauauuaaacaaacaaucaugcucaauaccaaacauagaaaccgucauugaauuucaacaaaaaaacaaucgacuucuugaaauaacacgagaauuuucaguaaaugccggaguaacaaccccagucucaacauacauguuaaccaacucugaacuccuaagccuaaucaacgacaugcccauaacuaacgaccaaaaaaaacuaauguccaauaauguccaaauaguaagacaacaauccuacucaauaaugugcauuauaaaagaagaaguccucgccuauguaguacaacuacccuuauacggaguaauugacacaccauguuggaaacuacauacaucaccacuaugcaccacuaacacaaaagaaggcuccaacauaugccuaacccgaacagaucgcggaugguauugcgacaacgcaggaaguguauccuucuuuccacaagcagaaacaugcaaaguacaauccaacagaguauucugugacaccaugaacucucuaacacuaccuuccgaaguaaauuuaugcaacguagacauauuuaaucccaaauacgacuguaaaauaaugaccucaaaaacugaugucucaucaucagucauuacaucacucggagcaauagucaguugcuauggaaaaaccaaaugcacagcuaguaacaaaaacagggguauaauaaaaacauuuucaaacggaugcgauuacguaucaaauaaaggaguagacaccguauccguaggaaauacucucuacugcguaaacaaacaagaaggacaaucccuauacguaaaaggcgaaccaaucauuaacuuuuacgacccacuuguauuuccaucagacgaauuugaugccucaauaucccaagucaaugaaaaaauaaaccaaagucuagcauucauccgaaaaucagaugaacuuuuacacaacguaaacgccggaaaaucaacaacaaacaucaugaucacaacaaucaucauaguaauaauaguuauacuacuuuccuuaauagcagucggccuacuacucuacugcaaagcacgauccacaccaguaaccuuaucuaaagaccaacucucaggcauaaacaacauagcauucucaaacuaaggacuaguaauaaggaaacuguaugaaugucugugggcaggaagugaagagauccuucuguaaagguuuuuggaauuaugucugcugaauaauaaacuuuuuugaaauaauaaaucugguagaaaaaugagaucuaaaaaaaaaaaaaaaaaaaaaaaaaaaaaaaaaaaaaaaaaaaaaaaaaaaaaaaaaaaaaaaaugcaucccccccccccccccccccccccccccccccaaaggcucuuuucagagccaccagaauu

SEQ ID NO: 3400 - RNA, 1994 nt, Artificial Sequence
  mRNA product Design g-4 comprising derived and/or modified sequence from HRSV(A2)__F_DSCav1_mut3 (opt11)
gggagacuccugucgggcggaaguaggaggaguagaguuuaaaaacaguacucuuuuuccgguucgggacguaguugaagcaacgacaagccggauaaccgcucuugagacaggaagcuuaccauggaacuccucauccuuaaagcaaacgccaucacaaccauccucacagcagucacuuucugcuucgcauccggacaaaacaucacagaagaguucuaucaauccacgugcuccgcaguuuccaaaggauaccuuggagccuuacgaaccggcugguacaccuccgucaucaccauagaacucagcaacaucaaagaaaucaaaugcaacggaaccgacgcaaaagucaaacucaucaaacaagaacuagacaaauacaaaaacgcagucaccgaccuccaacuacucaugcaaucaacccccgcaaccggcuccggcuccgccaucugcuccggaguagccguaugcaaaguccuccaccucgaaggcgaaguuaacaagaucaaguccgcacuccuaucaaccaacaaagcagucgucucccuauccaacggcgucuccguauuaacauucaaaguccucgaccucaaaaacuacauagacaaacagcuacuccccauccuaaacaaacaauccugcuccauccccaacaucgaaacugucaucgaguuccaacagaaaaacaaccgccuccuagaaaucacccgagaguucuccguaaacgccggcgucacuacccccgucucuaccuauaugcuaaccaacucugaacuccuaucccuaaucaacgauaugcccauaacuaacgaccaaaagaaacuuauguccaacaacguacaaauaguccggcaacaaucauacucuaucaugugcaucaucaaagaagaaguacuugccuacguuguccaacucccacuauacggcgucauagacacuccaugcuggaaacuucacaccucaccccucugcaccacuaacacuaaagaaggcucuaacaucugccuuacccgcaccgaccgcggaugguacugcgacaacgcaggcucaguuagcuucuucccacaagccgaaaccugcaaaguccagucaaaccgugucuucugcgauaccaugaacucgcucacccucccuuccgaagucaaccucugcaacgucgacaucuucaaccccaaauacgacugcaaaaucaugaccucaaaaaccgacguaucuucuuccgucaucaccucccucggcgccaucguauccugcuacggcaaaaccaaaugcacugcaucaaacaaaaaccgaggcaucaucaaaaccuucucgaacggaugcgacuacguauccaacaagggcgucgacacagucuccguugguaacacccucuacugcgucaacaaacaagaaggccaaucccuauacguaaaaggcgaacccaucaucaacuucuacgacccccucgucuuccccagugacgaauuugacgccuccaucucccaagucaacgaaaagaucaaccaaucccuugccuucauacgcaaauccgacgaacuccuacacaacguuaacgccggaaaaucaacaaccaacaucaugaucacaaccaucauaaucgucauaaucgucauacuccucucccucauagccgucggccugcuauuguacuguaaagcccgcuccacaccagucacacuuucaaaagaccaacucuccgggaucaacaacaucgccuucuccaacuaaggacuaguaauaaggaaacuguaugaaugucugugggcaggaagugaagagauccuucuguaaagguuuuuggaauuaugucugcugaauaauaaacuuuuuugaaauaauaaaucugguagaaaaaugagaucuaaaaaaaaaaaaaaaaaaaaaaaaaaaaaaaaaaaaaaaaaaaaaaaaaaaaaaaaaaaaaaaaugcaucccccccccccccccccccccccccccccccaaaggcucuuuucagagccaccagaauu

SEQ ID NO: 3401 - RNA, 1970 nt, Artificial Sequence
  mRNA product Design g-5 comprising derived and/or modified sequence from HRSV(A2)__F_DSCav1_mut3 (opt1)
gggagacccgugacccggaaguuguacggcuacgcgacuuucccucccacaaacccucgcgcccuuccuuuccuacuugggcccggcagaaagcuuaccauggagcugcucauccugaaggccaacgccaucaccaccauccugacggcggugaccuucugcuucgccagcggccagaacaucaccgaggaguucuaccaguccacgugcagcgccgucuccaagggguaccucggcgcccugcggaccggcugguacaccuccgugaucaccaucgagcugagcaacaucaaggagaucaagugcaacgggaccgacgccaaggugaagcucaucaagcaggagcuggacaaguacaagaacgcggucacggaccugcagcuccugaugcaguccaccccggcaaccggcuccggcuccgccaucugcagcggcgucgccgugugcaaggugcugcaccucgagggggaggucaacaagaucaagagcgcccugcuguccaccaacaaggccguggugagccucuccaacggcgucagcgugcugaccuucaaggugcuggaccucaagaacuacaucgacaagcagcugcugcccauccugaacaagcagagcugcuccauccccaacaucgagacggugaucgaguuccagcagaagaacaaccggcuccuggagaucacccgcgaguucagcgugaacgccggggucaccacccccguguccacguacaugcugaccaacagcgagcuccugucccugaucaacgacaugccgaucaccaacgaccagaagaagcucaugagcaacaacgugcagaucguccggcagcaguccuacagcaucaugugcaucaucaaggaggaggugcuggcguacgugguccagcugccccucuacggcgugaucgacacccccugcuggaagcugcacacgagcccccugugcaccaccaacaccaaggagggguccaacaucugccucacgcgcaccgaccggggcugguacugcgacaacgccggcagcgucuccuucuucccgcaggccgagaccugcaaggugcagagcaaccgcguguucugcgacaccaugaacucccugacgcugcccagcgagguaaaccucugcaacgucgacaucuucaaccccaaguacgacugcaagaucaugaccuccaagaccgacgugagcuccagcgugaucaccucccugggggccaucgucagcugcuacggcaagacgaagugcaccgccagcaacaagaaccgggggaucaucaagaccuucuccaacggcugcgacuacgugagcaacaagggcguggacaccguguccgucgggaacacccuguacugcgugaacaagcaggagggccagagccucuacgugaagggggagcccaucaucaacuucuacgacccgcuggucuuccccuccgacgaguucgacgcgagcaucucccaggugaacgagaagaucaaccagagccuggccuucauccgcaaguccgacgagcugcuccacaacgugaacgccggcaagagcacgaccaacaucaugaucaccaccaucaucaucgucaucaucgugauccugcugucccucaucgccguggggcugcugcucuacugcaaggcccggagcacgcccgucacccuguccaaggaccagcugagcggcaucaacaacaucgcguucuccaacugaggacuaguaauaaggaaacuguaugaaugucugugggcaggaagugaagagauccuucuguaaagguuuuuggaauuaugucugcugaauaauaaacuuuuuugaaauaauaaaucugguagaaaaaugagaucuaaaaaaaaaaaaaaaaaaaaaaaaaaaaaaaaaaaaaaaaaaaaaaaaaaaaaaaaaaaaaaaaugcaucccccccccccccccccccccccccccccccaaaggcucuuuucagagccaccagaauu

SEQ ID NO: 3402 - RNA, 1970 nt, Artificial Sequence
  mRNA product Design g-5 comprising derived and/or modified sequence from HRSV(A2)__F_DSCav1_mut3 (opt1)
gggagacccgugacccggaaguuguacggcuacgcgacuuucccucccacaaacccucgcgcccuuccuuuccuacuugggcccggcagaaagcuuaccauggagcugcucauccugaaggccaacgccaucaccaccauccugacggcggugaccuucugcuucgccagcggccagaacaucaccgaggaguucuaccaguccacgugcagcgccgucuccaagggguaccucggcgcccugcgcaccgggugguacaccagcgugaucaccaucgagcuguccaacaucaaggagaucaagugcaacggcaccgacgccaaggugaagcucaucaagcaggagcuggacaaguacaagaacgcggucacggaccugcagcuccugaugcagagcacccccgccaccggguccggcagcgccaucugcuccggcguggccgugugcaagguccugcaccucgagggggaggugaacaagaucaagagcgcgcugcuguccaccaacaaggccguggucagccucuccaacggcgugagcgugcugacguucaagguccuggaccucaagaacuacaucgacaagcagcugcugccgauccucaacaagcaguccugcagcauccccaacaucgagaccgugaucgaguuccagcagaagaacaaccggcugcuggagaucacccgcgaguucuccgugaacgccggggucaccacgcccgugagcaccuacaugcucaccaacuccgagcugcugagccucaucaacgacaugcccaucaccaacgaccagaagaagcugaugagcaacaacgugcagaucguccggcagcaguccuacagcaucaugugcaucaucaaggaggaggugcuggccuacgugguccagcucccgcuguacggcgugaucgacacgcccugcuggaagcugcacaccagcccccucugcaccaccaacacgaaggagggguccaacaucugccugacccgcaccgaccggggcugguacugcgacaacgccggcuccgugagcuucuucccccaggcggagaccugcaagguccaguccaaccgcguguucugcgacacgaugaacagccugacccucccguccgaggucaaccugugcaacguggacaucuucaaccccaaguacgacugcaagaucaugaccagcaagaccgacguguccagcuccgucaucacgagccugggggccaucguguccugcuacggcaagaccaagugcaccgccagcaacaagaaccgggggaucaucaagaccuucuccaacggcugcgacuacgugagcaacaagggcgucgacacgguguccguggggaacacccucuacugcgucaacaagcaggagggccagagccuguacgugaagggggagcccaucaucaacuucuacgacccccugguguucccgagcgacgaguucgacgccuccaucagccaggucaacgagaagaucaaccagucccucgccuucauccgcaagagcgacgagcugcugcacaacgugaacgcgggcaaguccaccaccaacaucaugaucaccacgaucaucaucgugaucaucgucauccuccugagccugaucgccguggggcuccugcuguacugcaaggcccgguccacccccgugacccugagcaaggaccagcucuccggcaucaacaacaucgccuucagcaacugaggacuaguaauaaggaaacuguaugaaugucugugggcaggaagugaagagauccuucuguaaagguuuuuggaauuaugucugcugaauaauaaacuuuuuugaaauaauaaaucugguagaaaaaugagaucuaaaaaaaaaaaaaaaaaaaaaaaaaaaaaaaaaaaaaaaaaaaaaaaaaaaaaaaaaaaaaaaaugcaucccccccccccccccccccccccccccccccaaaggcucuuuucagagccaccagaauu

SEQ ID NO: 3403 - RNA, 1970 nt, Artificial Sequence
  mRNA product Design g-5 comprising derived and/or modified sequence from HRSV(A2)__F_DSCav1_mut3 (opt2)
gggagacccgugacccggaaguuguacggcuacgcgacuuucccucccacaaacccucgcgcccuuccuuuccuacuugggcccggcagaaagcuuaccauggagcuccucauccucaaggccaacgccaucaccaccauccucaccgccgucaccuucugcuucgccuccggccagaacaucaccgaggaguucuaccaguccaccugcuccgccgucuccaagggcuaccucggcgcccuccgcaccggcugguacaccuccgucaucaccaucgagcucuccaacaucaaggagaucaagugcaacggcaccgacgccaaggucaagcucaucaagcaggagcucgacaaguacaagaacgccgucaccgaccuccagcuccucaugcaguccacccccgccaccggcuccggcuccgccaucugcuccggcgucgccgucugcaagguccuccaccucgagggcgaggucaacaagaucaaguccgcccuccucuccaccaacaaggccgucgucucccucuccaacggcgucuccguccucaccuucaagguccucgaccucaagaacuacaucgacaagcagcuccuccccauccucaacaagcaguccugcuccauccccaacaucgagaccgucaucgaguuccagcagaagaacaaccgccuccucgagaucacccgcgaguucuccgucaacgccggcgucaccacccccgucuccaccuacaugcucaccaacuccgagcuccucucccucaucaacgacaugcccaucaccaacgaccagaagaagcucauguccaacaacguccagaucguccgccagcaguccuacuccaucaugugcaucaucaaggaggagguccucgccuacgucguccagcucccccucuacggcgucaucgacacccccugcuggaagcuccacaccuccccccucugcaccaccaacaccaaggagggcuccaacaucugccucacccgcaccgaccgcggcugguacugcgacaacgccggcuccgucuccuucuucccccaggccgagaccugcaagguccaguccaaccgcgucuucugcgacaccaugaacucccucacccuccccuccgaggucaaccucugcaacgucgacaucuucaaccccaaguacgacugcaagaucaugaccuccaagaccgacgucuccuccuccgucaucaccucccucggcgccaucgucuccugcuacggcaagaccaagugcaccgccuccaacaagaaccgcggcaucaucaagaccuucuccaacggcugcgacuacgucuccaacaagggcgucgacaccgucuccgucggcaacacccucuacugcgucaacaagcaggagggccagucccucuacgucaagggcgagcccaucaucaacuucuacgacccccucgucuuccccuccgacgaguucgacgccuccaucucccaggucaacgagaagaucaaccagucccucgccuucauccgcaaguccgacgagcuccuccacaacgucaacgccggcaaguccaccaccaacaucaugaucaccaccaucaucaucgucaucaucgucauccuccucucccucaucgccgucggccuccuccucuacugcaaggcccgcuccacccccgucacccucuccaaggaccagcucuccggcaucaacaacaucgccuucuccaacugaggacuaguaauaaggaaacuguaugaaugucugugggcaggaagugaagagauccuucuguaaagguuuuuggaauuaugucugcugaauaauaaacuuuuuugaaauaauaaaucugguagaaaaaugagaucuaaaaaaaaaaaaaaaaaaaaaaaaaaaaaaaaaaaaaaaaaaaaaaaaaaaaaaaaaaaaaaaaugcaucccccccccccccccccccccccccccccccaaaggcucuuuucagagccaccagaauu

SEQ ID NO: 3404 - RNA, 1970 nt, Artificial Sequence
  mRNA product Design g-5 comprising derived and/or modified sequence from HRSV(A2)__F_DSCav1_mut3 (opt3)
gggagacccgugacccggaaguuguacggcuacgcgacuuucccucccacaaacccucgcgcccuuccuuuccuacuugggcccggcagaaagcuuaccauggagcugcucauccuuaaggccaacgcuauuaccacaauacugacugcagugacguucugcuuugccagcggccagaauaucaccgaagaguucuaccaauccacauguucugcggucucaaaaggguauuugggagcuuuaagaacugguugguacaccaguguuauuacaaucgaacugagcaacauuaaggagaucaaaugcaauggcaccgacgccaaggugaaacuaauaaagcaggaacucgauaaguauaaaaacgcaguaacugaccugcagcuucugaugcaguccacacccgccaccgggucuggaucggcuaucuguucaggcguggcagucugcaagguguugcaccucgagggugagguuaauaaaauuaagagcgcccugcugaguacgaacaaagcuguggucucccucucuaauggggugagcguauuaacuuuuaagguucuggaucuuaagaacuacaucgacaaacaauugcugccuauucuaaauaagcaguccuguucaaucccaaacauagaaaccgugauugaguuccagcagaaaaauaacaggcuccuggaaaucacacgggaguuuagugucaaugccggagugacuaccccggugagcacauauaugcuuaccaacucugagcuguugucccucauuaaugauaugcccaucacgaacgaccaaaagaaacugaugucaaacaauguccagaucguucgccagcagagcuacaguauuaugugcauaaucaaggaagagguguuagcguauguagugcaacugccucucuacggcgucauugauacuccauguuggaaacuucauacaucuccccugugcaccacuaacacaaaggaaggcuccaauaucuguuugacccgaacggaccgugggugguacugcgauaacgcaggaagcgugucguucuuuccucaggccgagaccuguaagguucagucuaauagaguguucugcgacacaaugaacucccuaacucugccaucagaagucaaucucugcaacguggauauauuuaaucccaaauaugacuguaagauuaugaccaguaaaacagauguaagcuccucuguuaucacuagccugggugcuaucgugucaugcuacggcaagaccaaauguacagccaguaacaagaauagggggauuaucaagaccuucuccaacggaugcgacuaugucagcaauaaaggcguggacacugucucuguggguaacacgcuuuacuguguuaauaagcaagaggggcagucacuguaugugaaaggagagccuauuauaaacuuuuacgauccauugguauucccgagugacgaauuugaugcaagcaucucccaggucaacgagaagauuaaucagucucucgcuuucauccggaaaucggacgaacuguuacacaacgugaaugccggcaagagcacaaccaacaucaugauuacuaccauaaucauuguuaucauugugauccugcuaucccucauagcggucggccugcuuuuguauugcaaggcccgcucaacacccgugacccugaguaaagaucaacucucugggaucaauaacauugcauucagcaauugaggacuaguaauaaggaaacuguaugaaugucugugggcaggaagugaagagauccuucuguaaagguuuuuggaauuaugucugcugaauaauaaacuuuuuugaaauaauaaaucugguagaaaaaugagaucuaaaaaaaaaaaaaaaaaaaaaaaaaaaaaaaaaaaaaaaaaaaaaaaaaaaaaaaaaaaaaaaaugcaucccccccccccccccccccccccccccccccaaaggcucuuuucagagccaccagaauu

SEQ ID NO: 3405 - RNA, 1970 nt, Artificial Sequence
  mRNA product Design g-5 comprising derived and/or modified sequence from HRSV(A2)__F_DSCav1_mut3 (opt4)
gggagacccgugacccggaaguuguacggcuacgcgacuuucccucccacaaacccucgcgcccuuccuuuccuacuugggcccggcagaaagcuuaccauggagcugcugauccugaaggccaacgccaucaccaccauccugaccgccgugaccuucugcuucgccagcggccagaacaucaccgaggaguucuaccagagcaccugcagcgccgugagcaagggcuaccugggcgcccugagaaccggcugguacaccagcgugaucaccaucgagcugagcaacaucaaggagaucaagugcaacggcaccgacgccaaggugaagcugaucaagcaggagcuggacaaguacaagaacgccgugaccgaccugcagcugcugaugcagagcacccccgccaccggcagcggcagcgccaucugcagcggcguggccgugugcaaggugcugcaccuggagggcgaggugaacaagaucaagagcgcccugcugagcaccaacaaggccguggugagccugagcaacggcgugagcgugcugaccuucaaggugcuggaccugaagaacuacaucgacaagcagcugcugcccauccugaacaagcagagcugcagcauccccaacaucgagaccgugaucgaguuccagcagaagaacaacagacugcuggagaucaccagagaguucagcgugaacgccggcgugaccacccccgugagcaccuacaugcugaccaacagcgagcugcugagccugaucaacgacaugcccaucaccaacgaccagaagaagcugaugagcaacaacgugcagaucgugagacagcagagcuacagcaucaugugcaucaucaaggaggaggugcuggccuacguggugcagcugccccuguacggcgugaucgacacccccugcuggaagcugcacaccagcccccugugcaccaccaacaccaaggagggcagcaacaucugccugaccagaaccgacagaggcugguacugcgacaacgccggcagcgugagcuucuucccccaggccgagaccugcaaggugcagagcaacagaguguucugcgacaccaugaacagccugacccugcccagcgaggugaaccugugcaacguggacaucuucaaccccaaguacgacugcaagaucaugaccagcaagaccgacgugagcagcagcgugaucaccagccugggcgccaucgugagcugcuacggcaagaccaagugcaccgccagcaacaagaacagaggcaucaucaagaccuucagcaacggcugcgacuacgugagcaacaagggcguggacaccgugagcgugggcaacacccuguacugcgugaacaagcaggagggccagagccuguacgugaagggcgagcccaucaucaacuucuacgacccccugguguuccccagcgacgaguucgacgccagcaucagccaggugaacgagaagaucaaccagagccuggccuucaucagaaagagcgacgagcugcugcacaacgugaacgccggcaagagcaccaccaacaucaugaucaccaccaucaucaucgugaucaucgugauccugcugagccugaucgccgugggccugcugcuguacugcaaggccagaagcacccccgugacccugagcaaggaccagcugagcggcaucaacaacaucgccuucagcaacugaggacuaguaauaaggaaacuguaugaaugucugugggcaggaagugaagagauccuucuguaaagguuuuuggaauuaugucugcugaauaauaaacuuuuuugaaauaauaaaucugguagaaaaaugagaucuaaaaaaaaaaaaaaaaaaaaaaaaaaaaaaaaaaaaaaaaaaaaaaaaaaaaaaaaaaaaaaaaugcaucccccccccccccccccccccccccccccccaaaggcucuuuucagagccaccagaauu

SEQ ID NO: 3406 - RNA, 1970 nt, Artificial Sequence
  mRNA product Design g-5 comprising derived and/or modified sequence from HRSV(A2)__F_DSCav1_mut3 (opt5)
gggagacccgugacccggaaguuguacggcuacgcgacuuucccucccacaaacccucgcgcccuuccuuuccuacuugggcccggcagaaagcuuaccauggagcugcucauccugaaggccaacgcuauuaccacaauccuuacggccgugaccuucugcuuugcgagcggccagaauauuacagaagaguucuaccaauccaccuguucugcugucagcaaaggguaucugggagcccucagaacaggcugguacaccuccguuaucacaauugaacugucuaacaucaaggagaucaaaugcaaugggaccgacgccaaggugaaacuuauuaagcaggaacuggauaaguauaaaaacgcugugacggaccuccagcugcugaugcagagcacccccgccacaggauccggcucugcuaucuguagcggggucgccgugugcaagguucuccaccuggagggagaggugaauaaaauuaaguccgcgcuucugagcaccaacaaagccgucgugucucucuccaauggcguuagcgugcugacauuuaagguccuugaucugaagaacuacaucgacaaacaacuccugccuauucugaauaagcagucuuguuccaucccgaacauugaaaccgugaucgaguuccagcagaaaaauaaccggcuccuggaaaucacgcgcgaguuuagcgugaaugcuggcgucacaacccccguuucuacauauaugcuuaccaacuccgagcugcucagccugauuaaugauaugccuaucaccaacgaccaaaagaaacuuauguccaacaaugugcagauugugagacagcagucuuacagcaucaugugcauuaucaaggaagagguccuggccuaugugguucaacucccccuguacggggugaucgauacaccuuguuggaaacugcauacgagcccccucugcaccacaaacaccaaggaaggauccaauauuugucugacacggaccgaccgcggcugguacugcgauaacgcugggucugucuccuucuuuccucaggccgagacguguaaggugcagagcaauagaguuuucugcgacacaaugaacucucuuacccugccgagcgaagugaaucucugcaacgucgauaucuuuaaucccaaauaugacuguaagauuaugaccuccaaaacagaugugucuagcuccgucaucaccagccugggagcgauugugucuugcuacggcaagacaaaauguacggccuccaacaagaaucgggggaucaucaagaccuucagcaacggaugcgacuauguuucuaauaaaggcguggacacagucuccgugggcaacacccuuuacuguguuaauaagcaagaggggcagagccuguaugugaaaggagagccuauuaucaacuuuuacgauccccucgucuucccuuccgacgaauuugaugcuucuauuagccaggugaacgagaagaucaaucagucccuggccuucauucgcaaaucugacgaacugcuccacaacgugaaugcuggcaagagcacaaccaacaucaugauuacgaccaucaucauuguuaucauugucauccugcuuucccugauugccguggggcuccugcuguauugcaaggccagaagcacacccgugacccuuucuaaagaucaacucuccggaaucaauaacaucgcuuucagcaauugaggacuaguaauaaggaaacuguaugaaugucugugggcaggaagugaagagauccuucuguaaagguuuuuggaauuaugucugcugaauaauaaacuuuuuugaaauaauaaaucugguagaaaaaugagaucuaaaaaaaaaaaaaaaaaaaaaaaaaaaaaaaaaaaaaaaaaaaaaaaaaaaaaaaaaaaaaaaaugcaucccccccccccccccccccccccccccccccaaaggcucuuuucagagccaccagaauu

SEQ ID NO: 3407 - RNA, 1970 nt, Artificial Sequence
  mRNA product Design g-5 comprising derived and/or modified sequence from HRSV(A2)__F_DSCav1_mut3 (opt6)
gggagacccgugacccggaaguuguacggcuacgcgacuuucccucccacaaacccucgcgcccuuccuuuccuacuugggcccggcagaaagcuuaccauggaauuacucauacuaaaagccaaugccauaaccacuauucuaacagcaguaacauucuguuucgccucaggacaaaacauaacagaagaauuuuaucaauccaccuguuccgcagucucgaaaggcuaccuuggcgcacuaagaaccggaugguauacaucaguaauaaccauugaacuaucaaauaucaaagaaauaaaaugcaacggaacugacgcaaaagucaaacuaauaaaacaagaauuagacaaauacaaaaacgccguuacagacuuacaacuacuaaugcaaucaacuccagcaacaggaucaggaucugcuauaugcucaggugucgccguauguaaaguguuacaccucgaaggcgaaguaaacaaaauaaaaucagcacuacuauccacaaauaaagcaguaguaucacuauccaaugguguaucaguacucacauucaaaguacuagacuuaaaaaauuauauagauaaacaauuacuaccaauauuaaacaaacaaucaugcucaauaccaaacauagaaaccgucauugaauuucaacaaaaaaacaaucgacuucuugaaauaacacgagaauuuucaguaaaugccggaguaacaaccccagucucaacauacauguuaaccaacucugaacuccuaagccuaaucaacgacaugcccauaacuaacgaccaaaaaaaacuaauguccaauaauguccaaauaguaagacaacaauccuacucaauaaugugcauuauaaaagaagaaguccucgccuauguaguacaacuacccuuauacggaguaauugacacaccauguuggaaacuacauacaucaccacuaugcaccacuaacacaaaagaaggcuccaacauaugccuaacccgaacagaucgcggaugguauugcgacaacgcaggaaguguauccuucuuuccacaagcagaaacaugcaaaguacaauccaacagaguauucugugacaccaugaacucucuaacacuaccuuccgaaguaaauuuaugcaacguagacauauuuaaucccaaauacgacuguaaaauaaugaccucaaaaacugaugucucaucaucagucauuacaucacucggagcaauagucaguugcuauggaaaaaccaaaugcacagcuaguaacaaaaacagggguauaauaaaaacauuuucaaacggaugcgauuacguaucaaauaaaggaguagacaccguauccguaggaaauacucucuacugcguaaacaaacaagaaggacaaucccuauacguaaaaggcgaaccaaucauuaacuuuuacgacccacuuguauuuccaucagacgaauuugaugccucaauaucccaagucaaugaaaaaauaaaccaaagucuagcauucauccgaaaaucagaugaacuuuuacacaacguaaacgccggaaaaucaacaacaaacaucaugaucacaacaaucaucauaguaauaauaguuauacuacuuuccuuaauagcagucggccuacuacucuacugcaaagcacgauccacaccaguaaccuuaucuaaagaccaacucucaggcauaaacaacauagcauucucaaacuaaggacuaguaauaaggaaacuguaugaaugucugugggcaggaagugaagagauccuucuguaaagguuuuuggaauuaugucugcugaauaauaaacuuuuuugaaauaauaaaucugguagaaaaaugagaucuaaaaaaaaaaaaaaaaaaaaaaaaaaaaaaaaaaaaaaaaaaaaaaaaaaaaaaaaaaaaaaaaugcaucccccccccccccccccccccccccccccccaaaggcucuuuucagagccaccagaauu

SEQ ID NO: 3408 - RNA, 1970 nt, Artificial Sequence
  mRNA product Design g-5 comprising derived and/or modified sequence from HRSV(A2)__F_DSCav1_mut3 (opt11)
gggagacccgugacccggaaguuguacggcuacgcgacuuucccucccacaaacccucgcgcccuuccuuuccuacuugggcccggcagaaagcuuaccauggaacuccucauccuuaaagcaaacgccaucacaaccauccucacagcagucacuuucugcuucgcauccggacaaaacaucacagaagaguucuaucaauccacgugcuccgcaguuuccaaaggauaccuuggagccuuacgaaccggcugguacaccuccgucaucaccauagaacucagcaacaucaaagaaaucaaaugcaacggaaccgacgcaaaagucaaacucaucaaacaagaacuagacaaauacaaaaacgcagucaccgaccuccaacuacucaugcaaucaacccccgcaaccggcuccggcuccgccaucugcuccggaguagccguaugcaaaguccuccaccucgaaggcgaaguuaacaagaucaaguccgcacuccuaucaaccaacaaagcagucgucucccuauccaacggcgucuccguauuaacauucaaaguccucgaccucaaaaacuacauagacaaacagcuacuccccauccuaaacaaacaauccugcuccauccccaacaucgaaacugucaucgaguuccaacagaaaaacaaccgccuccuagaaaucacccgagaguucuccguaaacgccggcgucacuacccccgucucuaccuauaugcuaaccaacucugaacuccuaucccuaaucaacgauaugcccauaacuaacgaccaaaagaaacuuauguccaacaacguacaaauaguccggcaacaaucauacucuaucaugugcaucaucaaagaagaaguacuugccuacguuguccaacucccacuauacggcgucauagacacuccaugcuggaaacuucacaccucaccccucugcaccacuaacacuaaagaaggcucuaacaucugccuuacccgcaccgaccgcggaugguacugcgacaacgcaggcucaguuagcuucuucccacaagccgaaaccugcaaaguccagucaaaccgugucuucugcgauaccaugaacucgcucacccucccuuccgaagucaaccucugcaacgucgacaucuucaaccccaaauacgacugcaaaaucaugaccucaaaaaccgacguaucuucuuccgucaucaccucccucggcgccaucguauccugcuacggcaaaaccaaaugcacugcaucaaacaaaaaccgaggcaucaucaaaaccuucucgaacggaugcgacuacguauccaacaagggcgucgacacagucuccguugguaacacccucuacugcgucaacaaacaagaaggccaaucccuauacguaaaaggcgaacccaucaucaacuucuacgacccccucgucuuccccagugacgaauuugacgccuccaucucccaagucaacgaaaagaucaaccaaucccuugccuucauacgcaaauccgacgaacuccuacacaacguuaacgccggaaaaucaacaaccaacaucaugaucacaaccaucauaaucgucauaaucgucauacuccucucccucauagccgucggccugcuauuguacuguaaagcccgcuccacaccagucacacuuucaaaagaccaacucuccgggaucaacaacaucgccuucuccaacuaaggacuaguaauaaggaaacuguaugaaugucugugggcaggaagugaagagauccuucuguaaagguuuuuggaauuaugucugcugaauaauaaacuuuuuugaaauaauaaaucugguagaaaaaugagaucuaaaaaaaaaaaaaaaaaaaaaaaaaaaaaaaaaaaaaaaaaaaaaaaaaaaaaaaaaaaaaaaaugcaucccccccccccccccccccccccccccccccaaaggcucuuuucagagccaccagaauu

SEQ ID NO: 3409 - RNA, 1986 nt, Artificial Sequence
  mRNA product Design h-1 comprising derived and/or modified sequence from HRSV(A2)__F_DSCav1_mut3 (opt1)
gggagacccgugacccggaaguuguacggcuacgcgacuuucccucccacaaacccucgcgcccuuccuuuccuacuugggcccggcagaaagcuuaccauggagcugcucauccugaaggccaacgccaucaccaccauccugacggcggugaccuucugcuucgccagcggccagaacaucaccgaggaguucuaccaguccacgugcagcgccgucuccaagggguaccucggcgcccugcggaccggcugguacaccuccgugaucaccaucgagcugagcaacaucaaggagaucaagugcaacgggaccgacgccaaggugaagcucaucaagcaggagcuggacaaguacaagaacgcggucacggaccugcagcuccugaugcaguccaccccggcaaccggcuccggcuccgccaucugcagcggcgucgccgugugcaaggugcugcaccucgagggggaggucaacaagaucaagagcgcccugcuguccaccaacaaggccguggugagccucuccaacggcgucagcgugcugaccuucaaggugcuggaccucaagaacuacaucgacaagcagcugcugcccauccugaacaagcagagcugcuccauccccaacaucgagacggugaucgaguuccagcagaagaacaaccggcuccuggagaucacccgcgaguucagcgugaacgccggggucaccacccccguguccacguacaugcugaccaacagcgagcuccugucccugaucaacgacaugccgaucaccaacgaccagaagaagcucaugagcaacaacgugcagaucguccggcagcaguccuacagcaucaugugcaucaucaaggaggaggugcuggcguacgugguccagcugccccucuacggcgugaucgacacccccugcuggaagcugcacacgagcccccugugcaccaccaacaccaaggagggguccaacaucugccucacgcgcaccgaccggggcugguacugcgacaacgccggcagcgucuccuucuucccgcaggccgagaccugcaaggugcagagcaaccgcguguucugcgacaccaugaacucccugacgcugcccagcgagguaaaccucugcaacgucgacaucuucaaccccaaguacgacugcaagaucaugaccuccaagaccgacgugagcuccagcgugaucaccucccugggggccaucgucagcugcuacggcaagacgaagugcaccgccagcaacaagaaccgggggaucaucaagaccuucuccaacggcugcgacuacgugagcaacaagggcguggacaccguguccgucgggaacacccuguacugcgugaacaagcaggagggccagagccucuacgugaagggggagcccaucaucaacuucuacgacccgcuggucuuccccuccgacgaguucgacgcgagcaucucccaggugaacgagaagaucaaccagagccuggccuucauccgcaaguccgacgagcugcuccacaacgugaacgccggcaagagcacgaccaacaucaugaucaccaccaucaucaucgucaucaucgugauccugcugucccucaucgccguggggcugcugcucuacugcaaggcccggagcacgcccgucacccuguccaaggaccagcugagcggcaucaacaacaucgcguucuccaacugaggacuaguacuggcugcaucucccuuuccucuguccuccauccuucucccaggauggugaagggggaccugguacccagugauccccaccccaggauccuaaaucaugacuuaccugcuaauaaaaacucauuggaaaagugagaagaucuaaaaaaaaaaaaaaaaaaaaaaaaaaaaaaaaaaaaaaaaaaaaaaaaaaaaaaaaaaaaaaaaugcaucccccccccccccccccccccccccccccccaaaggcucuuuucagagccaccagaauu

SEQ ID NO: 3410 - RNA, 1986 nt, Artificial Sequence
  mRNA product Design h-1 comprising derived and/or modified sequence from HRSV(A2)__F_DSCav1_mut3 (opt1)
gggagacccgugacccggaaguuguacggcuacgcgacuuucccucccacaaacccucgcgcccuuccuuuccuacuugggcccggcagaaagcuuaccauggagcugcucauccugaaggccaacgccaucaccaccauccugacggcggugaccuucugcuucgccagcggccagaacaucaccgaggaguucuaccaguccacgugcagcgccgucuccaagggguaccucggcgcccugcgcaccgggugguacaccagcgugaucaccaucgagcuguccaacaucaaggagaucaagugcaacggcaccgacgccaaggugaagcucaucaagcaggagcuggacaaguacaagaacgcggucacggaccugcagcuccugaugcagagcacccccgccaccggguccggcagcgccaucugcuccggcguggccgugugcaagguccugcaccucgagggggaggugaacaagaucaagagcgcgcugcuguccaccaacaaggccguggucagccucuccaacggcgugagcgugcugacguucaagguccuggaccucaagaacuacaucgacaagcagcugcugccgauccucaacaagcaguccugcagcauccccaacaucgagaccgugaucgaguuccagcagaagaacaaccggcugcuggagaucacccgcgaguucuccgugaacgccggggucaccacgcccgugagcaccuacaugcucaccaacuccgagcugcugagccucaucaacgacaugcccaucaccaacgaccagaagaagcugaugagcaacaacgugcagaucguccggcagcaguccuacagcaucaugugcaucaucaaggaggaggugcuggccuacgugguccagcucccgcuguacggcgugaucgacacgcccugcuggaagcugcacaccagcccccucugcaccaccaacacgaaggagggguccaacaucugccugacccgcaccgaccggggcugguacugcgacaacgccggcuccgugagcuucuucccccaggcggagaccugcaagguccaguccaaccgcguguucugcgacacgaugaacagccugacccucccguccgaggucaaccugugcaacguggacaucuucaaccccaaguacgacugcaagaucaugaccagcaagaccgacguguccagcuccgucaucacgagccugggggccaucguguccugcuacggcaagaccaagugcaccgccagcaacaagaaccgggggaucaucaagaccuucuccaacggcugcgacuacgugagcaacaagggcgucgacacgguguccguggggaacacccucuacugcgucaacaagcaggagggccagagccuguacgugaagggggagcccaucaucaacuucuacgacccccugguguucccgagcgacgaguucgacgccuccaucagccaggucaacgagaagaucaaccagucccucgccuucauccgcaagagcgacgagcugcugcacaacgugaacgcgggcaaguccaccaccaacaucaugaucaccacgaucaucaucgugaucaucgucauccuccugagccugaucgccguggggcuccugcuguacugcaaggcccgguccacccccgugacccugagcaaggaccagcucuccggcaucaacaacaucgccuucagcaacugaggacuaguacuggcugcaucucccuuuccucuguccuccauccuucucccaggauggugaagggggaccugguacccagugauccccaccccaggauccuaaaucaugacuuaccugcuaauaaaaacucauuggaaaagugagaagaucuaaaaaaaaaaaaaaaaaaaaaaaaaaaaaaaaaaaaaaaaaaaaaaaaaaaaaaaaaaaaaaaaugcaucccccccccccccccccccccccccccccccaaaggcucuuuucagagccaccagaauu

SEQ ID NO: 3411 - RNA, 1986 nt, Artificial Sequence
  mRNA product Design h-1 comprising derived and/or modified sequence from HRSV(A2)__F_DSCav1_mut3 (opt2)
gggagacccgugacccggaaguuguacggcuacgcgacuuucccucccacaaacccucgcgcccuuccuuuccuacuugggcccggcagaaagcuuaccauggagcuccucauccucaaggccaacgccaucaccaccauccucaccgccgucaccuucugcuucgccuccggccagaacaucaccgaggaguucuaccaguccaccugcuccgccgucuccaagggcuaccucggcgcccuccgcaccggcugguacaccuccgucaucaccaucgagcucuccaacaucaaggagaucaagugcaacggcaccgacgccaaggucaagcucaucaagcaggagcucgacaaguacaagaacgccgucaccgaccuccagcuccucaugcaguccacccccgccaccggcuccggcuccgccaucugcuccggcgucgccgucugcaagguccuccaccucgagggcgaggucaacaagaucaaguccgcccuccucuccaccaacaaggccgucgucucccucuccaacggcgucuccguccucaccuucaagguccucgaccucaagaacuacaucgacaagcagcuccuccccauccucaacaagcaguccugcuccauccccaacaucgagaccgucaucgaguuccagcagaagaacaaccgccuccucgagaucacccgcgaguucuccgucaacgccggcgucaccacccccgucuccaccuacaugcucaccaacuccgagcuccucucccucaucaacgacaugcccaucaccaacgaccagaagaagcucauguccaacaacguccagaucguccgccagcaguccuacuccaucaugugcaucaucaaggaggagguccucgccuacgucguccagcucccccucuacggcgucaucgacacccccugcuggaagcuccacaccuccccccucugcaccaccaacaccaaggagggcuccaacaucugccucacccgcaccgaccgcggcugguacugcgacaacgccggcuccgucuccuucuucccccaggccgagaccugcaagguccaguccaaccgcgucuucugcgacaccaugaacucccucacccuccccuccgaggucaaccucugcaacgucgacaucuucaaccccaaguacgacugcaagaucaugaccuccaagaccgacgucuccuccuccgucaucaccucccucggcgccaucgucuccugcuacggcaagaccaagugcaccgccuccaacaagaaccgcggcaucaucaagaccuucuccaacggcugcgacuacgucuccaacaagggcgucgacaccgucuccgucggcaacacccucuacugcgucaacaagcaggagggccagucccucuacgucaagggcgagcccaucaucaacuucuacgacccccucgucuuccccuccgacgaguucgacgccuccaucucccaggucaacgagaagaucaaccagucccucgccuucauccgcaaguccgacgagcuccuccacaacgucaacgccggcaaguccaccaccaacaucaugaucaccaccaucaucaucgucaucaucgucauccuccucucccucaucgccgucggccuccuccucuacugcaaggcccgcuccacccccgucacccucuccaaggaccagcucuccggcaucaacaacaucgccuucuccaacugaggacuaguacuggcugcaucucccuuuccucuguccuccauccuucucccaggauggugaagggggaccugguacccagugauccccaccccaggauccuaaaucaugacuuaccugcuaauaaaaacucauuggaaaagugagaagaucuaaaaaaaaaaaaaaaaaaaaaaaaaaaaaaaaaaaaaaaaaaaaaaaaaaaaaaaaaaaaaaaaugcaucccccccccccccccccccccccccccccccaaaggcucuuuucagagccaccagaauu

SEQ ID NO: 3412 - RNA, 1986 nt, Artificial Sequence
  mRNA product Design h-1 comprising derived and/or modified sequence from HRSV(A2)__F_DSCav1_mut3 (opt3)
gggagacccgugacccggaaguuguacggcuacgcgacuuucccucccacaaacccucgcgcccuuccuuuccuacuugggcccggcagaaagcuuaccauggagcugcucauccuuaaggccaacgcuauuaccacaauacugacugcagugacguucugcuuugccagcggccagaauaucaccgaagaguucuaccaauccacauguucugcggucucaaaaggguauuugggagcuuuaagaacugguugguacaccaguguuauuacaaucgaacugagcaacauuaaggagaucaaaugcaauggcaccgacgccaaggugaaacuaauaaagcaggaacucgauaaguauaaaaacgcaguaacugaccugcagcuucugaugcaguccacacccgccaccgggucuggaucggcuaucuguucaggcguggcagucugcaagguguugcaccucgagggugagguuaauaaaauuaagagcgcccugcugaguacgaacaaagcuguggucucccucucuaauggggugagcguauuaacuuuuaagguucuggaucuuaagaacuacaucgacaaacaauugcugccuauucuaaauaagcaguccuguucaaucccaaacauagaaaccgugauugaguuccagcagaaaaauaacaggcuccuggaaaucacacgggaguuuagugucaaugccggagugacuaccccggugagcacauauaugcuuaccaacucugagcuguugucccucauuaaugauaugcccaucacgaacgaccaaaagaaacugaugucaaacaauguccagaucguucgccagcagagcuacaguauuaugugcauaaucaaggaagagguguuagcguauguagugcaacugccucucuacggcgucauugauacuccauguuggaaacuucauacaucuccccugugcaccacuaacacaaaggaaggcuccaauaucuguuugacccgaacggaccgugggugguacugcgauaacgcaggaagcgugucguucuuuccucaggccgagaccuguaagguucagucuaauagaguguucugcgacacaaugaacucccuaacucugccaucagaagucaaucucugcaacguggauauauuuaaucccaaauaugacuguaagauuaugaccaguaaaacagauguaagcuccucuguuaucacuagccugggugcuaucgugucaugcuacggcaagaccaaauguacagccaguaacaagaauagggggauuaucaagaccuucuccaacggaugcgacuaugucagcaauaaaggcguggacacugucucuguggguaacacgcuuuacuguguuaauaagcaagaggggcagucacuguaugugaaaggagagccuauuauaaacuuuuacgauccauugguauucccgagugacgaauuugaugcaagcaucucccaggucaacgagaagauuaaucagucucucgcuuucauccggaaaucggacgaacuguuacacaacgugaaugccggcaagagcacaaccaacaucaugauuacuaccauaaucauuguuaucauugugauccugcuaucccucauagcggucggccugcuuuuguauugcaaggcccgcucaacacccgugacccugaguaaagaucaacucucugggaucaauaacauugcauucagcaauugaggacuaguacuggcugcaucucccuuuccucuguccuccauccuucucccaggauggugaagggggaccugguacccagugauccccaccccaggauccuaaaucaugacuuaccugcuaauaaaaacucauuggaaaagugagaagaucuaaaaaaaaaaaaaaaaaaaaaaaaaaaaaaaaaaaaaaaaaaaaaaaaaaaaaaaaaaaaaaaaugcaucccccccccccccccccccccccccccccccaaaggcucuuuucagagccaccagaauu

SEQ ID NO: 3413 - RNA, 1986 nt, Artificial Sequence
  mRNA product Design h-1 comprising derived and/or modified sequence from HRSV(A2)__F_DSCav1_mut3 (opt4)
gggagacccgugacccggaaguuguacggcuacgcgacuuucccucccacaaacccucgcgcccuuccuuuccuacuugggcccggcagaaagcuuaccauggagcugcugauccugaaggccaacgccaucaccaccauccugaccgccgugaccuucugcuucgccagcggccagaacaucaccgaggaguucuaccagagcaccugcagcgccgugagcaagggcuaccugggcgcccugagaaccggcugguacaccagcgugaucaccaucgagcugagcaacaucaaggagaucaagugcaacggcaccgacgccaaggugaagcugaucaagcaggagcuggacaaguacaagaacgccgugaccgaccugcagcugcugaugcagagcacccccgccaccggcagcggcagcgccaucugcagcggcguggccgugugcaaggugcugcaccuggagggcgaggugaacaagaucaagagcgcccugcugagcaccaacaaggccguggugagccugagcaacggcgugagcgugcugaccuucaaggugcuggaccugaagaacuacaucgacaagcagcugcugcccauccugaacaagcagagcugcagcauccccaacaucgagaccgugaucgaguuccagcagaagaacaacagacugcuggagaucaccagagaguucagcgugaacgccggcgugaccacccccgugagcaccuacaugcugaccaacagcgagcugcugagccugaucaacgacaugcccaucaccaacgaccagaagaagcugaugagcaacaacgugcagaucgugagacagcagagcuacagcaucaugugcaucaucaaggaggaggugcuggccuacguggugcagcugccccuguacggcgugaucgacacccccugcuggaagcugcacaccagcccccugugcaccaccaacaccaaggagggcagcaacaucugccugaccagaaccgacagaggcugguacugcgacaacgccggcagcgugagcuucuucccccaggccgagaccugcaaggugcagagcaacagaguguucugcgacaccaugaacagccugacccugcccagcgaggugaaccugugcaacguggacaucuucaaccccaaguacgacugcaagaucaugaccagcaagaccgacgugagcagcagcgugaucaccagccugggcgccaucgugagcugcuacggcaagaccaagugcaccgccagcaacaagaacagaggcaucaucaagaccuucagcaacggcugcgacuacgugagcaacaagggcguggacaccgugagcgugggcaacacccuguacugcgugaacaagcaggagggccagagccuguacgugaagggcgagcccaucaucaacuucuacgacccccugguguuccccagcgacgaguucgacgccagcaucagccaggugaacgagaagaucaaccagagccuggccuucaucagaaagagcgacgagcugcugcacaacgugaacgccggcaagagcaccaccaacaucaugaucaccaccaucaucaucgugaucaucgugauccugcugagccugaucgccgugggccugcugcuguacugcaaggccagaagcacccccgugacccugagcaaggaccagcugagcggcaucaacaacaucgccuucagcaacugaggacuaguacuggcugcaucucccuuuccucuguccuccauccuucucccaggauggugaagggggaccugguacccagugauccccaccccaggauccuaaaucaugacuuaccugcuaauaaaaacucauuggaaaagugagaagaucuaaaaaaaaaaaaaaaaaaaaaaaaaaaaaaaaaaaaaaaaaaaaaaaaaaaaaaaaaaaaaaaaugcaucccccccccccccccccccccccccccccccaaaggcucuuuucagagccaccagaauu

SEQ ID NO: 3414 - RNA, 1986 nt, Artificial Sequence
  mRNA product Design h-1 comprising derived and/or modified sequence from HRSV(A2)__F_DSCav1_mut3 (opt5)
gggagacccgugacccggaaguuguacggcuacgcgacuuucccucccacaaacccucgcgcccuuccuuuccuacuugggcccggcagaaagcuuaccauggagcugcucauccugaaggccaacgcuauuaccacaauccuuacggccgugaccuucugcuuugcgagcggccagaauauuacagaagaguucuaccaauccaccuguucugcugucagcaaaggguaucugggagcccucagaacaggcugguacaccuccguuaucacaauugaacugucuaacaucaaggagaucaaaugcaaugggaccgacgccaaggugaaacuuauuaagcaggaacuggauaaguauaaaaacgcugugacggaccuccagcugcugaugcagagcacccccgccacaggauccggcucugcuaucuguagcggggucgccgugugcaagguucuccaccuggagggagaggugaauaaaauuaaguccgcgcuucugagcaccaacaaagccgucgugucucucuccaauggcguuagcgugcugacauuuaagguccuugaucugaagaacuacaucgacaaacaacuccugccuauucugaauaagcagucuuguuccaucccgaacauugaaaccgugaucgaguuccagcagaaaaauaaccggcuccuggaaaucacgcgcgaguuuagcgugaaugcuggcgucacaacccccguuucuacauauaugcuuaccaacuccgagcugcucagccugauuaaugauaugccuaucaccaacgaccaaaagaaacuuauguccaacaaugugcagauugugagacagcagucuuacagcaucaugugcauuaucaaggaagagguccuggccuaugugguucaacucccccuguacggggugaucgauacaccuuguuggaaacugcauacgagcccccucugcaccacaaacaccaaggaaggauccaauauuugucugacacggaccgaccgcggcugguacugcgauaacgcugggucugucuccuucuuuccucaggccgagacguguaaggugcagagcaauagaguuuucugcgacacaaugaacucucuuacccugccgagcgaagugaaucucugcaacgucgauaucuuuaaucccaaauaugacuguaagauuaugaccuccaaaacagaugugucuagcuccgucaucaccagccugggagcgauugugucuugcuacggcaagacaaaauguacggccuccaacaagaaucgggggaucaucaagaccuucagcaacggaugcgacuauguuucuaauaaaggcguggacacagucuccgugggcaacacccuuuacuguguuaauaagcaagaggggcagagccuguaugugaaaggagagccuauuaucaacuuuuacgauccccucgucuucccuuccgacgaauuugaugcuucuauuagccaggugaacgagaagaucaaucagucccuggccuucauucgcaaaucugacgaacugcuccacaacgugaaugcuggcaagagcacaaccaacaucaugauuacgaccaucaucauuguuaucauugucauccugcuuucccugauugccguggggcuccugcuguauugcaaggccagaagcacacccgugacccuuucuaaagaucaacucuccggaaucaauaacaucgcuuucagcaauugaggacuaguacuggcugcaucucccuuuccucuguccuccauccuucucccaggauggugaagggggaccugguacccagugauccccaccccaggauccuaaaucaugacuuaccugcuaauaaaaacucauuggaaaagugagaagaucuaaaaaaaaaaaaaaaaaaaaaaaaaaaaaaaaaaaaaaaaaaaaaaaaaaaaaaaaaaaaaaaaugcaucccccccccccccccccccccccccccccccaaaggcucuuuucagagccaccagaauu

SEQ ID NO: 3415 - RNA, 1986 nt, Artificial Sequence
  mRNA product Design h-1 comprising derived and/or modified sequence from HRSV(A2)__F_DSCav1_mut3 (opt6)
gggagacccgugacccggaaguuguacggcuacgcgacuuucccucccacaaacccucgcgcccuuccuuuccuacuugggcccggcagaaagcuuaccauggaauuacucauacuaaaagccaaugccauaaccacuauucuaacagcaguaacauucuguuucgccucaggacaaaacauaacagaagaauuuuaucaauccaccuguuccgcagucucgaaaggcuaccuuggcgcacuaagaaccggaugguauacaucaguaauaaccauugaacuaucaaauaucaaagaaauaaaaugcaacggaacugacgcaaaagucaaacuaauaaaacaagaauuagacaaauacaaaaacgccguuacagacuuacaacuacuaaugcaaucaacuccagcaacaggaucaggaucugcuauaugcucaggugucgccguauguaaaguguuacaccucgaaggcgaaguaaacaaaauaaaaucagcacuacuauccacaaauaaagcaguaguaucacuauccaaugguguaucaguacucacauucaaaguacuagacuuaaaaaauuauauagauaaacaauuacuaccaauauuaaacaaacaaucaugcucaauaccaaacauagaaaccgucauugaauuucaacaaaaaaacaaucgacuucuugaaauaacacgagaauuuucaguaaaugccggaguaacaaccccagucucaacauacauguuaaccaacucugaacuccuaagccuaaucaacgacaugcccauaacuaacgaccaaaaaaaacuaauguccaauaauguccaaauaguaagacaacaauccuacucaauaaugugcauuauaaaagaagaaguccucgccuauguaguacaacuacccuuauacggaguaauugacacaccauguuggaaacuacauacaucaccacuaugcaccacuaacacaaaagaaggcuccaacauaugccuaacccgaacagaucgcggaugguauugcgacaacgcaggaaguguauccuucuuuccacaagcagaaacaugcaaaguacaauccaacagaguauucugugacaccaugaacucucuaacacuaccuuccgaaguaaauuuaugcaacguagacauauuuaaucccaaauacgacuguaaaauaaugaccucaaaaacugaugucucaucaucagucauuacaucacucggagcaauagucaguugcuauggaaaaaccaaaugcacagcuaguaacaaaaacagggguauaauaaaaacauuuucaaacggaugcgauuacguaucaaauaaaggaguagacaccguauccguaggaaauacucucuacugcguaaacaaacaagaaggacaaucccuauacguaaaaggcgaaccaaucauuaacuuuuacgacccacuuguauuuccaucagacgaauuugaugccucaauaucccaagucaaugaaaaaauaaaccaaagucuagcauucauccgaaaaucagaugaacuuuuacacaacguaaacgccggaaaaucaacaacaaacaucaugaucacaacaaucaucauaguaauaauaguuauacuacuuuccuuaauagcagucggccuacuacucuacugcaaagcacgauccacaccaguaaccuuaucuaaagaccaacucucaggcauaaacaacauagcauucucaaacuaaggacuaguacuggcugcaucucccuuuccucuguccuccauccuucucccaggauggugaagggggaccugguacccagugauccccaccccaggauccuaaaucaugacuuaccugcuaauaaaaacucauuggaaaagugagaagaucuaaaaaaaaaaaaaaaaaaaaaaaaaaaaaaaaaaaaaaaaaaaaaaaaaaaaaaaaaaaaaaaaugcaucccccccccccccccccccccccccccccccaaaggcucuuuucagagccaccagaauu

SEQ ID NO: 3416 - RNA, 1986 nt, Artificial Sequence
  mRNA product Design h-1 comprising derived and/or modified sequence from HRSV(A2)__F_DSCav1_mut3 (opt11)
gggagacccgugacccggaaguuguacggcuacgcgacuuucccucccacaaacccucgcgcccuuccuuuccuacuugggcccggcagaaagcuuaccauggaacuccucauccuuaaagcaaacgccaucacaaccauccucacagcagucacuuucugcuucgcauccggacaaaacaucacagaagaguucuaucaauccacgugcuccgcaguuuccaaaggauaccuuggagccuuacgaaccggcugguacaccuccgucaucaccauagaacucagcaacaucaaagaaaucaaaugcaacggaaccgacgcaaaagucaaacucaucaaacaagaacuagacaaauacaaaaacgcagucaccgaccuccaacuacucaugcaaucaacccccgcaaccggcuccggcuccgccaucugcuccggaguagccguaugcaaaguccuccaccucgaaggcgaaguuaacaagaucaaguccgcacuccuaucaaccaacaaagcagucgucucccuauccaacggcgucuccguauuaacauucaaaguccucgaccucaaaaacuacauagacaaacagcuacuccccauccuaaacaaacaauccugcuccauccccaacaucgaaacugucaucgaguuccaacagaaaaacaaccgccuccuagaaaucacccgagaguucuccguaaacgccggcgucacuacccccgucucuaccuauaugcuaaccaacucugaacuccuaucccuaaucaacgauaugcccauaacuaacgaccaaaagaaacuuauguccaacaacguacaaauaguccggcaacaaucauacucuaucaugugcaucaucaaagaagaaguacuugccuacguuguccaacucccacuauacggcgucauagacacuccaugcuggaaacuucacaccucaccccucugcaccacuaacacuaaagaaggcucuaacaucugccuuacccgcaccgaccgcggaugguacugcgacaacgcaggcucaguuagcuucuucccacaagccgaaaccugcaaaguccagucaaaccgugucuucugcgauaccaugaacucgcucacccucccuuccgaagucaaccucugcaacgucgacaucuucaaccccaaauacgacugcaaaaucaugaccucaaaaaccgacguaucuucuuccgucaucaccucccucggcgccaucguauccugcuacggcaaaaccaaaugcacugcaucaaacaaaaaccgaggcaucaucaaaaccuucucgaacggaugcgacuacguauccaacaagggcgucgacacagucuccguugguaacacccucuacugcgucaacaaacaagaaggccaaucccuauacguaaaaggcgaacccaucaucaacuucuacgacccccucgucuuccccagugacgaauuugacgccuccaucucccaagucaacgaaaagaucaaccaaucccuugccuucauacgcaaauccgacgaacuccuacacaacguuaacgccggaaaaucaacaaccaacaucaugaucacaaccaucauaaucgucauaaucgucauacuccucucccucauagccgucggccugcuauuguacuguaaagcccgcuccacaccagucacacuuucaaaagaccaacucuccgggaucaacaacaucgccuucuccaacuaaggacuaguacuggcugcaucucccuuuccucuguccuccauccuucucccaggauggugaagggggaccugguacccagugauccccaccccaggauccuaaaucaugacuuaccugcuaauaaaaacucauuggaaaagugagaagaucuaaaaaaaaaaaaaaaaaaaaaaaaaaaaaaaaaaaaaaaaaaaaaaaaaaaaaaaaaaaaaaaaugcaucccccccccccccccccccccccccccccccaaaggcucuuuucagagccaccagaauu

SEQ ID NO: 3417 - RNA, 2202 nt, Artificial Sequence
  mRNA product Design h-2 comprising derived and/or modified sequence from HRSV(A2)__F_DSCav1_mut3 (opt1)
gggagacccgugacccggaaguuguacggcuacgcgacuuucccucccacaaacccucgcgcccuuccuuuccuacuugggcccggcagaaagcuuaccauggagcugcucauccugaaggccaacgccaucaccaccauccugacggcggugaccuucugcuucgccagcggccagaacaucaccgaggaguucuaccaguccacgugcagcgccgucuccaagggguaccucggcgcccugcggaccggcugguacaccuccgugaucaccaucgagcugagcaacaucaaggagaucaagugcaacgggaccgacgccaaggugaagcucaucaagcaggagcuggacaaguacaagaacgcggucacggaccugcagcuccugaugcaguccaccccggcaaccggcuccggcuccgccaucugcagcggcgucgccgugugcaaggugcugcaccucgagggggaggucaacaagaucaagagcgcccugcuguccaccaacaaggccguggugagccucuccaacggcgucagcgugcugaccuucaaggugcuggaccucaagaacuacaucgacaagcagcugcugcccauccugaacaagcagagcugcuccauccccaacaucgagacggugaucgaguuccagcagaagaacaaccggcuccuggagaucacccgcgaguucagcgugaacgccggggucaccacccccguguccacguacaugcugaccaacagcgagcuccugucccugaucaacgacaugccgaucaccaacgaccagaagaagcucaugagcaacaacgugcagaucguccggcagcaguccuacagcaucaugugcaucaucaaggaggaggugcuggcguacgugguccagcugccccucuacggcgugaucgacacccccugcuggaagcugcacacgagcccccugugcaccaccaacaccaaggagggguccaacaucugccucacgcgcaccgaccggggcugguacugcgacaacgccggcagcgucuccuucuucccgcaggccgagaccugcaaggugcagagcaaccgcguguucugcgacaccaugaacucccugacgcugcccagcgagguaaaccucugcaacgucgacaucuucaaccccaaguacgacugcaagaucaugaccuccaagaccgacgugagcuccagcgugaucaccucccugggggccaucgucagcugcuacggcaagacgaagugcaccgccagcaacaagaaccgggggaucaucaagaccuucuccaacggcugcgacuacgugagcaacaagggcguggacaccguguccgucgggaacacccuguacugcgugaacaagcaggagggccagagccucuacgugaagggggagcccaucaucaacuucuacgacccgcuggucuuccccuccgacgaguucgacgcgagcaucucccaggugaacgagaagaucaaccagagccuggccuucauccgcaaguccgacgagcugcuccacaacgugaacgccggcaagagcacgaccaacaucaugaucaccaccaucaucaucgucaucaucgugauccugcugucccucaucgccguggggcugcugcucuacugcaaggcccggagcacgcccgucacccuguccaaggaccagcugagcggcaucaacaacaucgcguucuccaacugaggacuagugaagggaacacccaaauuuaauucagccuuaagcacaauuaauuaagagugaaacguaauuguacaagcaguuggucacccaccauagggcaugaucaacaccgcaaccuuuccuuuuucccccagugauucugaaaaaccccucuucccuucagcuugcuuagauguuccaaauuuaguaagcuuaaggcggccuacagaagaaaaagaaaaaaaaggccacaaaaguucccucucacuuucaguaaauaaaauaaaagcagcaacagaaauaaagaaauaaaugaaauucaaaaugaaauaaauauuguguugugcagcauuaaaaaaucaauaaaaauuaaaaaugagcaagaucuaaaaaaaaaaaaaaaaaaaaaaaaaaaaaaaaaaaaaaaaaaaaaaaaaaaaaaaaaaaaaaaaugcaucccccccccccccccccccccccccccccccaaaggcucuuuucagagccaccagaauu

SEQ ID NO: 3418 - RNA, 2202 nt, Artificial Sequence
  mRNA product Design h-2 comprising derived and/or modified sequence from HRSV(A2)__F_DSCav1_mut3 (opt1)
gggagacccgugacccggaaguuguacggcuacgcgacuuucccucccacaaacccucgcgcccuuccuuuccuacuugggcccggcagaaagcuuaccauggagcugcucauccugaaggccaacgccaucaccaccauccugacggcggugaccuucugcuucgccagcggccagaacaucaccgaggaguucuaccaguccacgugcagcgccgucuccaagggguaccucggcgcccugcgcaccgggugguacaccagcgugaucaccaucgagcuguccaacaucaaggagaucaagugcaacggcaccgacgccaaggugaagcucaucaagcaggagcuggacaaguacaagaacgcggucacggaccugcagcuccugaugcagagcacccccgccaccggguccggcagcgccaucugcuccggcguggccgugugcaagguccugcaccucgagggggaggugaacaagaucaagagcgcgcugcuguccaccaacaaggccguggucagccucuccaacggcgugagcgugcugacguucaagguccuggaccucaagaacuacaucgacaagcagcugcugccgauccucaacaagcaguccugcagcauccccaacaucgagaccgugaucgaguuccagcagaagaacaaccggcugcuggagaucacccgcgaguucuccgugaacgccggggucaccacgcccgugagcaccuacaugcucaccaacuccgagcugcugagccucaucaacgacaugcccaucaccaacgaccagaagaagcugaugagcaacaacgugcagaucguccggcagcaguccuacagcaucaugugcaucaucaaggaggaggugcuggccuacgugguccagcucccgcuguacggcgugaucgacacgcccugcuggaagcugcacaccagcccccucugcaccaccaacacgaaggagggguccaacaucugccugacccgcaccgaccggggcugguacugcgacaacgccggcuccgugagcuucuucccccaggcggagaccugcaagguccaguccaaccgcguguucugcgacacgaugaacagccugacccucccguccgaggucaaccugugcaacguggacaucuucaaccccaaguacgacugcaagaucaugaccagcaagaccgacguguccagcuccgucaucacgagccugggggccaucguguccugcuacggcaagaccaagugcaccgccagcaacaagaaccgggggaucaucaagaccuucuccaacggcugcgacuacgugagcaacaagggcgucgacacgguguccguggggaacacccucuacugcgucaacaagcaggagggccagagccuguacgugaagggggagcccaucaucaacuucuacgacccccugguguucccgagcgacgaguucgacgccuccaucagccaggucaacgagaagaucaaccagucccucgccuucauccgcaagagcgacgagcugcugcacaacgugaacgcgggcaaguccaccaccaacaucaugaucaccacgaucaucaucgugaucaucgucauccuccugagccugaucgccguggggcuccugcuguacugcaaggcccgguccacccccgugacccugagcaaggaccagcucuccggcaucaacaacaucgccuucagcaacugaggacuagugaagggaacacccaaauuuaauucagccuuaagcacaauuaauuaagagugaaacguaauuguacaagcaguuggucacccaccauagggcaugaucaacaccgcaaccuuuccuuuuucccccagugauucugaaaaaccccucuucccuucagcuugcuuagauguuccaaauuuaguaagcuuaaggcggccuacagaagaaaaagaaaaaaaaggccacaaaaguucccucucacuuucaguaaauaaaauaaaagcagcaacagaaauaaagaaauaaaugaaauucaaaaugaaauaaauauuguguugugcagcauuaaaaaaucaauaaaaauuaaaaaugagcaagaucuaaaaaaaaaaaaaaaaaaaaaaaaaaaaaaaaaaaaaaaaaaaaaaaaaaaaaaaaaaaaaaaaugcaucccccccccccccccccccccccccccccccaaaggcucuuuucagagccaccagaauu

SEQ ID NO: 3419 - RNA, 2202 nt, Artificial Sequence
  mRNA product Design h-2 comprising derived and/or modified sequence from HRSV(A2)__F_DSCav1_mut3 (opt2)
gggagacccgugacccggaaguuguacggcuacgcgacuuucccucccacaaacccucgcgcccuuccuuuccuacuugggcccggcagaaagcuuaccauggagcuccucauccucaaggccaacgccaucaccaccauccucaccgccgucaccuucugcuucgccuccggccagaacaucaccgaggaguucuaccaguccaccugcuccgccgucuccaagggcuaccucggcgcccuccgcaccggcugguacaccuccgucaucaccaucgagcucuccaacaucaaggagaucaagugcaacggcaccgacgccaaggucaagcucaucaagcaggagcucgacaaguacaagaacgccgucaccgaccuccagcuccucaugcaguccacccccgccaccggcuccggcuccgccaucugcuccggcgucgccgucugcaagguccuccaccucgagggcgaggucaacaagaucaaguccgcccuccucuccaccaacaaggccgucgucucccucuccaacggcgucuccguccucaccuucaagguccucgaccucaagaacuacaucgacaagcagcuccuccccauccucaacaagcaguccugcuccauccccaacaucgagaccgucaucgaguuccagcagaagaacaaccgccuccucgagaucacccgcgaguucuccgucaacgccggcgucaccacccccgucuccaccuacaugcucaccaacuccgagcuccucucccucaucaacgacaugcccaucaccaacgaccagaagaagcucauguccaacaacguccagaucguccgccagcaguccuacuccaucaugugcaucaucaaggaggagguccucgccuacgucguccagcucccccucuacggcgucaucgacacccccugcuggaagcuccacaccuccccccucugcaccaccaacaccaaggagggcuccaacaucugccucacccgcaccgaccgcggcugguacugcgacaacgccggcuccgucuccuucuucccccaggccgagaccugcaagguccaguccaaccgcgucuucugcgacaccaugaacucccucacccuccccuccgaggucaaccucugcaacgucgacaucuucaaccccaaguacgacugcaagaucaugaccuccaagaccgacgucuccuccuccgucaucaccucccucggcgccaucgucuccugcuacggcaagaccaagugcaccgccuccaacaagaaccgcggcaucaucaagaccuucuccaacggcugcgacuacgucuccaacaagggcgucgacaccgucuccgucggcaacacccucuacugcgucaacaagcaggagggccagucccucuacgucaagggcgagcccaucaucaacuucuacgacccccucgucuuccccuccgacgaguucgacgccuccaucucccaggucaacgagaagaucaaccagucccucgccuucauccgcaaguccgacgagcuccuccacaacgucaacgccggcaaguccaccaccaacaucaugaucaccaccaucaucaucgucaucaucgucauccuccucucccucaucgccgucggccuccuccucuacugcaaggcccgcuccacccccgucacccucuccaaggaccagcucuccggcaucaacaacaucgccuucuccaacugaggacuagugaagggaacacccaaauuuaauucagccuuaagcacaauuaauuaagagugaaacguaauuguacaagcaguuggucacccaccauagggcaugaucaacaccgcaaccuuuccuuuuucccccagugauucugaaaaaccccucuucccuucagcuugcuuagauguuccaaauuuaguaagcuuaaggcggccuacagaagaaaaagaaaaaaaaggccacaaaaguucccucucacuuucaguaaauaaaauaaaagcagcaacagaaauaaagaaauaaaugaaauucaaaaugaaauaaauauuguguugugcagcauuaaaaaaucaauaaaaauuaaaaaugagcaagaucuaaaaaaaaaaaaaaaaaaaaaaaaaaaaaaaaaaaaaaaaaaaaaaaaaaaaaaaaaaaaaaaaugcaucccccccccccccccccccccccccccccccaaaggcucuuuucagagccaccagaauu

SEQ ID NO: 3420 - RNA, 2202 nt, Artificial Sequence
  mRNA product Design h-2 comprising derived and/or modified sequence from HRSV(A2)__F_DSCav1_mut3 (opt3)
gggagacccgugacccggaaguuguacggcuacgcgacuuucccucccacaaacccucgcgcccuuccuuuccuacuugggcccggcagaaagcuuaccauggagcugcucauccuuaaggccaacgcuauuaccacaauacugacugcagugacguucugcuuugccagcggccagaauaucaccgaagaguucuaccaauccacauguucugcggucucaaaaggguauuugggagcuuuaagaacugguugguacaccaguguuauuacaaucgaacugagcaacauuaaggagaucaaaugcaauggcaccgacgccaaggugaaacuaauaaagcaggaacucgauaaguauaaaaacgcaguaacugaccugcagcuucugaugcaguccacacccgccaccgggucuggaucggcuaucuguucaggcguggcagucugcaagguguugcaccucgagggugagguuaauaaaauuaagagcgcccugcugaguacgaacaaagcuguggucucccucucuaauggggugagcguauuaacuuuuaagguucuggaucuuaagaacuacaucgacaaacaauugcugccuauucuaaauaagcaguccuguucaaucccaaacauagaaaccgugauugaguuccagcagaaaaauaacaggcuccuggaaaucacacgggaguuuagugucaaugccggagugacuaccccggugagcacauauaugcuuaccaacucugagcuguugucccucauuaaugauaugcccaucacgaacgaccaaaagaaacugaugucaaacaauguccagaucguucgccagcagagcuacaguauuaugugcauaaucaaggaagagguguuagcguauguagugcaacugccucucuacggcgucauugauacuccauguuggaaacuucauacaucuccccugugcaccacuaacacaaaggaaggcuccaauaucuguuugacccgaacggaccgugggugguacugcgauaacgcaggaagcgugucguucuuuccucaggccgagaccuguaagguucagucuaauagaguguucugcgacacaaugaacucccuaacucugccaucagaagucaaucucugcaacguggauauauuuaaucccaaauaugacuguaagauuaugaccaguaaaacagauguaagcuccucuguuaucacuagccugggugcuaucgugucaugcuacggcaagaccaaauguacagccaguaacaagaauagggggauuaucaagaccuucuccaacggaugcgacuaugucagcaauaaaggcguggacacugucucuguggguaacacgcuuuacuguguuaauaagcaagaggggcagucacuguaugugaaaggagagccuauuauaaacuuuuacgauccauugguauucccgagugacgaauuugaugcaagcaucucccaggucaacgagaagauuaaucagucucucgcuuucauccggaaaucggacgaacuguuacacaacgugaaugccggcaagagcacaaccaacaucaugauuacuaccauaaucauuguuaucauugugauccugcuaucccucauagcggucggccugcuuuuguauugcaaggcccgcucaacacccgugacccugaguaaagaucaacucucugggaucaauaacauugcauucagcaauugaggacuagugaagggaacacccaaauuuaauucagccuuaagcacaauuaauuaagagugaaacguaauuguacaagcaguuggucacccaccauagggcaugaucaacaccgcaaccuuuccuuuuucccccagugauucugaaaaaccccucuucccuucagcuugcuuagauguuccaaauuuaguaagcuuaaggcggccuacagaagaaaaagaaaaaaaaggccacaaaaguucccucucacuuucaguaaauaaaauaaaagcagcaacagaaauaaagaaauaaaugaaauucaaaaugaaauaaauauuguguugugcagcauuaaaaaaucaauaaaaauuaaaaaugagcaagaucuaaaaaaaaaaaaaaaaaaaaaaaaaaaaaaaaaaaaaaaaaaaaaaaaaaaaaaaaaaaaaaaaugcaucccccccccccccccccccccccccccccccaaaggcucuuuucagagccaccagaauu

SEQ ID NO: 3421 - RNA, 2202 nt, Artificial Sequence
  mRNA product Design h-2 comprising derived and/or modified sequence from HRSV(A2)__F_DSCav1_mut3 (opt4)
gggagacccgugacccggaaguuguacggcuacgcgacuuucccucccacaaacccucgcgcccuuccuuuccuacuugggcccggcagaaagcuuaccauggagcugcugauccugaaggccaacgccaucaccaccauccugaccgccgugaccuucugcuucgccagcggccagaacaucaccgaggaguucuaccagagcaccugcagcgccgugagcaagggcuaccugggcgcccugagaaccggcugguacaccagcgugaucaccaucgagcugagcaacaucaaggagaucaagugcaacggcaccgacgccaaggugaagcugaucaagcaggagcuggacaaguacaagaacgccgugaccgaccugcagcugcugaugcagagcacccccgccaccggcagcggcagcgccaucugcagcggcguggccgugugcaaggugcugcaccuggagggcgaggugaacaagaucaagagcgcccugcugagcaccaacaaggccguggugagccugagcaacggcgugagcgugcugaccuucaaggugcuggaccugaagaacuacaucgacaagcagcugcugcccauccugaacaagcagagcugcagcauccccaacaucgagaccgugaucgaguuccagcagaagaacaacagacugcuggagaucaccagagaguucagcgugaacgccggcgugaccacccccgugagcaccuacaugcugaccaacagcgagcugcugagccugaucaacgacaugcccaucaccaacgaccagaagaagcugaugagcaacaacgugcagaucgugagacagcagagcuacagcaucaugugcaucaucaaggaggaggugcuggccuacguggugcagcugccccuguacggcgugaucgacacccccugcuggaagcugcacaccagcccccugugcaccaccaacaccaaggagggcagcaacaucugccugaccagaaccgacagaggcugguacugcgacaacgccggcagcgugagcuucuucccccaggccgagaccugcaaggugcagagcaacagaguguucugcgacaccaugaacagccugacccugcccagcgaggugaaccugugcaacguggacaucuucaaccccaaguacgacugcaagaucaugaccagcaagaccgacgugagcagcagcgugaucaccagccugggcgccaucgugagcugcuacggcaagaccaagugcaccgccagcaacaagaacagaggcaucaucaagaccuucagcaacggcugcgacuacgugagcaacaagggcguggacaccgugagcgugggcaacacccuguacugcgugaacaagcaggagggccagagccuguacgugaagggcgagcccaucaucaacuucuacgacccccugguguuccccagcgacgaguucgacgccagcaucagccaggugaacgagaagaucaaccagagccuggccuucaucagaaagagcgacgagcugcugcacaacgugaacgccggcaagagcaccaccaacaucaugaucaccaccaucaucaucgugaucaucgugauccugcugagccugaucgccgugggccugcugcuguacugcaaggccagaagcacccccgugacccugagcaaggaccagcugagcggcaucaacaacaucgccuucagcaacugaggacuagugaagggaacacccaaauuuaauucagccuuaagcacaauuaauuaagagugaaacguaauuguacaagcaguuggucacccaccauagggcaugaucaacaccgcaaccuuuccuuuuucccccagugauucugaaaaaccccucuucccuucagcuugcuuagauguuccaaauuuaguaagcuuaaggcggccuacagaagaaaaagaaaaaaaaggccacaaaaguucccucucacuuucaguaaauaaaauaaaagcagcaacagaaauaaagaaauaaaugaaauucaaaaugaaauaaauauuguguugugcagcauuaaaaaaucaauaaaaauuaaaaaugagcaagaucuaaaaaaaaaaaaaaaaaaaaaaaaaaaaaaaaaaaaaaaaaaaaaaaaaaaaaaaaaaaaaaaaugcaucccccccccccccccccccccccccccccccaaaggcucuuuucagagccaccagaauu

SEQ ID NO: 3422 - RNA, 2202 nt, Artificial Sequence
  mRNA product Design h-2 comprising derived and/or modified sequence from HRSV(A2)__F_DSCav1_mut3 (opt5)
gggagacccgugacccggaaguuguacggcuacgcgacuuucccucccacaaacccucgcgcccuuccuuuccuacuugggcccggcagaaagcuuaccauggagcugcucauccugaaggccaacgcuauuaccacaauccuuacggccgugaccuucugcuuugcgagcggccagaauauuacagaagaguucuaccaauccaccuguucugcugucagcaaaggguaucugggagcccucagaacaggcugguacaccuccguuaucacaauugaacugucuaacaucaaggagaucaaaugcaaugggaccgacgccaaggugaaacuuauuaagcaggaacuggauaaguauaaaaacgcugugacggaccuccagcugcugaugcagagcacccccgccacaggauccggcucugcuaucuguagcggggucgccgugugcaagguucuccaccuggagggagaggugaauaaaauuaaguccgcgcuucugagcaccaacaaagccgucgugucucucuccaauggcguuagcgugcugacauuuaagguccuugaucugaagaacuacaucgacaaacaacuccugccuauucugaauaagcagucuuguuccaucccgaacauugaaaccgugaucgaguuccagcagaaaaauaaccggcuccuggaaaucacgcgcgaguuuagcgugaaugcuggcgucacaacccccguuucuacauauaugcuuaccaacuccgagcugcucagccugauuaaugauaugccuaucaccaacgaccaaaagaaacuuauguccaacaaugugcagauugugagacagcagucuuacagcaucaugugcauuaucaaggaagagguccuggccuaugugguucaacucccccuguacggggugaucgauacaccuuguuggaaacugcauacgagcccccucugcaccacaaacaccaaggaaggauccaauauuugucugacacggaccgaccgcggcugguacugcgauaacgcugggucugucuccuucuuuccucaggccgagacguguaaggugcagagcaauagaguuuucugcgacacaaugaacucucuuacccugccgagcgaagugaaucucugcaacgucgauaucuuuaaucccaaauaugacuguaagauuaugaccuccaaaacagaugugucuagcuccgucaucaccagccugggagcgauugugucuugcuacggcaagacaaaauguacggccuccaacaagaaucgggggaucaucaagaccuucagcaacggaugcgacuauguuucuaauaaaggcguggacacagucuccgugggcaacacccuuuacuguguuaauaagcaagaggggcagagccuguaugugaaaggagagccuauuaucaacuuuuacgauccccucgucuucccuuccgacgaauuugaugcuucuauuagccaggugaacgagaagaucaaucagucccuggccuucauucgcaaaucugacgaacugcuccacaacgugaaugcuggcaagagcacaaccaacaucaugauuacgaccaucaucauuguuaucauugucauccugcuuucccugauugccguggggcuccugcuguauugcaaggccagaagcacacccgugacccuuucuaaagaucaacucuccggaaucaauaacaucgcuuucagcaauugaggacuagugaagggaacacccaaauuuaauucagccuuaagcacaauuaauuaagagugaaacguaauuguacaagcaguuggucacccaccauagggcaugaucaacaccgcaaccuuuccuuuuucccccagugauucugaaaaaccccucuucccuucagcuugcuuagauguuccaaauuuaguaagcuuaaggcggccuacagaagaaaaagaaaaaaaaggccacaaaaguucccucucacuuucaguaaauaaaauaaaagcagcaacagaaauaaagaaauaaaugaaauucaaaaugaaauaaauauuguguugugcagcauuaaaaaaucaauaaaaauuaaaaaugagcaagaucuaaaaaaaaaaaaaaaaaaaaaaaaaaaaaaaaaaaaaaaaaaaaaaaaaaaaaaaaaaaaaaaaugcaucccccccccccccccccccccccccccccccaaaggcucuuuucagagccaccagaauu

SEQ ID NO: 3423 - RNA, 2202 nt, Artificial Sequence
  mRNA product Design h-2 comprising derived and/or modified sequence from HRSV(A2)__F_DSCav1_mut3 (opt6)
gggagacccgugacccggaaguuguacggcuacgcgacuuucccucccacaaacccucgcgcccuuccuuuccuacuugggcccggcagaaagcuuaccauggaauuacucauacuaaaagccaaugccauaaccacuauucuaacagcaguaacauucuguuucgccucaggacaaaacauaacagaagaauuuuaucaauccaccuguuccgcagucucgaaaggcuaccuuggcgcacuaagaaccggaugguauacaucaguaauaaccauugaacuaucaaauaucaaagaaauaaaaugcaacggaacugacgcaaaagucaaacuaauaaaacaagaauuagacaaauacaaaaacgccguuacagacuuacaacuacuaaugcaaucaacuccagcaacaggaucaggaucugcuauaugcucaggugucgccguauguaaaguguuacaccucgaaggcgaaguaaacaaaauaaaaucagcacuacuauccacaaauaaagcaguaguaucacuauccaaugguguaucaguacucacauucaaaguacuagacuuaaaaaauuauauagauaaacaauuacuaccaauauuaaacaaacaaucaugcucaauaccaaacauagaaaccgucauugaauuucaacaaaaaaacaaucgacuucuugaaauaacacgagaauuuucaguaaaugccggaguaacaaccccagucucaacauacauguuaaccaacucugaacuccuaagccuaaucaacgacaugcccauaacuaacgaccaaaaaaaacuaauguccaauaauguccaaauaguaagacaacaauccuacucaauaaugugcauuauaaaagaagaaguccucgccuauguaguacaacuacccuuauacggaguaauugacacaccauguuggaaacuacauacaucaccacuaugcaccacuaacacaaaagaaggcuccaacauaugccuaacccgaacagaucgcggaugguauugcgacaacgcaggaaguguauccuucuuuccacaagcagaaacaugcaaaguacaauccaacagaguauucugugacaccaugaacucucuaacacuaccuuccgaaguaaauuuaugcaacguagacauauuuaaucccaaauacgacuguaaaauaaugaccucaaaaacugaugucucaucaucagucauuacaucacucggagcaauagucaguugcuauggaaaaaccaaaugcacagcuaguaacaaaaacagggguauaauaaaaacauuuucaaacggaugcgauuacguaucaaauaaaggaguagacaccguauccguaggaaauacucucuacugcguaaacaaacaagaaggacaaucccuauacguaaaaggcgaaccaaucauuaacuuuuacgacccacuuguauuuccaucagacgaauuugaugccucaauaucccaagucaaugaaaaaauaaaccaaagucuagcauucauccgaaaaucagaugaacuuuuacacaacguaaacgccggaaaaucaacaacaaacaucaugaucacaacaaucaucauaguaauaauaguuauacuacuuuccuuaauagcagucggccuacuacucuacugcaaagcacgauccacaccaguaaccuuaucuaaagaccaacucucaggcauaaacaacauagcauucucaaacuaaggacuagugaagggaacacccaaauuuaauucagccuuaagcacaauuaauuaagagugaaacguaauuguacaagcaguuggucacccaccauagggcaugaucaacaccgcaaccuuuccuuuuucccccagugauucugaaaaaccccucuucccuucagcuugcuuagauguuccaaauuuaguaagcuuaaggcggccuacagaagaaaaagaaaaaaaaggccacaaaaguucccucucacuuucaguaaauaaaauaaaagcagcaacagaaauaaagaaauaaaugaaauucaaaaugaaauaaauauuguguugugcagcauuaaaaaaucaauaaaaauuaaaaaugagcaagaucuaaaaaaaaaaaaaaaaaaaaaaaaaaaaaaaaaaaaaaaaaaaaaaaaaaaaaaaaaaaaaaaaugcaucccccccccccccccccccccccccccccccaaaggcucuuuucagagccaccagaauu

SEQ ID NO: 3424 - RNA, 2202 nt, Artificial Sequence
  mRNA product Design h-2 comprising derived and/or modified sequence from HRSV(A2)__F_DSCav1_mut3 (opt11)
gggagacccgugacccggaaguuguacggcuacgcgacuuucccucccacaaacccucgcgcccuuccuuuccuacuugggcccggcagaaagcuuaccauggaacuccucauccuuaaagcaaacgccaucacaaccauccucacagcagucacuuucugcuucgcauccggacaaaacaucacagaagaguucuaucaauccacgugcuccgcaguuuccaaaggauaccuuggagccuuacgaaccggcugguacaccuccgucaucaccauagaacucagcaacaucaaagaaaucaaaugcaacggaaccgacgcaaaagucaaacucaucaaacaagaacuagacaaauacaaaaacgcagucaccgaccuccaacuacucaugcaaucaacccccgcaaccggcuccggcuccgccaucugcuccggaguagccguaugcaaaguccuccaccucgaaggcgaaguuaacaagaucaaguccgcacuccuaucaaccaacaaagcagucgucucccuauccaacggcgucuccguauuaacauucaaaguccucgaccucaaaaacuacauagacaaacagcuacuccccauccuaaacaaacaauccugcuccauccccaacaucgaaacugucaucgaguuccaacagaaaaacaaccgccuccuagaaaucacccgagaguucuccguaaacgccggcgucacuacccccgucucuaccuauaugcuaaccaacucugaacuccuaucccuaaucaacgauaugcccauaacuaacgaccaaaagaaacuuauguccaacaacguacaaauaguccggcaacaaucauacucuaucaugugcaucaucaaagaagaaguacuugccuacguuguccaacucccacuauacggcgucauagacacuccaugcuggaaacuucacaccucaccccucugcaccacuaacacuaaagaaggcucuaacaucugccuuacccgcaccgaccgcggaugguacugcgacaacgcaggcucaguuagcuucuucccacaagccgaaaccugcaaaguccagucaaaccgugucuucugcgauaccaugaacucgcucacccucccuuccgaagucaaccucugcaacgucgacaucuucaaccccaaauacgacugcaaaaucaugaccucaaaaaccgacguaucuucuuccgucaucaccucccucggcgccaucguauccugcuacggcaaaaccaaaugcacugcaucaaacaaaaaccgaggcaucaucaaaaccuucucgaacggaugcgacuacguauccaacaagggcgucgacacagucuccguugguaacacccucuacugcgucaacaaacaagaaggccaaucccuauacguaaaaggcgaacccaucaucaacuucuacgacccccucgucuuccccagugacgaauuugacgccuccaucucccaagucaacgaaaagaucaaccaaucccuugccuucauacgcaaauccgacgaacuccuacacaacguuaacgccggaaaaucaacaaccaacaucaugaucacaaccaucauaaucgucauaaucgucauacuccucucccucauagccgucggccugcuauuguacuguaaagcccgcuccacaccagucacacuuucaaaagaccaacucuccgggaucaacaacaucgccuucuccaacuaaggacuagugaagggaacacccaaauuuaauucagccuuaagcacaauuaauuaagagugaaacguaauuguacaagcaguuggucacccaccauagggcaugaucaacaccgcaaccuuuccuuuuucccccagugauucugaaaaaccccucuucccuucagcuugcuuagauguuccaaauuuaguaagcuuaaggcggccuacagaagaaaaagaaaaaaaaggccacaaaaguucccucucacuuucaguaaauaaaauaaaagcagcaacagaaauaaagaaauaaaugaaauucaaaaugaaauaaauauuguguugugcagcauuaaaaaaucaauaaaaauuaaaaaugagcaagaucuaaaaaaaaaaaaaaaaaaaaaaaaaaaaaaaaaaaaaaaaaaaaaaaaaaaaaaaaaaaaaaaaugcaucccccccccccccccccccccccccccccccaaaggcucuuuucagagccaccagaauu

SEQ ID NO: 3425 - RNA, 1982 nt, Artificial Sequence
  mRNA product Design h-3 comprising derived and/or modified sequence from HRSV(A2)__F_DSCav1_mut3 (opt1)
gggagacccgugacccggaaguuguacggcuacgcgacuuucccucccacaaacccucgcgcccuuccuuuccuacuugggcccggcagaaagcuuaccauggagcugcucauccugaaggccaacgccaucaccaccauccugacggcggugaccuucugcuucgccagcggccagaacaucaccgaggaguucuaccaguccacgugcagcgccgucuccaagggguaccucggcgcccugcggaccggcugguacaccuccgugaucaccaucgagcugagcaacaucaaggagaucaagugcaacgggaccgacgccaaggugaagcucaucaagcaggagcuggacaaguacaagaacgcggucacggaccugcagcuccugaugcaguccaccccggcaaccggcuccggcuccgccaucugcagcggcgucgccgugugcaaggugcugcaccucgagggggaggucaacaagaucaagagcgcccugcuguccaccaacaaggccguggugagccucuccaacggcgucagcgugcugaccuucaaggugcuggaccucaagaacuacaucgacaagcagcugcugcccauccugaacaagcagagcugcuccauccccaacaucgagacggugaucgaguuccagcagaagaacaaccggcuccuggagaucacccgcgaguucagcgugaacgccggggucaccacccccguguccacguacaugcugaccaacagcgagcuccugucccugaucaacgacaugccgaucaccaacgaccagaagaagcucaugagcaacaacgugcagaucguccggcagcaguccuacagcaucaugugcaucaucaaggaggaggugcuggcguacgugguccagcugccccucuacggcgugaucgacacccccugcuggaagcugcacacgagcccccugugcaccaccaacaccaaggagggguccaacaucugccucacgcgcaccgaccggggcugguacugcgacaacgccggcagcgucuccuucuucccgcaggccgagaccugcaaggugcagagcaaccgcguguucugcgacaccaugaacucccugacgcugcccagcgagguaaaccucugcaacgucgacaucuucaaccccaaguacgacugcaagaucaugaccuccaagaccgacgugagcuccagcgugaucaccucccugggggccaucgucagcugcuacggcaagacgaagugcaccgccagcaacaagaaccgggggaucaucaagaccuucuccaacggcugcgacuacgugagcaacaagggcguggacaccguguccgucgggaacacccuguacugcgugaacaagcaggagggccagagccucuacgugaagggggagcccaucaucaacuucuacgacccgcuggucuuccccuccgacgaguucgacgcgagcaucucccaggugaacgagaagaucaaccagagccuggccuucauccgcaaguccgacgagcugcuccacaacgugaacgccggcaagagcacgaccaacaucaugaucaccaccaucaucaucgucaucaucgugauccugcugucccucaucgccguggggcugcugcucuacugcaaggcccggagcacgcccgucacccuguccaaggaccagcugagcggcaucaacaacaucgcguucuccaacugaggacuaguggaagcauuuuccuggcugauuaaaagaaauuacucagcuauggucaucuguuccuguuagaaggcuaugcagcauauuauauacuaugcgcauguuaugaaaugcauaauaaaaaauuuuaaaaaaucuaaaagaucuaaaaaaaaaaaaaaaaaaaaaaaaaaaaaaaaaaaaaaaaaaaaaaaaaaaaaaaaaaaaaaaaugcaucccccccccccccccccccccccccccccccaaaggcucuuuucagagccaccagaauu

SEQ ID NO: 3426 - RNA, 1982 nt, Artificial Sequence
  mRNA product Design h-3 comprising derived and/or modified sequence from HRSV(A2)__F_DSCav1_mut3 (opt1)
gggagacccgugacccggaaguuguacggcuacgcgacuuucccucccacaaacccucgcgcccuuccuuuccuacuugggcccggcagaaagcuuaccauggagcugcucauccugaaggccaacgccaucaccaccauccugacggcggugaccuucugcuucgccagcggccagaacaucaccgaggaguucuaccaguccacgugcagcgccgucuccaagggguaccucggcgcccugcgcaccgggugguacaccagcgugaucaccaucgagcuguccaacaucaaggagaucaagugcaacggcaccgacgccaaggugaagcucaucaagcaggagcuggacaaguacaagaacgcggucacggaccugcagcuccugaugcagagcacccccgccaccggguccggcagcgccaucugcuccggcguggccgugugcaagguccugcaccucgagggggaggugaacaagaucaagagcgcgcugcuguccaccaacaaggccguggucagccucuccaacggcgugagcgugcugacguucaagguccuggaccucaagaacuacaucgacaagcagcugcugccgauccucaacaagcaguccugcagcauccccaacaucgagaccgugaucgaguuccagcagaagaacaaccggcugcuggagaucacccgcgaguucuccgugaacgccggggucaccacgcccgugagcaccuacaugcucaccaacuccgagcugcugagccucaucaacgacaugcccaucaccaacgaccagaagaagcugaugagcaacaacgugcagaucguccggcagcaguccuacagcaucaugugcaucaucaaggaggaggugcuggccuacgugguccagcucccgcuguacggcgugaucgacacgcccugcuggaagcugcacaccagcccccucugcaccaccaacacgaaggagggguccaacaucugccugacccgcaccgaccggggcugguacugcgacaacgccggcuccgugagcuucuucccccaggcggagaccugcaagguccaguccaaccgcguguucugcgacacgaugaacagccugacccucccguccgaggucaaccugugcaacguggacaucuucaaccccaaguacgacugcaagaucaugaccagcaagaccgacguguccagcuccgucaucacgagccugggggccaucguguccugcuacggcaagaccaagugcaccgccagcaacaagaaccgggggaucaucaagaccuucuccaacggcugcgacuacgugagcaacaagggcgucgacacgguguccguggggaacacccucuacugcgucaacaagcaggagggccagagccuguacgugaagggggagcccaucaucaacuucuacgacccccugguguucccgagcgacgaguucgacgccuccaucagccaggucaacgagaagaucaaccagucccucgccuucauccgcaagagcgacgagcugcugcacaacgugaacgcgggcaaguccaccaccaacaucaugaucaccacgaucaucaucgugaucaucgucauccuccugagccugaucgccguggggcuccugcuguacugcaaggcccgguccacccccgugacccugagcaaggaccagcucuccggcaucaacaacaucgccuucagcaacugaggacuaguggaagcauuuuccuggcugauuaaaagaaauuacucagcuauggucaucuguuccuguuagaaggcuaugcagcauauuauauacuaugcgcauguuaugaaaugcauaauaaaaaauuuuaaaaaaucuaaaagaucuaaaaaaaaaaaaaaaaaaaaaaaaaaaaaaaaaaaaaaaaaaaaaaaaaaaaaaaaaaaaaaaaugcaucccccccccccccccccccccccccccccccaaaggcucuuuucagagccaccagaauu

SEQ ID NO: 3427 - RNA, 1982 nt, Artificial Sequence
  mRNA product Design h-3 comprising derived and/or modified sequence from HRSV(A2)__F_DSCav1_mut3 (opt2)
gggagacccgugacccggaaguuguacggcuacgcgacuuucccucccacaaacccucgcgcccuuccuuuccuacuugggcccggcagaaagcuuaccauggagcuccucauccucaaggccaacgccaucaccaccauccucaccgccgucaccuucugcuucgccuccggccagaacaucaccgaggaguucuaccaguccaccugcuccgccgucuccaagggcuaccucggcgcccuccgcaccggcugguacaccuccgucaucaccaucgagcucuccaacaucaaggagaucaagugcaacggcaccgacgccaaggucaagcucaucaagcaggagcucgacaaguacaagaacgccgucaccgaccuccagcuccucaugcaguccacccccgccaccggcuccggcuccgccaucugcuccggcgucgccgucugcaagguccuccaccucgagggcgaggucaacaagaucaaguccgcccuccucuccaccaacaaggccgucgucucccucuccaacggcgucuccguccucaccuucaagguccucgaccucaagaacuacaucgacaagcagcuccuccccauccucaacaagcaguccugcuccauccccaacaucgagaccgucaucgaguuccagcagaagaacaaccgccuccucgagaucacccgcgaguucuccgucaacgccggcgucaccacccccgucuccaccuacaugcucaccaacuccgagcuccucucccucaucaacgacaugcccaucaccaacgaccagaagaagcucauguccaacaacguccagaucguccgccagcaguccuacuccaucaugugcaucaucaaggaggagguccucgccuacgucguccagcucccccucuacggcgucaucgacacccccugcuggaagcuccacaccuccccccucugcaccaccaacaccaaggagggcuccaacaucugccucacccgcaccgaccgcggcugguacugcgacaacgccggcuccgucuccuucuucccccaggccgagaccugcaagguccaguccaaccgcgucuucugcgacaccaugaacucccucacccuccccuccgaggucaaccucugcaacgucgacaucuucaaccccaaguacgacugcaagaucaugaccuccaagaccgacgucuccuccuccgucaucaccucccucggcgccaucgucuccugcuacggcaagaccaagugcaccgccuccaacaagaaccgcggcaucaucaagaccuucuccaacggcugcgacuacgucuccaacaagggcgucgacaccgucuccgucggcaacacccucuacugcgucaacaagcaggagggccagucccucuacgucaagggcgagcccaucaucaacuucuacgacccccucgucuuccccuccgacgaguucgacgccuccaucucccaggucaacgagaagaucaaccagucccucgccuucauccgcaaguccgacgagcuccuccacaacgucaacgccggcaaguccaccaccaacaucaugaucaccaccaucaucaucgucaucaucgucauccuccucucccucaucgccgucggccuccuccucuacugcaaggcccgcuccacccccgucacccucuccaaggaccagcucuccggcaucaacaacaucgccuucuccaacugaggacuaguggaagcauuuuccuggcugauuaaaagaaauuacucagcuauggucaucuguuccuguuagaaggcuaugcagcauauuauauacuaugcgcauguuaugaaaugcauaauaaaaaauuuuaaaaaaucuaaaagaucuaaaaaaaaaaaaaaaaaaaaaaaaaaaaaaaaaaaaaaaaaaaaaaaaaaaaaaaaaaaaaaaaugcaucccccccccccccccccccccccccccccccaaaggcucuuuucagagccaccagaauu

SEQ ID NO: 3428 - RNA, 1982 nt, Artificial Sequence
  mRNA product Design h-3 comprising derived and/or modified sequence from HRSV(A2)__F_DSCav1_mut3 (opt3)
gggagacccgugacccggaaguuguacggcuacgcgacuuucccucccacaaacccucgcgcccuuccuuuccuacuugggcccggcagaaagcuuaccauggagcugcucauccuuaaggccaacgcuauuaccacaauacugacugcagugacguucugcuuugccagcggccagaauaucaccgaagaguucuaccaauccacauguucugcggucucaaaaggguauuugggagcuuuaagaacugguugguacaccaguguuauuacaaucgaacugagcaacauuaaggagaucaaaugcaauggcaccgacgccaaggugaaacuaauaaagcaggaacucgauaaguauaaaaacgcaguaacugaccugcagcuucugaugcaguccacacccgccaccgggucuggaucggcuaucuguucaggcguggcagucugcaagguguugcaccucgagggugagguuaauaaaauuaagagcgcccugcugaguacgaacaaagcuguggucucccucucuaauggggugagcguauuaacuuuuaagguucuggaucuuaagaacuacaucgacaaacaauugcugccuauucuaaauaagcaguccuguucaaucccaaacauagaaaccgugauugaguuccagcagaaaaauaacaggcuccuggaaaucacacgggaguuuagugucaaugccggagugacuaccccggugagcacauauaugcuuaccaacucugagcuguugucccucauuaaugauaugcccaucacgaacgaccaaaagaaacugaugucaaacaauguccagaucguucgccagcagagcuacaguauuaugugcauaaucaaggaagagguguuagcguauguagugcaacugccucucuacggcgucauugauacuccauguuggaaacuucauacaucuccccugugcaccacuaacacaaaggaaggcuccaauaucuguuugacccgaacggaccgugggugguacugcgauaacgcaggaagcgugucguucuuuccucaggccgagaccuguaagguucagucuaauagaguguucugcgacacaaugaacucccuaacucugccaucagaagucaaucucugcaacguggauauauuuaaucccaaauaugacuguaagauuaugaccaguaaaacagauguaagcuccucuguuaucacuagccugggugcuaucgugucaugcuacggcaagaccaaauguacagccaguaacaagaauagggggauuaucaagaccuucuccaacggaugcgacuaugucagcaauaaaggcguggacacugucucuguggguaacacgcuuuacuguguuaauaagcaagaggggcagucacuguaugugaaaggagagccuauuauaaacuuuuacgauccauugguauucccgagugacgaauuugaugcaagcaucucccaggucaacgagaagauuaaucagucucucgcuuucauccggaaaucggacgaacuguuacacaacgugaaugccggcaagagcacaaccaacaucaugauuacuaccauaaucauuguuaucauugugauccugcuaucccucauagcggucggccugcuuuuguauugcaaggcccgcucaacacccgugacccugaguaaagaucaacucucugggaucaauaacauugcauucagcaauugaggacuaguggaagcauuuuccuggcugauuaaaagaaauuacucagcuauggucaucuguuccuguuagaaggcuaugcagcauauuauauacuaugcgcauguuaugaaaugcauaauaaaaaauuuuaaaaaaucuaaaagaucuaaaaaaaaaaaaaaaaaaaaaaaaaaaaaaaaaaaaaaaaaaaaaaaaaaaaaaaaaaaaaaaaugcaucccccccccccccccccccccccccccccccaaaggcucuuuucagagccaccagaauu

SEQ ID NO: 3429 - RNA, 1982 nt, Artificial Sequence
  mRNA product Design h-3 comprising derived and/or modified sequence from HRSV(A2)__F_DSCav1_mut3 (opt4)
gggagacccgugacccggaaguuguacggcuacgcgacuuucccucccacaaacccucgcgcccuuccuuuccuacuugggcccggcagaaagcuuaccauggagcugcugauccugaaggccaacgccaucaccaccauccugaccgccgugaccuucugcuucgccagcggccagaacaucaccgaggaguucuaccagagcaccugcagcgccgugagcaagggcuaccugggcgcccugagaaccggcugguacaccagcgugaucaccaucgagcugagcaacaucaaggagaucaagugcaacggcaccgacgccaaggugaagcugaucaagcaggagcuggacaaguacaagaacgccgugaccgaccugcagcugcugaugcagagcacccccgccaccggcagcggcagcgccaucugcagcggcguggccgugugcaaggugcugcaccuggagggcgaggugaacaagaucaagagcgcccugcugagcaccaacaaggccguggugagccugagcaacggcgugagcgugcugaccuucaaggugcuggaccugaagaacuacaucgacaagcagcugcugcccauccugaacaagcagagcugcagcauccccaacaucgagaccgugaucgaguuccagcagaagaacaacagacugcuggagaucaccagagaguucagcgugaacgccggcgugaccacccccgugagcaccuacaugcugaccaacagcgagcugcugagccugaucaacgacaugcccaucaccaacgaccagaagaagcugaugagcaacaacgugcagaucgugagacagcagagcuacagcaucaugugcaucaucaaggaggaggugcuggccuacguggugcagcugccccuguacggcgugaucgacacccccugcuggaagcugcacaccagcccccugugcaccaccaacaccaaggagggcagcaacaucugccugaccagaaccgacagaggcugguacugcgacaacgccggcagcgugagcuucuucccccaggccgagaccugcaaggugcagagcaacagaguguucugcgacaccaugaacagccugacccugcccagcgaggugaaccugugcaacguggacaucuucaaccccaaguacgacugcaagaucaugaccagcaagaccgacgugagcagcagcgugaucaccagccugggcgccaucgugagcugcuacggcaagaccaagugcaccgccagcaacaagaacagaggcaucaucaagaccuucagcaacggcugcgacuacgugagcaacaagggcguggacaccgugagcgugggcaacacccuguacugcgugaacaagcaggagggccagagccuguacgugaagggcgagcccaucaucaacuucuacgacccccugguguuccccagcgacgaguucgacgccagcaucagccaggugaacgagaagaucaaccagagccuggccuucaucagaaagagcgacgagcugcugcacaacgugaacgccggcaagagcaccaccaacaucaugaucaccaccaucaucaucgugaucaucgugauccugcugagccugaucgccgugggccugcugcuguacugcaaggccagaagcacccccgugacccugagcaaggaccagcugagcggcaucaacaacaucgccuucagcaacugaggacuaguggaagcauuuuccuggcugauuaaaagaaauuacucagcuauggucaucuguuccuguuagaaggcuaugcagcauauuauauacuaugcgcauguuaugaaaugcauaauaaaaaauuuuaaaaaaucuaaaagaucuaaaaaaaaaaaaaaaaaaaaaaaaaaaaaaaaaaaaaaaaaaaaaaaaaaaaaaaaaaaaaaaaugcaucccccccccccccccccccccccccccccccaaaggcucuuuucagagccaccagaauu

SEQ ID NO: 3430 - RNA, 1982 nt, Artificial Sequence
  mRNA product Design h-3 comprising derived and/or modified sequence from HRSV(A2)__F_DSCav1_mut3 (opt5)
gggagacccgugacccggaaguuguacggcuacgcgacuuucccucccacaaacccucgcgcccuuccuuuccuacuugggcccggcagaaagcuuaccauggagcugcucauccugaaggccaacgcuauuaccacaauccuuacggccgugaccuucugcuuugcgagcggccagaauauuacagaagaguucuaccaauccaccuguucugcugucagcaaaggguaucugggagcccucagaacaggcugguacaccuccguuaucacaauugaacugucuaacaucaaggagaucaaaugcaaugggaccgacgccaaggugaaacuuauuaagcaggaacuggauaaguauaaaaacgcugugacggaccuccagcugcugaugcagagcacccccgccacaggauccggcucugcuaucuguagcggggucgccgugugcaagguucuccaccuggagggagaggugaauaaaauuaaguccgcgcuucugagcaccaacaaagccgucgugucucucuccaauggcguuagcgugcugacauuuaagguccuugaucugaagaacuacaucgacaaacaacuccugccuauucugaauaagcagucuuguuccaucccgaacauugaaaccgugaucgaguuccagcagaaaaauaaccggcuccuggaaaucacgcgcgaguuuagcgugaaugcuggcgucacaacccccguuucuacauauaugcuuaccaacuccgagcugcucagccugauuaaugauaugccuaucaccaacgaccaaaagaaacuuauguccaacaaugugcagauugugagacagcagucuuacagcaucaugugcauuaucaaggaagagguccuggccuaugugguucaacucccccuguacggggugaucgauacaccuuguuggaaacugcauacgagcccccucugcaccacaaacaccaaggaaggauccaauauuugucugacacggaccgaccgcggcugguacugcgauaacgcugggucugucuccuucuuuccucaggccgagacguguaaggugcagagcaauagaguuuucugcgacacaaugaacucucuuacccugccgagcgaagugaaucucugcaacgucgauaucuuuaaucccaaauaugacuguaagauuaugaccuccaaaacagaugugucuagcuccgucaucaccagccugggagcgauugugucuugcuacggcaagacaaaauguacggccuccaacaagaaucgggggaucaucaagaccuucagcaacggaugcgacuauguuucuaauaaaggcguggacacagucuccgugggcaacacccuuuacuguguuaauaagcaagaggggcagagccuguaugugaaaggagagccuauuaucaacuuuuacgauccccucgucuucccuuccgacgaauuugaugcuucuauuagccaggugaacgagaagaucaaucagucccuggccuucauucgcaaaucugacgaacugcuccacaacgugaaugcuggcaagagcacaaccaacaucaugauuacgaccaucaucauuguuaucauugucauccugcuuucccugauugccguggggcuccugcuguauugcaaggccagaagcacacccgugacccuuucuaaagaucaacucuccggaaucaauaacaucgcuuucagcaauugaggacuaguggaagcauuuuccuggcugauuaaaagaaauuacucagcuauggucaucuguuccuguuagaaggcuaugcagcauauuauauacuaugcgcauguuaugaaaugcauaauaaaaaauuuuaaaaaaucuaaaagaucuaaaaaaaaaaaaaaaaaaaaaaaaaaaaaaaaaaaaaaaaaaaaaaaaaaaaaaaaaaaaaaaaugcaucccccccccccccccccccccccccccccccaaaggcucuuuucagagccaccagaauu

SEQ ID NO: 3431 - RNA, 1982 nt, Artificial Sequence
  mRNA product Design h-3 comprising derived and/or modified sequence from HRSV(A2)__F_DSCav1_mut3 (opt6)
gggagacccgugacccggaaguuguacggcuacgcgacuuucccucccacaaacccucgcgcccuuccuuuccuacuugggcccggcagaaagcuuaccauggaauuacucauacuaaaagccaaugccauaaccacuauucuaacagcaguaacauucuguuucgccucaggacaaaacauaacagaagaauuuuaucaauccaccuguuccgcagucucgaaaggcuaccuuggcgcacuaagaaccggaugguauacaucaguaauaaccauugaacuaucaaauaucaaagaaauaaaaugcaacggaacugacgcaaaagucaaacuaauaaaacaagaauuagacaaauacaaaaacgccguuacagacuuacaacuacuaaugcaaucaacuccagcaacaggaucaggaucugcuauaugcucaggugucgccguauguaaaguguuacaccucgaaggcgaaguaaacaaaauaaaaucagcacuacuauccacaaauaaagcaguaguaucacuauccaaugguguaucaguacucacauucaaaguacuagacuuaaaaaauuauauagauaaacaauuacuaccaauauuaaacaaacaaucaugcucaauaccaaacauagaaaccgucauugaauuucaacaaaaaaacaaucgacuucuugaaauaacacgagaauuuucaguaaaugccggaguaacaaccccagucucaacauacauguuaaccaacucugaacuccuaagccuaaucaacgacaugcccauaacuaacgaccaaaaaaaacuaauguccaauaauguccaaauaguaagacaacaauccuacucaauaaugugcauuauaaaagaagaaguccucgccuauguaguacaacuacccuuauacggaguaauugacacaccauguuggaaacuacauacaucaccacuaugcaccacuaacacaaaagaaggcuccaacauaugccuaacccgaacagaucgcggaugguauugcgacaacgcaggaaguguauccuucuuuccacaagcagaaacaugcaaaguacaauccaacagaguauucugugacaccaugaacucucuaacacuaccuuccgaaguaaauuuaugcaacguagacauauuuaaucccaaauacgacuguaaaauaaugaccucaaaaacugaugucucaucaucagucauuacaucacucggagcaauagucaguugcuauggaaaaaccaaaugcacagcuaguaacaaaaacagggguauaauaaaaacauuuucaaacggaugcgauuacguaucaaauaaaggaguagacaccguauccguaggaaauacucucuacugcguaaacaaacaagaaggacaaucccuauacguaaaaggcgaaccaaucauuaacuuuuacgacccacuuguauuuccaucagacgaauuugaugccucaauaucccaagucaaugaaaaaauaaaccaaagucuagcauucauccgaaaaucagaugaacuuuuacacaacguaaacgccggaaaaucaacaacaaacaucaugaucacaacaaucaucauaguaauaauaguuauacuacuuuccuuaauagcagucggccuacuacucuacugcaaagcacgauccacaccaguaaccuuaucuaaagaccaacucucaggcauaaacaacauagcauucucaaacuaaggacuaguggaagcauuuuccuggcugauuaaaagaaauuacucagcuauggucaucuguuccuguuagaaggcuaugcagcauauuauauacuaugcgcauguuaugaaaugcauaauaaaaaauuuuaaaaaaucuaaaagaucuaaaaaaaaaaaaaaaaaaaaaaaaaaaaaaaaaaaaaaaaaaaaaaaaaaaaaaaaaaaaaaaaugcaucccccccccccccccccccccccccccccccaaaggcucuuuucagagccaccagaauu

SEQ ID NO: 3432 - RNA, 1982 nt, Artificial Sequence
  mRNA product Design h-3 comprising derived and/or modified sequence from HRSV(A2)__F_DSCav1_mut3 (opt11)
gggagacccgugacccggaaguuguacggcuacgcgacuuucccucccacaaacccucgcgcccuuccuuuccuacuugggcccggcagaaagcuuaccauggaacuccucauccuuaaagcaaacgccaucacaaccauccucacagcagucacuuucugcuucgcauccggacaaaacaucacagaagaguucuaucaauccacgugcuccgcaguuuccaaaggauaccuuggagccuuacgaaccggcugguacaccuccgucaucaccauagaacucagcaacaucaaagaaaucaaaugcaacggaaccgacgcaaaagucaaacucaucaaacaagaacuagacaaauacaaaaacgcagucaccgaccuccaacuacucaugcaaucaacccccgcaaccggcuccggcuccgccaucugcuccggaguagccguaugcaaaguccuccaccucgaaggcgaaguuaacaagaucaaguccgcacuccuaucaaccaacaaagcagucgucucccuauccaacggcgucuccguauuaacauucaaaguccucgaccucaaaaacuacauagacaaacagcuacuccccauccuaaacaaacaauccugcuccauccccaacaucgaaacugucaucgaguuccaacagaaaaacaaccgccuccuagaaaucacccgagaguucuccguaaacgccggcgucacuacccccgucucuaccuauaugcuaaccaacucugaacuccuaucccuaaucaacgauaugcccauaacuaacgaccaaaagaaacuuauguccaacaacguacaaauaguccggcaacaaucauacucuaucaugugcaucaucaaagaagaaguacuugccuacguuguccaacucccacuauacggcgucauagacacuccaugcuggaaacuucacaccucaccccucugcaccacuaacacuaaagaaggcucuaacaucugccuuacccgcaccgaccgcggaugguacugcgacaacgcaggcucaguuagcuucuucccacaagccgaaaccugcaaaguccagucaaaccgugucuucugcgauaccaugaacucgcucacccucccuuccgaagucaaccucugcaacgucgacaucuucaaccccaaauacgacugcaaaaucaugaccucaaaaaccgacguaucuucuuccgucaucaccucccucggcgccaucguauccugcuacggcaaaaccaaaugcacugcaucaaacaaaaaccgaggcaucaucaaaaccuucucgaacggaugcgacuacguauccaacaagggcgucgacacagucuccguugguaacacccucuacugcgucaacaaacaagaaggccaaucccuauacguaaaaggcgaacccaucaucaacuucuacgacccccucgucuuccccagugacgaauuugacgccuccaucucccaagucaacgaaaagaucaaccaaucccuugccuucauacgcaaauccgacgaacuccuacacaacguuaacgccggaaaaucaacaaccaacaucaugaucacaaccaucauaaucgucauaaucgucauacuccucucccucauagccgucggccugcuauuguacuguaaagcccgcuccacaccagucacacuuucaaaagaccaacucuccgggaucaacaacaucgccuucuccaacuaaggacuaguggaagcauuuuccuggcugauuaaaagaaauuacucagcuauggucaucuguuccuguuagaaggcuaugcagcauauuauauacuaugcgcauguuaugaaaugcauaauaaaaaauuuuaaaaaaucuaaaagaucuaaaaaaaaaaaaaaaaaaaaaaaaaaaaaaaaaaaaaaaaaaaaaaaaaaaaaaaaaaaaaaaaugcaucccccccccccccccccccccccccccccccaaaggcucuuuucagagccaccagaauu

SEQ ID NO: 3433 - RNA, 2045 nt, Artificial Sequence
  mRNA product Design h-4 comprising derived and/or modified sequence from HRSV(A2)__F_DSCav1_mut3 (opt1)
gggagagggcgcuuggcuugcaaggacccugagcugcggcauugaagcacacccaacccaacucgacugaagucagccucacugaaccggaucugagaaucuucucucucugggcuugccagggcucuccgaaccuagcuagcauccucuucaauuccaacuagaaagcuuaccauggagcugcucauccugaaggccaacgccaucaccaccauccugacggcggugaccuucugcuucgccagcggccagaacaucaccgaggaguucuaccaguccacgugcagcgccgucuccaagggguaccucggcgcccugcggaccggcugguacaccuccgugaucaccaucgagcugagcaacaucaaggagaucaagugcaacgggaccgacgccaaggugaagcucaucaagcaggagcuggacaaguacaagaacgcggucacggaccugcagcuccugaugcaguccaccccggcaaccggcuccggcuccgccaucugcagcggcgucgccgugugcaaggugcugcaccucgagggggaggucaacaagaucaagagcgcccugcuguccaccaacaaggccguggugagccucuccaacggcgucagcgugcugaccuucaaggugcuggaccucaagaacuacaucgacaagcagcugcugcccauccugaacaagcagagcugcuccauccccaacaucgagacggugaucgaguuccagcagaagaacaaccggcuccuggagaucacccgcgaguucagcgugaacgccggggucaccacccccguguccacguacaugcugaccaacagcgagcuccugucccugaucaacgacaugccgaucaccaacgaccagaagaagcucaugagcaacaacgugcagaucguccggcagcaguccuacagcaucaugugcaucaucaaggaggaggugcuggcguacgugguccagcugccccucuacggcgugaucgacacccccugcuggaagcugcacacgagcccccugugcaccaccaacaccaaggagggguccaacaucugccucacgcgcaccgaccggggcugguacugcgacaacgccggcagcgucuccuucuucccgcaggccgagaccugcaaggugcagagcaaccgcguguucugcgacaccaugaacucccugacgcugcccagcgagguaaaccucugcaacgucgacaucuucaaccccaaguacgacugcaagaucaugaccuccaagaccgacgugagcuccagcgugaucaccucccugggggccaucgucagcugcuacggcaagacgaagugcaccgccagcaacaagaaccgggggaucaucaagaccuucuccaacggcugcgacuacgugagcaacaagggcguggacaccguguccgucgggaacacccuguacugcgugaacaagcaggagggccagagccucuacgugaagggggagcccaucaucaacuucuacgacccgcuggucuuccccuccgacgaguucgacgcgagcaucucccaggugaacgagaagaucaaccagagccuggccuucauccgcaaguccgacgagcugcuccacaacgugaacgccggcaagagcacgaccaacaucaugaucaccaccaucaucaucgucaucaucgugauccugcugucccucaucgccguggggcugcugcucuacugcaaggcccggagcacgcccgucacccuguccaaggaccagcugagcggcaucaacaacaucgcguucuccaacugaggacuaguaauaaggaaacuguaugaaugucugugggcaggaagugaagagauccuucuguaaagguuuuuggaauuaugucugcugaauaauaaacuuuuuugaaauaauaaaucugguagaaaaaugagaucuaaaaaaaaaaaaaaaaaaaaaaaaaaaaaaaaaaaaaaaaaaaaaaaaaaaaaaaaaaaaaaaaugcaucccccccccccccccccccccccccccccccaaaggcucuuuucagagccaccagaauu

SEQ ID NO: 3434 - RNA, 2045 nt, Artificial Sequence
  mRNA product Design h-4 comprising derived and/or modified sequence from HRSV(A2)__F_DSCav1_mut3 (opt1)
gggagagggcgcuuggcuugcaaggacccugagcugcggcauugaagcacacccaacccaacucgacugaagucagccucacugaaccggaucugagaaucuucucucucugggcuugccagggcucuccgaaccuagcuagcauccucuucaauuccaacuagaaagcuuaccauggagcugcucauccugaaggccaacgccaucaccaccauccugacggcggugaccuucugcuucgccagcggccagaacaucaccgaggaguucuaccaguccacgugcagcgccgucuccaagggguaccucggcgcccugcgcaccgggugguacaccagcgugaucaccaucgagcuguccaacaucaaggagaucaagugcaacggcaccgacgccaaggugaagcucaucaagcaggagcuggacaaguacaagaacgcggucacggaccugcagcuccugaugcagagcacccccgccaccggguccggcagcgccaucugcuccggcguggccgugugcaagguccugcaccucgagggggaggugaacaagaucaagagcgcgcugcuguccaccaacaaggccguggucagccucuccaacggcgugagcgugcugacguucaagguccuggaccucaagaacuacaucgacaagcagcugcugccgauccucaacaagcaguccugcagcauccccaacaucgagaccgugaucgaguuccagcagaagaacaaccggcugcuggagaucacccgcgaguucuccgugaacgccggggucaccacgcccgugagcaccuacaugcucaccaacuccgagcugcugagccucaucaacgacaugcccaucaccaacgaccagaagaagcugaugagcaacaacgugcagaucguccggcagcaguccuacagcaucaugugcaucaucaaggaggaggugcuggccuacgugguccagcucccgcuguacggcgugaucgacacgcccugcuggaagcugcacaccagcccccucugcaccaccaacacgaaggagggguccaacaucugccugacccgcaccgaccggggcugguacugcgacaacgccggcuccgugagcuucuucccccaggcggagaccugcaagguccaguccaaccgcguguucugcgacacgaugaacagccugacccucccguccgaggucaaccugugcaacguggacaucuucaaccccaaguacgacugcaagaucaugaccagcaagaccgacguguccagcuccgucaucacgagccugggggccaucguguccugcuacggcaagaccaagugcaccgccagcaacaagaaccgggggaucaucaagaccuucuccaacggcugcgacuacgugagcaacaagggcgucgacacgguguccguggggaacacccucuacugcgucaacaagcaggagggccagagccuguacgugaagggggagcccaucaucaacuucuacgacccccugguguucccgagcgacgaguucgacgccuccaucagccaggucaacgagaagaucaaccagucccucgccuucauccgcaagagcgacgagcugcugcacaacgugaacgcgggcaaguccaccaccaacaucaugaucaccacgaucaucaucgugaucaucgucauccuccugagccugaucgccguggggcuccugcuguacugcaaggcccgguccacccccgugacccugagcaaggaccagcucuccggcaucaacaacaucgccuucagcaacugaggacuaguaauaaggaaacuguaugaaugucugugggcaggaagugaagagauccuucuguaaagguuuuuggaauuaugucugcugaauaauaaacuuuuuugaaauaauaaaucugguagaaaaaugagaucuaaaaaaaaaaaaaaaaaaaaaaaaaaaaaaaaaaaaaaaaaaaaaaaaaaaaaaaaaaaaaaaaugcaucccccccccccccccccccccccccccccccaaaggcucuuuucagagccaccagaauu

SEQ ID NO: 3435 - RNA, 2045 nt, Artificial Sequence
  mRNA product Design h-4 comprising derived and/or modified sequence from HRSV(A2)__F_DSCav1_mut3 (opt2)
gggagagggcgcuuggcuugcaaggacccugagcugcggcauugaagcacacccaacccaacucgacugaagucagccucacugaaccggaucugagaaucuucucucucugggcuugccagggcucuccgaaccuagcuagcauccucuucaauuccaacuagaaagcuuaccauggagcuccucauccucaaggccaacgccaucaccaccauccucaccgccgucaccuucugcuucgccuccggccagaacaucaccgaggaguucuaccaguccaccugcuccgccgucuccaagggcuaccucggcgcccuccgcaccggcugguacaccuccgucaucaccaucgagcucuccaacaucaaggagaucaagugcaacggcaccgacgccaaggucaagcucaucaagcaggagcucgacaaguacaagaacgccgucaccgaccuccagcuccucaugcaguccacccccgccaccggcuccggcuccgccaucugcuccggcgucgccgucugcaagguccuccaccucgagggcgaggucaacaagaucaaguccgcccuccucuccaccaacaaggccgucgucucccucuccaacggcgucuccguccucaccuucaagguccucgaccucaagaacuacaucgacaagcagcuccuccccauccucaacaagcaguccugcuccauccccaacaucgagaccgucaucgaguuccagcagaagaacaaccgccuccucgagaucacccgcgaguucuccgucaacgccggcgucaccacccccgucuccaccuacaugcucaccaacuccgagcuccucucccucaucaacgacaugcccaucaccaacgaccagaagaagcucauguccaacaacguccagaucguccgccagcaguccuacuccaucaugugcaucaucaaggaggagguccucgccuacgucguccagcucccccucuacggcgucaucgacacccccugcuggaagcuccacaccuccccccucugcaccaccaacaccaaggagggcuccaacaucugccucacccgcaccgaccgcggcugguacugcgacaacgccggcuccgucuccuucuucccccaggccgagaccugcaagguccaguccaaccgcgucuucugcgacaccaugaacucccucacccuccccuccgaggucaaccucugcaacgucgacaucuucaaccccaaguacgacugcaagaucaugaccuccaagaccgacgucuccuccuccgucaucaccucccucggcgccaucgucuccugcuacggcaagaccaagugcaccgccuccaacaagaaccgcggcaucaucaagaccuucuccaacggcugcgacuacgucuccaacaagggcgucgacaccgucuccgucggcaacacccucuacugcgucaacaagcaggagggccagucccucuacgucaagggcgagcccaucaucaacuucuacgacccccucgucuuccccuccgacgaguucgacgccuccaucucccaggucaacgagaagaucaaccagucccucgccuucauccgcaaguccgacgagcuccuccacaacgucaacgccggcaaguccaccaccaacaucaugaucaccaccaucaucaucgucaucaucgucauccuccucucccucaucgccgucggccuccuccucuacugcaaggcccgcuccacccccgucacccucuccaaggaccagcucuccggcaucaacaacaucgccuucuccaacugaggacuaguaauaaggaaacuguaugaaugucugugggcaggaagugaagagauccuucuguaaagguuuuuggaauuaugucugcugaauaauaaacuuuuuugaaauaauaaaucugguagaaaaaugagaucuaaaaaaaaaaaaaaaaaaaaaaaaaaaaaaaaaaaaaaaaaaaaaaaaaaaaaaaaaaaaaaaaugcaucccccccccccccccccccccccccccccccaaaggcucuuuucagagccaccagaauu

SEQ ID NO: 3436 - RNA, 2045 nt, Artificial Sequence
  mRNA product Design h-4 comprising derived and/or modified sequence from HRSV(A2)__F_DSCav1_mut3 (opt3)
gggagagggcgcuuggcuugcaaggacccugagcugcggcauugaagcacacccaacccaacucgacugaagucagccucacugaaccggaucugagaaucuucucucucugggcuugccagggcucuccgaaccuagcuagcauccucuucaauuccaacuagaaagcuuaccauggagcugcucauccuuaaggccaacgcuauuaccacaauacugacugcagugacguucugcuuugccagcggccagaauaucaccgaagaguucuaccaauccacauguucugcggucucaaaaggguauuugggagcuuuaagaacugguugguacaccaguguuauuacaaucgaacugagcaacauuaaggagaucaaaugcaauggcaccgacgccaaggugaaacuaauaaagcaggaacucgauaaguauaaaaacgcaguaacugaccugcagcuucugaugcaguccacacccgccaccgggucuggaucggcuaucuguucaggcguggcagucugcaagguguugcaccucgagggugagguuaauaaaauuaagagcgcccugcugaguacgaacaaagcuguggucucccucucuaauggggugagcguauuaacuuuuaagguucuggaucuuaagaacuacaucgacaaacaauugcugccuauucuaaauaagcaguccuguucaaucccaaacauagaaaccgugauugaguuccagcagaaaaauaacaggcuccuggaaaucacacgggaguuuagugucaaugccggagugacuaccccggugagcacauauaugcuuaccaacucugagcuguugucccucauuaaugauaugcccaucacgaacgaccaaaagaaacugaugucaaacaauguccagaucguucgccagcagagcuacaguauuaugugcauaaucaaggaagagguguuagcguauguagugcaacugccucucuacggcgucauugauacuccauguuggaaacuucauacaucuccccugugcaccacuaacacaaaggaaggcuccaauaucuguuugacccgaacggaccgugggugguacugcgauaacgcaggaagcgugucguucuuuccucaggccgagaccuguaagguucagucuaauagaguguucugcgacacaaugaacucccuaacucugccaucagaagucaaucucugcaacguggauauauuuaaucccaaauaugacuguaagauuaugaccaguaaaacagauguaagcuccucuguuaucacuagccugggugcuaucgugucaugcuacggcaagaccaaauguacagccaguaacaagaauagggggauuaucaagaccuucuccaacggaugcgacuaugucagcaauaaaggcguggacacugucucuguggguaacacgcuuuacuguguuaauaagcaagaggggcagucacuguaugugaaaggagagccuauuauaaacuuuuacgauccauugguauucccgagugacgaauuugaugcaagcaucucccaggucaacgagaagauuaaucagucucucgcuuucauccggaaaucggacgaacuguuacacaacgugaaugccggcaagagcacaaccaacaucaugauuacuaccauaaucauuguuaucauugugauccugcuaucccucauagcggucggccugcuuuuguauugcaaggcccgcucaacacccgugacccugaguaaagaucaacucucugggaucaauaacauugcauucagcaauugaggacuaguaauaaggaaacuguaugaaugucugugggcaggaagugaagagauccuucuguaaagguuuuuggaauuaugucugcugaauaauaaacuuuuuugaaauaauaaaucugguagaaaaaugagaucuaaaaaaaaaaaaaaaaaaaaaaaaaaaaaaaaaaaaaaaaaaaaaaaaaaaaaaaaaaaaaaaaugcaucccccccccccccccccccccccccccccccaaaggcucuuuucagagccaccagaauu

SEQ ID NO: 3437 - RNA, 2045 nt, Artificial Sequence
  mRNA product Design h-4 comprising derived and/or modified sequence from HRSV(A2)__F_DSCav1_mut3 (opt4)
gggagagggcgcuuggcuugcaaggacccugagcugcggcauugaagcacacccaacccaacucgacugaagucagccucacugaaccggaucugagaaucuucucucucugggcuugccagggcucuccgaaccuagcuagcauccucuucaauuccaacuagaaagcuuaccauggagcugcugauccugaaggccaacgccaucaccaccauccugaccgccgugaccuucugcuucgccagcggccagaacaucaccgaggaguucuaccagagcaccugcagcgccgugagcaagggcuaccugggcgcccugagaaccggcugguacaccagcgugaucaccaucgagcugagcaacaucaaggagaucaagugcaacggcaccgacgccaaggugaagcugaucaagcaggagcuggacaaguacaagaacgccgugaccgaccugcagcugcugaugcagagcacccccgccaccggcagcggcagcgccaucugcagcggcguggccgugugcaaggugcugcaccuggagggcgaggugaacaagaucaagagcgcccugcugagcaccaacaaggccguggugagccugagcaacggcgugagcgugcugaccuucaaggugcuggaccugaagaacuacaucgacaagcagcugcugcccauccugaacaagcagagcugcagcauccccaacaucgagaccgugaucgaguuccagcagaagaacaacagacugcuggagaucaccagagaguucagcgugaacgccggcgugaccacccccgugagcaccuacaugcugaccaacagcgagcugcugagccugaucaacgacaugcccaucaccaacgaccagaagaagcugaugagcaacaacgugcagaucgugagacagcagagcuacagcaucaugugcaucaucaaggaggaggugcuggccuacguggugcagcugccccuguacggcgugaucgacacccccugcuggaagcugcacaccagcccccugugcaccaccaacaccaaggagggcagcaacaucugccugaccagaaccgacagaggcugguacugcgacaacgccggcagcgugagcuucuucccccaggccgagaccugcaaggugcagagcaacagaguguucugcgacaccaugaacagccugacccugcccagcgaggugaaccugugcaacguggacaucuucaaccccaaguacgacugcaagaucaugaccagcaagaccgacgugagcagcagcgugaucaccagccugggcgccaucgugagcugcuacggcaagaccaagugcaccgccagcaacaagaacagaggcaucaucaagaccuucagcaacggcugcgacuacgugagcaacaagggcguggacaccgugagcgugggcaacacccuguacugcgugaacaagcaggagggccagagccuguacgugaagggcgagcccaucaucaacuucuacgacccccugguguuccccagcgacgaguucgacgccagcaucagccaggugaacgagaagaucaaccagagccuggccuucaucagaaagagcgacgagcugcugcacaacgugaacgccggcaagagcaccaccaacaucaugaucaccaccaucaucaucgugaucaucgugauccugcugagccugaucgccgugggccugcugcuguacugcaaggccagaagcacccccgugacccugagcaaggaccagcugagcggcaucaacaacaucgccuucagcaacugaggacuaguaauaaggaaacuguaugaaugucugugggcaggaagugaagagauccuucuguaaagguuuuuggaauuaugucugcugaauaauaaacuuuuuugaaauaauaaaucugguagaaaaaugagaucuaaaaaaaaaaaaaaaaaaaaaaaaaaaaaaaaaaaaaaaaaaaaaaaaaaaaaaaaaaaaaaaaugcaucccccccccccccccccccccccccccccccaaaggcucuuuucagagccaccagaauu

SEQ ID NO: 3438 - RNA, 2045 nt, Artificial Sequence
  mRNA product Design h-4 comprising derived and/or modified sequence from HRSV(A2)__F_DSCav1_mut3 (opt5)
gggagagggcgcuuggcuugcaaggacccugagcugcggcauugaagcacacccaacccaacucgacugaagucagccucacugaaccggaucugagaaucuucucucucugggcuugccagggcucuccgaaccuagcuagcauccucuucaauuccaacuagaaagcuuaccauggagcugcucauccugaaggccaacgcuauuaccacaauccuuacggccgugaccuucugcuuugcgagcggccagaauauuacagaagaguucuaccaauccaccuguucugcugucagcaaaggguaucugggagcccucagaacaggcugguacaccuccguuaucacaauugaacugucuaacaucaaggagaucaaaugcaaugggaccgacgccaaggugaaacuuauuaagcaggaacuggauaaguauaaaaacgcugugacggaccuccagcugcugaugcagagcacccccgccacaggauccggcucugcuaucuguagcggggucgccgugugcaagguucuccaccuggagggagaggugaauaaaauuaaguccgcgcuucugagcaccaacaaagccgucgugucucucuccaauggcguuagcgugcugacauuuaagguccuugaucugaagaacuacaucgacaaacaacuccugccuauucugaauaagcagucuuguuccaucccgaacauugaaaccgugaucgaguuccagcagaaaaauaaccggcuccuggaaaucacgcgcgaguuuagcgugaaugcuggcgucacaacccccguuucuacauauaugcuuaccaacuccgagcugcucagccugauuaaugauaugccuaucaccaacgaccaaaagaaacuuauguccaacaaugugcagauugugagacagcagucuuacagcaucaugugcauuaucaaggaagagguccuggccuaugugguucaacucccccuguacggggugaucgauacaccuuguuggaaacugcauacgagcccccucugcaccacaaacaccaaggaaggauccaauauuugucugacacggaccgaccgcggcugguacugcgauaacgcugggucugucuccuucuuuccucaggccgagacguguaaggugcagagcaauagaguuuucugcgacacaaugaacucucuuacccugccgagcgaagugaaucucugcaacgucgauaucuuuaaucccaaauaugacuguaagauuaugaccuccaaaacagaugugucuagcuccgucaucaccagccugggagcgauugugucuugcuacggcaagacaaaauguacggccuccaacaagaaucgggggaucaucaagaccuucagcaacggaugcgacuauguuucuaauaaaggcguggacacagucuccgugggcaacacccuuuacuguguuaauaagcaagaggggcagagccuguaugugaaaggagagccuauuaucaacuuuuacgauccccucgucuucccuuccgacgaauuugaugcuucuauuagccaggugaacgagaagaucaaucagucccuggccuucauucgcaaaucugacgaacugcuccacaacgugaaugcuggcaagagcacaaccaacaucaugauuacgaccaucaucauuguuaucauugucauccugcuuucccugauugccguggggcuccugcuguauugcaaggccagaagcacacccgugacccuuucuaaagaucaacucuccggaaucaauaacaucgcuuucagcaauugaggacuaguaauaaggaaacuguaugaaugucugugggcaggaagugaagagauccuucuguaaagguuuuuggaauuaugucugcugaauaauaaacuuuuuugaaauaauaaaucugguagaaaaaugagaucuaaaaaaaaaaaaaaaaaaaaaaaaaaaaaaaaaaaaaaaaaaaaaaaaaaaaaaaaaaaaaaaaugcaucccccccccccccccccccccccccccccccaaaggcucuuuucagagccaccagaauu

SEQ ID NO: 3439 - RNA, 2045 nt, Artificial Sequence
  mRNA product Design h-4 comprising derived and/or modified sequence from HRSV(A2)__F_DSCav1_mut3 (opt6)
gggagagggcgcuuggcuugcaaggacccugagcugcggcauugaagcacacccaacccaacucgacugaagucagccucacugaaccggaucugagaaucuucucucucugggcuugccagggcucuccgaaccuagcuagcauccucuucaauuccaacuagaaagcuuaccauggaauuacucauacuaaaagccaaugccauaaccacuauucuaacagcaguaacauucuguuucgccucaggacaaaacauaacagaagaauuuuaucaauccaccuguuccgcagucucgaaaggcuaccuuggcgcacuaagaaccggaugguauacaucaguaauaaccauugaacuaucaaauaucaaagaaauaaaaugcaacggaacugacgcaaaagucaaacuaauaaaacaagaauuagacaaauacaaaaacgccguuacagacuuacaacuacuaaugcaaucaacuccagcaacaggaucaggaucugcuauaugcucaggugucgccguauguaaaguguuacaccucgaaggcgaaguaaacaaaauaaaaucagcacuacuauccacaaauaaagcaguaguaucacuauccaaugguguaucaguacucacauucaaaguacuagacuuaaaaaauuauauagauaaacaauuacuaccaauauuaaacaaacaaucaugcucaauaccaaacauagaaaccgucauugaauuucaacaaaaaaacaaucgacuucuugaaauaacacgagaauuuucaguaaaugccggaguaacaaccccagucucaacauacauguuaaccaacucugaacuccuaagccuaaucaacgacaugcccauaacuaacgaccaaaaaaaacuaauguccaauaauguccaaauaguaagacaacaauccuacucaauaaugugcauuauaaaagaagaaguccucgccuauguaguacaacuacccuuauacggaguaauugacacaccauguuggaaacuacauacaucaccacuaugcaccacuaacacaaaagaaggcuccaacauaugccuaacccgaacagaucgcggaugguauugcgacaacgcaggaaguguauccuucuuuccacaagcagaaacaugcaaaguacaauccaacagaguauucugugacaccaugaacucucuaacacuaccuuccgaaguaaauuuaugcaacguagacauauuuaaucccaaauacgacuguaaaauaaugaccucaaaaacugaugucucaucaucagucauuacaucacucggagcaauagucaguugcuauggaaaaaccaaaugcacagcuaguaacaaaaacagggguauaauaaaaacauuuucaaacggaugcgauuacguaucaaauaaaggaguagacaccguauccguaggaaauacucucuacugcguaaacaaacaagaaggacaaucccuauacguaaaaggcgaaccaaucauuaacuuuuacgacccacuuguauuuccaucagacgaauuugaugccucaauaucccaagucaaugaaaaaauaaaccaaagucuagcauucauccgaaaaucagaugaacuuuuacacaacguaaacgccggaaaaucaacaacaaacaucaugaucacaacaaucaucauaguaauaauaguuauacuacuuuccuuaauagcagucggccuacuacucuacugcaaagcacgauccacaccaguaaccuuaucuaaagaccaacucucaggcauaaacaacauagcauucucaaacuaaggacuaguaauaaggaaacuguaugaaugucugugggcaggaagugaagagauccuucuguaaagguuuuuggaauuaugucugcugaauaauaaacuuuuuugaaauaauaaaucugguagaaaaaugagaucuaaaaaaaaaaaaaaaaaaaaaaaaaaaaaaaaaaaaaaaaaaaaaaaaaaaaaaaaaaaaaaaaugcaucccccccccccccccccccccccccccccccaaaggcucuuuucagagccaccagaauu

SEQ ID NO: 3440 - RNA, 2045 nt, Artificial Sequence
  mRNA product Design h-4 comprising derived and/or modified sequence from HRSV(A2)__F_DSCav1_mut3 (opt11)
gggagagggcgcuuggcuugcaaggacccugagcugcggcauugaagcacacccaacccaacucgacugaagucagccucacugaaccggaucugagaaucuucucucucugggcuugccagggcucuccgaaccuagcuagcauccucuucaauuccaacuagaaagcuuaccauggaacuccucauccuuaaagcaaacgccaucacaaccauccucacagcagucacuuucugcuucgcauccggacaaaacaucacagaagaguucuaucaauccacgugcuccgcaguuuccaaaggauaccuuggagccuuacgaaccggcugguacaccuccgucaucaccauagaacucagcaacaucaaagaaaucaaaugcaacggaaccgacgcaaaagucaaacucaucaaacaagaacuagacaaauacaaaaacgcagucaccgaccuccaacuacucaugcaaucaacccccgcaaccggcuccggcuccgccaucugcuccggaguagccguaugcaaaguccuccaccucgaaggcgaaguuaacaagaucaaguccgcacuccuaucaaccaacaaagcagucgucucccuauccaacggcgucuccguauuaacauucaaaguccucgaccucaaaaacuacauagacaaacagcuacuccccauccuaaacaaacaauccugcuccauccccaacaucgaaacugucaucgaguuccaacagaaaaacaaccgccuccuagaaaucacccgagaguucuccguaaacgccggcgucacuacccccgucucuaccuauaugcuaaccaacucugaacuccuaucccuaaucaacgauaugcccauaacuaacgaccaaaagaaacuuauguccaacaacguacaaauaguccggcaacaaucauacucuaucaugugcaucaucaaagaagaaguacuugccuacguuguccaacucccacuauacggcgucauagacacuccaugcuggaaacuucacaccucaccccucugcaccacuaacacuaaagaaggcucuaacaucugccuuacccgcaccgaccgcggaugguacugcgacaacgcaggcucaguuagcuucuucccacaagccgaaaccugcaaaguccagucaaaccgugucuucugcgauaccaugaacucgcucacccucccuuccgaagucaaccucugcaacgucgacaucuucaaccccaaauacgacugcaaaaucaugaccucaaaaaccgacguaucuucuuccgucaucaccucccucggcgccaucguauccugcuacggcaaaaccaaaugcacugcaucaaacaaaaaccgaggcaucaucaaaaccuucucgaacggaugcgacuacguauccaacaagggcgucgacacagucuccguugguaacacccucuacugcgucaacaaacaagaaggccaaucccuauacguaaaaggcgaacccaucaucaacuucuacgacccccucgucuuccccagugacgaauuugacgccuccaucucccaagucaacgaaaagaucaaccaaucccuugccuucauacgcaaauccgacgaacuccuacacaacguuaacgccggaaaaucaacaaccaacaucaugaucacaaccaucauaaucgucauaaucgucauacuccucucccucauagccgucggccugcuauuguacuguaaagcccgcuccacaccagucacacuuucaaaagaccaacucuccgggaucaacaacaucgccuucuccaacuaaggacuaguaauaaggaaacuguaugaaugucugugggcaggaagugaagagauccuucuguaaagguuuuuggaauuaugucugcugaauaauaaacuuuuuugaaauaauaaaucugguagaaaaaugagaucuaaaaaaaaaaaaaaaaaaaaaaaaaaaaaaaaaaaaaaaaaaaaaaaaaaaaaaaaaaaaaaaaugcaucccccccccccccccccccccccccccccccaaaggcucuuuucagagccaccagaauu

SEQ ID NO: 3441 - RNA, 2061 nt, Artificial Sequence
  mRNA product Design h-5 comprising derived and/or modified sequence from HRSV(A2)__F_DSCav1_mut3 (opt1)
gggagagggcgcuuggcuugcaaggacccugagcugcggcauugaagcacacccaacccaacucgacugaagucagccucacugaaccggaucugagaaucuucucucucugggcuugccagggcucuccgaaccuagcuagcauccucuucaauuccaacuagaaagcuuaccauggagcugcucauccugaaggccaacgccaucaccaccauccugacggcggugaccuucugcuucgccagcggccagaacaucaccgaggaguucuaccaguccacgugcagcgccgucuccaagggguaccucggcgcccugcggaccggcugguacaccuccgugaucaccaucgagcugagcaacaucaaggagaucaagugcaacgggaccgacgccaaggugaagcucaucaagcaggagcuggacaaguacaagaacgcggucacggaccugcagcuccugaugcaguccaccccggcaaccggcuccggcuccgccaucugcagcggcgucgccgugugcaaggugcugcaccucgagggggaggucaacaagaucaagagcgcccugcuguccaccaacaaggccguggugagccucuccaacggcgucagcgugcugaccuucaaggugcuggaccucaagaacuacaucgacaagcagcugcugcccauccugaacaagcagagcugcuccauccccaacaucgagacggugaucgaguuccagcagaagaacaaccggcuccuggagaucacccgcgaguucagcgugaacgccggggucaccacccccguguccacguacaugcugaccaacagcgagcuccugucccugaucaacgacaugccgaucaccaacgaccagaagaagcucaugagcaacaacgugcagaucguccggcagcaguccuacagcaucaugugcaucaucaaggaggaggugcuggcguacgugguccagcugccccucuacggcgugaucgacacccccugcuggaagcugcacacgagcccccugugcaccaccaacaccaaggagggguccaacaucugccucacgcgcaccgaccggggcugguacugcgacaacgccggcagcgucuccuucuucccgcaggccgagaccugcaaggugcagagcaaccgcguguucugcgacaccaugaacucccugacgcugcccagcgagguaaaccucugcaacgucgacaucuucaaccccaaguacgacugcaagaucaugaccuccaagaccgacgugagcuccagcgugaucaccucccugggggccaucgucagcugcuacggcaagacgaagugcaccgccagcaacaagaaccgggggaucaucaagaccuucuccaacggcugcgacuacgugagcaacaagggcguggacaccguguccgucgggaacacccuguacugcgugaacaagcaggagggccagagccucuacgugaagggggagcccaucaucaacuucuacgacccgcuggucuuccccuccgacgaguucgacgcgagcaucucccaggugaacgagaagaucaaccagagccuggccuucauccgcaaguccgacgagcugcuccacaacgugaacgccggcaagagcacgaccaacaucaugaucaccaccaucaucaucgucaucaucgugauccugcugucccucaucgccguggggcugcugcucuacugcaaggcccggagcacgcccgucacccuguccaaggaccagcugagcggcaucaacaacaucgcguucuccaacugaggacuaguacuggcugcaucucccuuuccucuguccuccauccuucucccaggauggugaagggggaccugguacccagugauccccaccccaggauccuaaaucaugacuuaccugcuaauaaaaacucauuggaaaagugagaagaucuaaaaaaaaaaaaaaaaaaaaaaaaaaaaaaaaaaaaaaaaaaaaaaaaaaaaaaaaaaaaaaaaugcaucccccccccccccccccccccccccccccccaaaggcucuuuucagagccaccagaauu

SEQ ID NO: 3442 - RNA, 2061 nt, Artificial Sequence
  mRNA product Design h-5 comprising derived and/or modified sequence from HRSV(A2)__F_DSCav1_mut3 (opt1)
gggagagggcgcuuggcuugcaaggacccugagcugcggcauugaagcacacccaacccaacucgacugaagucagccucacugaaccggaucugagaaucuucucucucugggcuugccagggcucuccgaaccuagcuagcauccucuucaauuccaacuagaaagcuuaccauggagcugcucauccugaaggccaacgccaucaccaccauccugacggcggugaccuucugcuucgccagcggccagaacaucaccgaggaguucuaccaguccacgugcagcgccgucuccaagggguaccucggcgcccugcgcaccgggugguacaccagcgugaucaccaucgagcuguccaacaucaaggagaucaagugcaacggcaccgacgccaaggugaagcucaucaagcaggagcuggacaaguacaagaacgcggucacggaccugcagcuccugaugcagagcacccccgccaccggguccggcagcgccaucugcuccggcguggccgugugcaagguccugcaccucgagggggaggugaacaagaucaagagcgcgcugcuguccaccaacaaggccguggucagccucuccaacggcgugagcgugcugacguucaagguccuggaccucaagaacuacaucgacaagcagcugcugccgauccucaacaagcaguccugcagcauccccaacaucgagaccgugaucgaguuccagcagaagaacaaccggcugcuggagaucacccgcgaguucuccgugaacgccggggucaccacgcccgugagcaccuacaugcucaccaacuccgagcugcugagccucaucaacgacaugcccaucaccaacgaccagaagaagcugaugagcaacaacgugcagaucguccggcagcaguccuacagcaucaugugcaucaucaaggaggaggugcuggccuacgugguccagcucccgcuguacggcgugaucgacacgcccugcuggaagcugcacaccagcccccucugcaccaccaacacgaaggagggguccaacaucugccugacccgcaccgaccggggcugguacugcgacaacgccggcuccgugagcuucuucccccaggcggagaccugcaagguccaguccaaccgcguguucugcgacacgaugaacagccugacccucccguccgaggucaaccugugcaacguggacaucuucaaccccaaguacgacugcaagaucaugaccagcaagaccgacguguccagcuccgucaucacgagccugggggccaucguguccugcuacggcaagaccaagugcaccgccagcaacaagaaccgggggaucaucaagaccuucuccaacggcugcgacuacgugagcaacaagggcgucgacacgguguccguggggaacacccucuacugcgucaacaagcaggagggccagagccuguacgugaagggggagcccaucaucaacuucuacgacccccugguguucccgagcgacgaguucgacgccuccaucagccaggucaacgagaagaucaaccagucccucgccuucauccgcaagagcgacgagcugcugcacaacgugaacgcgggcaaguccaccaccaacaucaugaucaccacgaucaucaucgugaucaucgucauccuccugagccugaucgccguggggcuccugcuguacugcaaggcccgguccacccccgugacccugagcaaggaccagcucuccggcaucaacaacaucgccuucagcaacugaggacuaguacuggcugcaucucccuuuccucuguccuccauccuucucccaggauggugaagggggaccugguacccagugauccccaccccaggauccuaaaucaugacuuaccugcuaauaaaaacucauuggaaaagugagaagaucuaaaaaaaaaaaaaaaaaaaaaaaaaaaaaaaaaaaaaaaaaaaaaaaaaaaaaaaaaaaaaaaaugcaucccccccccccccccccccccccccccccccaaaggcucuuuucagagccaccagaauu

SEQ ID NO: 3443 - RNA, 2061 nt, Artificial Sequence
  mRNA product Design h-5 comprising derived and/or modified sequence from HRSV(A2)__F_DSCav1_mut3 (opt2)
gggagagggcgcuuggcuugcaaggacccugagcugcggcauugaagcacacccaacccaacucgacugaagucagccucacugaaccggaucugagaaucuucucucucugggcuugccagggcucuccgaaccuagcuagcauccucuucaauuccaacuagaaagcuuaccauggagcuccucauccucaaggccaacgccaucaccaccauccucaccgccgucaccuucugcuucgccuccggccagaacaucaccgaggaguucuaccaguccaccugcuccgccgucuccaagggcuaccucggcgcccuccgcaccggcugguacaccuccgucaucaccaucgagcucuccaacaucaaggagaucaagugcaacggcaccgacgccaaggucaagcucaucaagcaggagcucgacaaguacaagaacgccgucaccgaccuccagcuccucaugcaguccacccccgccaccggcuccggcuccgccaucugcuccggcgucgccgucugcaagguccuccaccucgagggcgaggucaacaagaucaaguccgcccuccucuccaccaacaaggccgucgucucccucuccaacggcgucuccguccucaccuucaagguccucgaccucaagaacuacaucgacaagcagcuccuccccauccucaacaagcaguccugcuccauccccaacaucgagaccgucaucgaguuccagcagaagaacaaccgccuccucgagaucacccgcgaguucuccgucaacgccggcgucaccacccccgucuccaccuacaugcucaccaacuccgagcuccucucccucaucaacgacaugcccaucaccaacgaccagaagaagcucauguccaacaacguccagaucguccgccagcaguccuacuccaucaugugcaucaucaaggaggagguccucgccuacgucguccagcucccccucuacggcgucaucgacacccccugcuggaagcuccacaccuccccccucugcaccaccaacaccaaggagggcuccaacaucugccucacccgcaccgaccgcggcugguacugcgacaacgccggcuccgucuccuucuucccccaggccgagaccugcaagguccaguccaaccgcgucuucugcgacaccaugaacucccucacccuccccuccgaggucaaccucugcaacgucgacaucuucaaccccaaguacgacugcaagaucaugaccuccaagaccgacgucuccuccuccgucaucaccucccucggcgccaucgucuccugcuacggcaagaccaagugcaccgccuccaacaagaaccgcggcaucaucaagaccuucuccaacggcugcgacuacgucuccaacaagggcgucgacaccgucuccgucggcaacacccucuacugcgucaacaagcaggagggccagucccucuacgucaagggcgagcccaucaucaacuucuacgacccccucgucuuccccuccgacgaguucgacgccuccaucucccaggucaacgagaagaucaaccagucccucgccuucauccgcaaguccgacgagcuccuccacaacgucaacgccggcaaguccaccaccaacaucaugaucaccaccaucaucaucgucaucaucgucauccuccucucccucaucgccgucggccuccuccucuacugcaaggcccgcuccacccccgucacccucuccaaggaccagcucuccggcaucaacaacaucgccuucuccaacugaggacuaguacuggcugcaucucccuuuccucuguccuccauccuucucccaggauggugaagggggaccugguacccagugauccccaccccaggauccuaaaucaugacuuaccugcuaauaaaaacucauuggaaaagugagaagaucuaaaaaaaaaaaaaaaaaaaaaaaaaaaaaaaaaaaaaaaaaaaaaaaaaaaaaaaaaaaaaaaaugcaucccccccccccccccccccccccccccccccaaaggcucuuuucagagccaccagaauu

SEQ ID NO: 3444 - RNA, 2061 nt, Artificial Sequence
  mRNA product Design h-5 comprising derived and/or modified sequence from HRSV(A2)__F_DSCav1_mut3 (opt3)
gggagagggcgcuuggcuugcaaggacccugagcugcggcauugaagcacacccaacccaacucgacugaagucagccucacugaaccggaucugagaaucuucucucucugggcuugccagggcucuccgaaccuagcuagcauccucuucaauuccaacuagaaagcuuaccauggagcugcucauccuuaaggccaacgcuauuaccacaauacugacugcagugacguucugcuuugccagcggccagaauaucaccgaagaguucuaccaauccacauguucugcggucucaaaaggguauuugggagcuuuaagaacugguugguacaccaguguuauuacaaucgaacugagcaacauuaaggagaucaaaugcaauggcaccgacgccaaggugaaacuaauaaagcaggaacucgauaaguauaaaaacgcaguaacugaccugcagcuucugaugcaguccacacccgccaccgggucuggaucggcuaucuguucaggcguggcagucugcaagguguugcaccucgagggugagguuaauaaaauuaagagcgcccugcugaguacgaacaaagcuguggucucccucucuaauggggugagcguauuaacuuuuaagguucuggaucuuaagaacuacaucgacaaacaauugcugccuauucuaaauaagcaguccuguucaaucccaaacauagaaaccgugauugaguuccagcagaaaaauaacaggcuccuggaaaucacacgggaguuuagugucaaugccggagugacuaccccggugagcacauauaugcuuaccaacucugagcuguugucccucauuaaugauaugcccaucacgaacgaccaaaagaaacugaugucaaacaauguccagaucguucgccagcagagcuacaguauuaugugcauaaucaaggaagagguguuagcguauguagugcaacugccucucuacggcgucauugauacuccauguuggaaacuucauacaucuccccugugcaccacuaacacaaaggaaggcuccaauaucuguuugacccgaacggaccgugggugguacugcgauaacgcaggaagcgugucguucuuuccucaggccgagaccuguaagguucagucuaauagaguguucugcgacacaaugaacucccuaacucugccaucagaagucaaucucugcaacguggauauauuuaaucccaaauaugacuguaagauuaugaccaguaaaacagauguaagcuccucuguuaucacuagccugggugcuaucgugucaugcuacggcaagaccaaauguacagccaguaacaagaauagggggauuaucaagaccuucuccaacggaugcgacuaugucagcaauaaaggcguggacacugucucuguggguaacacgcuuuacuguguuaauaagcaagaggggcagucacuguaugugaaaggagagccuauuauaaacuuuuacgauccauugguauucccgagugacgaauuugaugcaagcaucucccaggucaacgagaagauuaaucagucucucgcuuucauccggaaaucggacgaacuguuacacaacgugaaugccggcaagagcacaaccaacaucaugauuacuaccauaaucauuguuaucauugugauccugcuaucccucauagcggucggccugcuuuuguauugcaaggcccgcucaacacccgugacccugaguaaagaucaacucucugggaucaauaacauugcauucagcaauugaggacuaguacuggcugcaucucccuuuccucuguccuccauccuucucccaggauggugaagggggaccugguacccagugauccccaccccaggauccuaaaucaugacuuaccugcuaauaaaaacucauuggaaaagugagaagaucuaaaaaaaaaaaaaaaaaaaaaaaaaaaaaaaaaaaaaaaaaaaaaaaaaaaaaaaaaaaaaaaaugcaucccccccccccccccccccccccccccccccaaaggcucuuuucagagccaccagaauu

SEQ ID NO: 3445 - RNA, 2061 nt, Artificial Sequence
  mRNA product Design h-5 comprising derived and/or modified sequence from HRSV(A2)__F_DSCav1_mut3 (opt4)
gggagagggcgcuuggcuugcaaggacccugagcugcggcauugaagcacacccaacccaacucgacugaagucagccucacugaaccggaucugagaaucuucucucucugggcuugccagggcucuccgaaccuagcuagcauccucuucaauuccaacuagaaagcuuaccauggagcugcugauccugaaggccaacgccaucaccaccauccugaccgccgugaccuucugcuucgccagcggccagaacaucaccgaggaguucuaccagagcaccugcagcgccgugagcaagggcuaccugggcgcccugagaaccggcugguacaccagcgugaucaccaucgagcugagcaacaucaaggagaucaagugcaacggcaccgacgccaaggugaagcugaucaagcaggagcuggacaaguacaagaacgccgugaccgaccugcagcugcugaugcagagcacccccgccaccggcagcggcagcgccaucugcagcggcguggccgugugcaaggugcugcaccuggagggcgaggugaacaagaucaagagcgcccugcugagcaccaacaaggccguggugagccugagcaacggcgugagcgugcugaccuucaaggugcuggaccugaagaacuacaucgacaagcagcugcugcccauccugaacaagcagagcugcagcauccccaacaucgagaccgugaucgaguuccagcagaagaacaacagacugcuggagaucaccagagaguucagcgugaacgccggcgugaccacccccgugagcaccuacaugcugaccaacagcgagcugcugagccugaucaacgacaugcccaucaccaacgaccagaagaagcugaugagcaacaacgugcagaucgugagacagcagagcuacagcaucaugugcaucaucaaggaggaggugcuggccuacguggugcagcugccccuguacggcgugaucgacacccccugcuggaagcugcacaccagcccccugugcaccaccaacaccaaggagggcagcaacaucugccugaccagaaccgacagaggcugguacugcgacaacgccggcagcgugagcuucuucccccaggccgagaccugcaaggugcagagcaacagaguguucugcgacaccaugaacagccugacccugcccagcgaggugaaccugugcaacguggacaucuucaaccccaaguacgacugcaagaucaugaccagcaagaccgacgugagcagcagcgugaucaccagccugggcgccaucgugagcugcuacggcaagaccaagugcaccgccagcaacaagaacagaggcaucaucaagaccuucagcaacggcugcgacuacgugagcaacaagggcguggacaccgugagcgugggcaacacccuguacugcgugaacaagcaggagggccagagccuguacgugaagggcgagcccaucaucaacuucuacgacccccugguguuccccagcgacgaguucgacgccagcaucagccaggugaacgagaagaucaaccagagccuggccuucaucagaaagagcgacgagcugcugcacaacgugaacgccggcaagagcaccaccaacaucaugaucaccaccaucaucaucgugaucaucgugauccugcugagccugaucgccgugggccugcugcuguacugcaaggccagaagcacccccgugacccugagcaaggaccagcugagcggcaucaacaacaucgccuucagcaacugaggacuaguacuggcugcaucucccuuuccucuguccuccauccuucucccaggauggugaagggggaccugguacccagugauccccaccccaggauccuaaaucaugacuuaccugcuaauaaaaacucauuggaaaagugagaagaucuaaaaaaaaaaaaaaaaaaaaaaaaaaaaaaaaaaaaaaaaaaaaaaaaaaaaaaaaaaaaaaaaugcaucccccccccccccccccccccccccccccccaaaggcucuuuucagagccaccagaauu

SEQ ID NO: 3446 - RNA, 2061 nt, Artificial Sequence
  mRNA product Design h-5 comprising derived and/or modified sequence from HRSV(A2)__F_DSCav1_mut3 (opt5)
gggagagggcgcuuggcuugcaaggacccugagcugcggcauugaagcacacccaacccaacucgacugaagucagccucacugaaccggaucugagaaucuucucucucugggcuugccagggcucuccgaaccuagcuagcauccucuucaauuccaacuagaaagcuuaccauggagcugcucauccugaaggccaacgcuauuaccacaauccuuacggccgugaccuucugcuuugcgagcggccagaauauuacagaagaguucuaccaauccaccuguucugcugucagcaaaggguaucugggagcccucagaacaggcugguacaccuccguuaucacaauugaacugucuaacaucaaggagaucaaaugcaaugggaccgacgccaaggugaaacuuauuaagcaggaacuggauaaguauaaaaacgcugugacggaccuccagcugcugaugcagagcacccccgccacaggauccggcucugcuaucuguagcggggucgccgugugcaagguucuccaccuggagggagaggugaauaaaauuaaguccgcgcuucugagcaccaacaaagccgucgugucucucuccaauggcguuagcgugcugacauuuaagguccuugaucugaagaacuacaucgacaaacaacuccugccuauucugaauaagcagucuuguuccaucccgaacauugaaaccgugaucgaguuccagcagaaaaauaaccggcuccuggaaaucacgcgcgaguuuagcgugaaugcuggcgucacaacccccguuucuacauauaugcuuaccaacuccgagcugcucagccugauuaaugauaugccuaucaccaacgaccaaaagaaacuuauguccaacaaugugcagauugugagacagcagucuuacagcaucaugugcauuaucaaggaagagguccuggccuaugugguucaacucccccuguacggggugaucgauacaccuuguuggaaacugcauacgagcccccucugcaccacaaacaccaaggaaggauccaauauuugucugacacggaccgaccgcggcugguacugcgauaacgcugggucugucuccuucuuuccucaggccgagacguguaaggugcagagcaauagaguuuucugcgacacaaugaacucucuuacccugccgagcgaagugaaucucugcaacgucgauaucuuuaaucccaaauaugacuguaagauuaugaccuccaaaacagaugugucuagcuccgucaucaccagccugggagcgauugugucuugcuacggcaagacaaaauguacggccuccaacaagaaucgggggaucaucaagaccuucagcaacggaugcgacuauguuucuaauaaaggcguggacacagucuccgugggcaacacccuuuacuguguuaauaagcaagaggggcagagccuguaugugaaaggagagccuauuaucaacuuuuacgauccccucgucuucccuuccgacgaauuugaugcuucuauuagccaggugaacgagaagaucaaucagucccuggccuucauucgcaaaucugacgaacugcuccacaacgugaaugcuggcaagagcacaaccaacaucaugauuacgaccaucaucauuguuaucauugucauccugcuuucccugauugccguggggcuccugcuguauugcaaggccagaagcacacccgugacccuuucuaaagaucaacucuccggaaucaauaacaucgcuuucagcaauugaggacuaguacuggcugcaucucccuuuccucuguccuccauccuucucccaggauggugaagggggaccugguacccagugauccccaccccaggauccuaaaucaugacuuaccugcuaauaaaaacucauuggaaaagugagaagaucuaaaaaaaaaaaaaaaaaaaaaaaaaaaaaaaaaaaaaaaaaaaaaaaaaaaaaaaaaaaaaaaaugcaucccccccccccccccccccccccccccccccaaaggcucuuuucagagccaccagaauu

SEQ ID NO: 3447 - RNA, 2061 nt, Artificial Sequence
  mRNA product Design h-5 comprising derived and/or modified sequence from HRSV(A2)__F_DSCav1_mut3 (opt6)
gggagagggcgcuuggcuugcaaggacccugagcugcggcauugaagcacacccaacccaacucgacugaagucagccucacugaaccggaucugagaaucuucucucucugggcuugccagggcucuccgaaccuagcuagcauccucuucaauuccaacuagaaagcuuaccauggaauuacucauacuaaaagccaaugccauaaccacuauucuaacagcaguaacauucuguuucgccucaggacaaaacauaacagaagaauuuuaucaauccaccuguuccgcagucucgaaaggcuaccuuggcgcacuaagaaccggaugguauacaucaguaauaaccauugaacuaucaaauaucaaagaaauaaaaugcaacggaacugacgcaaaagucaaacuaauaaaacaagaauuagacaaauacaaaaacgccguuacagacuuacaacuacuaaugcaaucaacuccagcaacaggaucaggaucugcuauaugcucaggugucgccguauguaaaguguuacaccucgaaggcgaaguaaacaaaauaaaaucagcacuacuauccacaaauaaagcaguaguaucacuauccaaugguguaucaguacucacauucaaaguacuagacuuaaaaaauuauauagauaaacaauuacuaccaauauuaaacaaacaaucaugcucaauaccaaacauagaaaccgucauugaauuucaacaaaaaaacaaucgacuucuugaaauaacacgagaauuuucaguaaaugccggaguaacaaccccagucucaacauacauguuaaccaacucugaacuccuaagccuaaucaacgacaugcccauaacuaacgaccaaaaaaaacuaauguccaauaauguccaaauaguaagacaacaauccuacucaauaaugugcauuauaaaagaagaaguccucgccuauguaguacaacuacccuuauacggaguaauugacacaccauguuggaaacuacauacaucaccacuaugcaccacuaacacaaaagaaggcuccaacauaugccuaacccgaacagaucgcggaugguauugcgacaacgcaggaaguguauccuucuuuccacaagcagaaacaugcaaaguacaauccaacagaguauucugugacaccaugaacucucuaacacuaccuuccgaaguaaauuuaugcaacguagacauauuuaaucccaaauacgacuguaaaauaaugaccucaaaaacugaugucucaucaucagucauuacaucacucggagcaauagucaguugcuauggaaaaaccaaaugcacagcuaguaacaaaaacagggguauaauaaaaacauuuucaaacggaugcgauuacguaucaaauaaaggaguagacaccguauccguaggaaauacucucuacugcguaaacaaacaagaaggacaaucccuauacguaaaaggcgaaccaaucauuaacuuuuacgacccacuuguauuuccaucagacgaauuugaugccucaauaucccaagucaaugaaaaaauaaaccaaagucuagcauucauccgaaaaucagaugaacuuuuacacaacguaaacgccggaaaaucaacaacaaacaucaugaucacaacaaucaucauaguaauaauaguuauacuacuuuccuuaauagcagucggccuacuacucuacugcaaagcacgauccacaccaguaaccuuaucuaaagaccaacucucaggcauaaacaacauagcauucucaaacuaaggacuaguacuggcugcaucucccuuuccucuguccuccauccuucucccaggauggugaagggggaccugguacccagugauccccaccccaggauccuaaaucaugacuuaccugcuaauaaaaacucauuggaaaagugagaagaucuaaaaaaaaaaaaaaaaaaaaaaaaaaaaaaaaaaaaaaaaaaaaaaaaaaaaaaaaaaaaaaaaugcaucccccccccccccccccccccccccccccccaaaggcucuuuucagagccaccagaauu

SEQ ID NO: 3448 - RNA, 2061 nt, Artificial Sequence
  mRNA product Design h-5 comprising derived and/or modified sequence from HRSV(A2)__F_DSCav1_mut3 (opt11)
gggagagggcgcuuggcuugcaaggacccugagcugcggcauugaagcacacccaacccaacucgacugaagucagccucacugaaccggaucugagaaucuucucucucugggcuugccagggcucuccgaaccuagcuagcauccucuucaauuccaacuagaaagcuuaccauggaacuccucauccuuaaagcaaacgccaucacaaccauccucacagcagucacuuucugcuucgcauccggacaaaacaucacagaagaguucuaucaauccacgugcuccgcaguuuccaaaggauaccuuggagccuuacgaaccggcugguacaccuccgucaucaccauagaacucagcaacaucaaagaaaucaaaugcaacggaaccgacgcaaaagucaaacucaucaaacaagaacuagacaaauacaaaaacgcagucaccgaccuccaacuacucaugcaaucaacccccgcaaccggcuccggcuccgccaucugcuccggaguagccguaugcaaaguccuccaccucgaaggcgaaguuaacaagaucaaguccgcacuccuaucaaccaacaaagcagucgucucccuauccaacggcgucuccguauuaacauucaaaguccucgaccucaaaaacuacauagacaaacagcuacuccccauccuaaacaaacaauccugcuccauccccaacaucgaaacugucaucgaguuccaacagaaaaacaaccgccuccuagaaaucacccgagaguucuccguaaacgccggcgucacuacccccgucucuaccuauaugcuaaccaacucugaacuccuaucccuaaucaacgauaugcccauaacuaacgaccaaaagaaacuuauguccaacaacguacaaauaguccggcaacaaucauacucuaucaugugcaucaucaaagaagaaguacuugccuacguuguccaacucccacuauacggcgucauagacacuccaugcuggaaacuucacaccucaccccucugcaccacuaacacuaaagaaggcucuaacaucugccuuacccgcaccgaccgcggaugguacugcgacaacgcaggcucaguuagcuucuucccacaagccgaaaccugcaaaguccagucaaaccgugucuucugcgauaccaugaacucgcucacccucccuuccgaagucaaccucugcaacgucgacaucuucaaccccaaauacgacugcaaaaucaugaccucaaaaaccgacguaucuucuuccgucaucaccucccucggcgccaucguauccugcuacggcaaaaccaaaugcacugcaucaaacaaaaaccgaggcaucaucaaaaccuucucgaacggaugcgacuacguauccaacaagggcgucgacacagucuccguugguaacacccucuacugcgucaacaaacaagaaggccaaucccuauacguaaaaggcgaacccaucaucaacuucuacgacccccucgucuuccccagugacgaauuugacgccuccaucucccaagucaacgaaaagaucaaccaaucccuugccuucauacgcaaauccgacgaacuccuacacaacguuaacgccggaaaaucaacaaccaacaucaugaucacaaccaucauaaucgucauaaucgucauacuccucucccucauagccgucggccugcuauuguacuguaaagcccgcuccacaccagucacacuuucaaaagaccaacucuccgggaucaacaacaucgccuucuccaacuaaggacuaguacuggcugcaucucccuuuccucuguccuccauccuucucccaggauggugaagggggaccugguacccagugauccccaccccaggauccuaaaucaugacuuaccugcuaauaaaaacucauuggaaaagugagaagaucuaaaaaaaaaaaaaaaaaaaaaaaaaaaaaaaaaaaaaaaaaaaaaaaaaaaaaaaaaaaaaaaaugcaucccccccccccccccccccccccccccccccaaaggcucuuuucagagccaccagaauu

SEQ ID NO: 3449 - RNA, 1994 nt, Artificial Sequence
  mRNA product Design i-1 comprising derived and/or modified sequence from HRSV(A2)__F_DSCav1_mut3 (opt1)
gggagagggcgcuuggcuugcaaggacccugagcugcggcauugaagcacacccaacccaacucgacugaagucagccucacugaaccggaucugagaaucuucucucucugggcuugccagggcucuccgaaccuagcuagcauccucuucaauuccaacuagaaagcuuaccauggagcugcucauccugaaggccaacgccaucaccaccauccugacggcggugaccuucugcuucgccagcggccagaacaucaccgaggaguucuaccaguccacgugcagcgccgucuccaagggguaccucggcgcccugcggaccggcugguacaccuccgugaucaccaucgagcugagcaacaucaaggagaucaagugcaacgggaccgacgccaaggugaagcucaucaagcaggagcuggacaaguacaagaacgcggucacggaccugcagcuccugaugcaguccaccccggcaaccggcuccggcuccgccaucugcagcggcgucgccgugugcaaggugcugcaccucgagggggaggucaacaagaucaagagcgcccugcuguccaccaacaaggccguggugagccucuccaacggcgucagcgugcugaccuucaaggugcuggaccucaagaacuacaucgacaagcagcugcugcccauccugaacaagcagagcugcuccauccccaacaucgagacggugaucgaguuccagcagaagaacaaccggcuccuggagaucacccgcgaguucagcgugaacgccggggucaccacccccguguccacguacaugcugaccaacagcgagcuccugucccugaucaacgacaugccgaucaccaacgaccagaagaagcucaugagcaacaacgugcagaucguccggcagcaguccuacagcaucaugugcaucaucaaggaggaggugcuggcguacgugguccagcugccccucuacggcgugaucgacacccccugcuggaagcugcacacgagcccccugugcaccaccaacaccaaggagggguccaacaucugccucacgcgcaccgaccggggcugguacugcgacaacgccggcagcgucuccuucuucccgcaggccgagaccugcaaggugcagagcaaccgcguguucugcgacaccaugaacucccugacgcugcccagcgagguaaaccucugcaacgucgacaucuucaaccccaaguacgacugcaagaucaugaccuccaagaccgacgugagcuccagcgugaucaccucccugggggccaucgucagcugcuacggcaagacgaagugcaccgccagcaacaagaaccgggggaucaucaagaccuucuccaacggcugcgacuacgugagcaacaagggcguggacaccguguccgucgggaacacccuguacugcgugaacaagcaggagggccagagccucuacgugaagggggagcccaucaucaacuucuacgacccgcuggucuuccccuccgacgaguucgacgcgagcaucucccaggugaacgagaagaucaaccagagccuggccuucauccgcaaguccgacgagcugcuccacaacgugaacgccggcaagagcacgaccaacaucaugaucaccaccaucaucaucgucaucaucgugauccugcugucccucaucgccguggggcugcugcucuacugcaaggcccggagcacgcccgucacccuguccaaggaccagcugagcggcaucaacaacaucgcguucuccaacugaggacuaguguccaccugucccuccugggcugcuggauugucucguuuuccugccaaauaaacaggaucagcgcuuuacagaucuaaaaaaaaaaaaaaaaaaaaaaaaaaaaaaaaaaaaaaaaaaaaaaaaaaaaaaaaaaaaaaaaugcaucccccccccccccccccccccccccccccccaaaggcucuuuucagagccaccagaauu

SEQ ID NO: 3450 - RNA, 1994 nt, Artificial Sequence
  mRNA product Design i-1 comprising derived and/or modified sequence from HRSV(A2)__F_DSCav1_mut3 (opt1)
gggagagggcgcuuggcuugcaaggacccugagcugcggcauugaagcacacccaacccaacucgacugaagucagccucacugaaccggaucugagaaucuucucucucugggcuugccagggcucuccgaaccuagcuagcauccucuucaauuccaacuagaaagcuuaccauggagcugcucauccugaaggccaacgccaucaccaccauccugacggcggugaccuucugcuucgccagcggccagaacaucaccgaggaguucuaccaguccacgugcagcgccgucuccaagggguaccucggcgcccugcgcaccgggugguacaccagcgugaucaccaucgagcuguccaacaucaaggagaucaagugcaacggcaccgacgccaaggugaagcucaucaagcaggagcuggacaaguacaagaacgcggucacggaccugcagcuccugaugcagagcacccccgccaccggguccggcagcgccaucugcuccggcguggccgugugcaagguccugcaccucgagggggaggugaacaagaucaagagcgcgcugcuguccaccaacaaggccguggucagccucuccaacggcgugagcgugcugacguucaagguccuggaccucaagaacuacaucgacaagcagcugcugccgauccucaacaagcaguccugcagcauccccaacaucgagaccgugaucgaguuccagcagaagaacaaccggcugcuggagaucacccgcgaguucuccgugaacgccggggucaccacgcccgugagcaccuacaugcucaccaacuccgagcugcugagccucaucaacgacaugcccaucaccaacgaccagaagaagcugaugagcaacaacgugcagaucguccggcagcaguccuacagcaucaugugcaucaucaaggaggaggugcuggccuacgugguccagcucccgcuguacggcgugaucgacacgcccugcuggaagcugcacaccagcccccucugcaccaccaacacgaaggagggguccaacaucugccugacccgcaccgaccggggcugguacugcgacaacgccggcuccgugagcuucuucccccaggcggagaccugcaagguccaguccaaccgcguguucugcgacacgaugaacagccugacccucccguccgaggucaaccugugcaacguggacaucuucaaccccaaguacgacugcaagaucaugaccagcaagaccgacguguccagcuccgucaucacgagccugggggccaucguguccugcuacggcaagaccaagugcaccgccagcaacaagaaccgggggaucaucaagaccuucuccaacggcugcgacuacgugagcaacaagggcgucgacacgguguccguggggaacacccucuacugcgucaacaagcaggagggccagagccuguacgugaagggggagcccaucaucaacuucuacgacccccugguguucccgagcgacgaguucgacgccuccaucagccaggucaacgagaagaucaaccagucccucgccuucauccgcaagagcgacgagcugcugcacaacgugaacgcgggcaaguccaccaccaacaucaugaucaccacgaucaucaucgugaucaucgucauccuccugagccugaucgccguggggcuccugcuguacugcaaggcccgguccacccccgugacccugagcaaggaccagcucuccggcaucaacaacaucgccuucagcaacugaggacuaguguccaccugucccuccugggcugcuggauugucucguuuuccugccaaauaaacaggaucagcgcuuuacagaucuaaaaaaaaaaaaaaaaaaaaaaaaaaaaaaaaaaaaaaaaaaaaaaaaaaaaaaaaaaaaaaaaugcaucccccccccccccccccccccccccccccccaaaggcucuuuucagagccaccagaauu

SEQ ID NO: 3451 - RNA, 1994 nt, Artificial Sequence
  mRNA product Design i-1 comprising derived and/or modified sequence from HRSV(A2)__F_DSCav1_mut3 (opt2)
gggagagggcgcuuggcuugcaaggacccugagcugcggcauugaagcacacccaacccaacucgacugaagucagccucacugaaccggaucugagaaucuucucucucugggcuugccagggcucuccgaaccuagcuagcauccucuucaauuccaacuagaaagcuuaccauggagcuccucauccucaaggccaacgccaucaccaccauccucaccgccgucaccuucugcuucgccuccggccagaacaucaccgaggaguucuaccaguccaccugcuccgccgucuccaagggcuaccucggcgcccuccgcaccggcugguacaccuccgucaucaccaucgagcucuccaacaucaaggagaucaagugcaacggcaccgacgccaaggucaagcucaucaagcaggagcucgacaaguacaagaacgccgucaccgaccuccagcuccucaugcaguccacccccgccaccggcuccggcuccgccaucugcuccggcgucgccgucugcaagguccuccaccucgagggcgaggucaacaagaucaaguccgcccuccucuccaccaacaaggccgucgucucccucuccaacggcgucuccguccucaccuucaagguccucgaccucaagaacuacaucgacaagcagcuccuccccauccucaacaagcaguccugcuccauccccaacaucgagaccgucaucgaguuccagcagaagaacaaccgccuccucgagaucacccgcgaguucuccgucaacgccggcgucaccacccccgucuccaccuacaugcucaccaacuccgagcuccucucccucaucaacgacaugcccaucaccaacgaccagaagaagcucauguccaacaacguccagaucguccgccagcaguccuacuccaucaugugcaucaucaaggaggagguccucgccuacgucguccagcucccccucuacggcgucaucgacacccccugcuggaagcuccacaccuccccccucugcaccaccaacaccaaggagggcuccaacaucugccucacccgcaccgaccgcggcugguacugcgacaacgccggcuccgucuccuucuucccccaggccgagaccugcaagguccaguccaaccgcgucuucugcgacaccaugaacucccucacccuccccuccgaggucaaccucugcaacgucgacaucuucaaccccaaguacgacugcaagaucaugaccuccaagaccgacgucuccuccuccgucaucaccucccucggcgccaucgucuccugcuacggcaagaccaagugcaccgccuccaacaagaaccgcggcaucaucaagaccuucuccaacggcugcgacuacgucuccaacaagggcgucgacaccgucuccgucggcaacacccucuacugcgucaacaagcaggagggccagucccucuacgucaagggcgagcccaucaucaacuucuacgacccccucgucuuccccuccgacgaguucgacgccuccaucucccaggucaacgagaagaucaaccagucccucgccuucauccgcaaguccgacgagcuccuccacaacgucaacgccggcaaguccaccaccaacaucaugaucaccaccaucaucaucgucaucaucgucauccuccucucccucaucgccgucggccuccuccucuacugcaaggcccgcuccacccccgucacccucuccaaggaccagcucuccggcaucaacaacaucgccuucuccaacugaggacuaguguccaccugucccuccugggcugcuggauugucucguuuuccugccaaauaaacaggaucagcgcuuuacagaucuaaaaaaaaaaaaaaaaaaaaaaaaaaaaaaaaaaaaaaaaaaaaaaaaaaaaaaaaaaaaaaaaugcaucccccccccccccccccccccccccccccccaaaggcucuuuucagagccaccagaauu

SEQ ID NO: 3452 - RNA, 1994 nt, Artificial Sequence
  mRNA product Design i-1 comprising derived and/or modified sequence from HRSV(A2)__F_DSCav1_mut3 (opt3)
gggagagggcgcuuggcuugcaaggacccugagcugcggcauugaagcacacccaacccaacucgacugaagucagccucacugaaccggaucugagaaucuucucucucugggcuugccagggcucuccgaaccuagcuagcauccucuucaauuccaacuagaaagcuuaccauggagcugcucauccuuaaggccaacgcuauuaccacaauacugacugcagugacguucugcuuugccagcggccagaauaucaccgaagaguucuaccaauccacauguucugcggucucaaaaggguauuugggagcuuuaagaacugguugguacaccaguguuauuacaaucgaacugagcaacauuaaggagaucaaaugcaauggcaccgacgccaaggugaaacuaauaaagcaggaacucgauaaguauaaaaacgcaguaacugaccugcagcuucugaugcaguccacacccgccaccgggucuggaucggcuaucuguucaggcguggcagucugcaagguguugcaccucgagggugagguuaauaaaauuaagagcgcccugcugaguacgaacaaagcuguggucucccucucuaauggggugagcguauuaacuuuuaagguucuggaucuuaagaacuacaucgacaaacaauugcugccuauucuaaauaagcaguccuguucaaucccaaacauagaaaccgugauugaguuccagcagaaaaauaacaggcuccuggaaaucacacgggaguuuagugucaaugccggagugacuaccccggugagcacauauaugcuuaccaacucugagcuguugucccucauuaaugauaugcccaucacgaacgaccaaaagaaacugaugucaaacaauguccagaucguucgccagcagagcuacaguauuaugugcauaaucaaggaagagguguuagcguauguagugcaacugccucucuacggcgucauugauacuccauguuggaaacuucauacaucuccccugugcaccacuaacacaaaggaaggcuccaauaucuguuugacccgaacggaccgugggugguacugcgauaacgcaggaagcgugucguucuuuccucaggccgagaccuguaagguucagucuaauagaguguucugcgacacaaugaacucccuaacucugccaucagaagucaaucucugcaacguggauauauuuaaucccaaauaugacuguaagauuaugaccaguaaaacagauguaagcuccucuguuaucacuagccugggugcuaucgugucaugcuacggcaagaccaaauguacagccaguaacaagaauagggggauuaucaagaccuucuccaacggaugcgacuaugucagcaauaaaggcguggacacugucucuguggguaacacgcuuuacuguguuaauaagcaagaggggcagucacuguaugugaaaggagagccuauuauaaacuuuuacgauccauugguauucccgagugacgaauuugaugcaagcaucucccaggucaacgagaagauuaaucagucucucgcuuucauccggaaaucggacgaacuguuacacaacgugaaugccggcaagagcacaaccaacaucaugauuacuaccauaaucauuguuaucauugugauccugcuaucccucauagcggucggccugcuuuuguauugcaaggcccgcucaacacccgugacccugaguaaagaucaacucucugggaucaauaacauugcauucagcaauugaggacuaguguccaccugucccuccugggcugcuggauugucucguuuuccugccaaauaaacaggaucagcgcuuuacagaucuaaaaaaaaaaaaaaaaaaaaaaaaaaaaaaaaaaaaaaaaaaaaaaaaaaaaaaaaaaaaaaaaugcaucccccccccccccccccccccccccccccccaaaggcucuuuucagagccaccagaauu

SEQ ID NO: 3453 - RNA, 1994 nt, Artificial Sequence
  mRNA product Design i-1 comprising derived and/or modified sequence from HRSV(A2)__F_DSCav1_mut3 (opt4)
gggagagggcgcuuggcuugcaaggacccugagcugcggcauugaagcacacccaacccaacucgacugaagucagccucacugaaccggaucugagaaucuucucucucugggcuugccagggcucuccgaaccuagcuagcauccucuucaauuccaacuagaaagcuuaccauggagcugcugauccugaaggccaacgccaucaccaccauccugaccgccgugaccuucugcuucgccagcggccagaacaucaccgaggaguucuaccagagcaccugcagcgccgugagcaagggcuaccugggcgcccugagaaccggcugguacaccagcgugaucaccaucgagcugagcaacaucaaggagaucaagugcaacggcaccgacgccaaggugaagcugaucaagcaggagcuggacaaguacaagaacgccgugaccgaccugcagcugcugaugcagagcacccccgccaccggcagcggcagcgccaucugcagcggcguggccgugugcaaggugcugcaccuggagggcgaggugaacaagaucaagagcgcccugcugagcaccaacaaggccguggugagccugagcaacggcgugagcgugcugaccuucaaggugcuggaccugaagaacuacaucgacaagcagcugcugcccauccugaacaagcagagcugcagcauccccaacaucgagaccgugaucgaguuccagcagaagaacaacagacugcuggagaucaccagagaguucagcgugaacgccggcgugaccacccccgugagcaccuacaugcugaccaacagcgagcugcugagccugaucaacgacaugcccaucaccaacgaccagaagaagcugaugagcaacaacgugcagaucgugagacagcagagcuacagcaucaugugcaucaucaaggaggaggugcuggccuacguggugcagcugccccuguacggcgugaucgacacccccugcuggaagcugcacaccagcccccugugcaccaccaacaccaaggagggcagcaacaucugccugaccagaaccgacagaggcugguacugcgacaacgccggcagcgugagcuucuucccccaggccgagaccugcaaggugcagagcaacagaguguucugcgacaccaugaacagccugacccugcccagcgaggugaaccugugcaacguggacaucuucaaccccaaguacgacugcaagaucaugaccagcaagaccgacgugagcagcagcgugaucaccagccugggcgccaucgugagcugcuacggcaagaccaagugcaccgccagcaacaagaacagaggcaucaucaagaccuucagcaacggcugcgacuacgugagcaacaagggcguggacaccgugagcgugggcaacacccuguacugcgugaacaagcaggagggccagagccuguacgugaagggcgagcccaucaucaacuucuacgacccccugguguuccccagcgacgaguucgacgccagcaucagccaggugaacgagaagaucaaccagagccuggccuucaucagaaagagcgacgagcugcugcacaacgugaacgccggcaagagcaccaccaacaucaugaucaccaccaucaucaucgugaucaucgugauccugcugagccugaucgccgugggccugcugcuguacugcaaggccagaagcacccccgugacccugagcaaggaccagcugagcggcaucaacaacaucgccuucagcaacugaggacuaguguccaccugucccuccugggcugcuggauugucucguuuuccugccaaauaaacaggaucagcgcuuuacagaucuaaaaaaaaaaaaaaaaaaaaaaaaaaaaaaaaaaaaaaaaaaaaaaaaaaaaaaaaaaaaaaaaugcaucccccccccccccccccccccccccccccccaaaggcucuuuucagagccaccagaauu

SEQ ID NO: 3454 - RNA, 1994 nt, Artificial Sequence
  mRNA product Design i-1 comprising derived and/or modified sequence from HRSV(A2)__F_DSCav1_mut3 (opt5)
gggagagggcgcuuggcuugcaaggacccugagcugcggcauugaagcacacccaacccaacucgacugaagucagccucacugaaccggaucugagaaucuucucucucugggcuugccagggcucuccgaaccuagcuagcauccucuucaauuccaacuagaaagcuuaccauggagcugcucauccugaaggccaacgcuauuaccacaauccuuacggccgugaccuucugcuuugcgagcggccagaauauuacagaagaguucuaccaauccaccuguucugcugucagcaaaggguaucugggagcccucagaacaggcugguacaccuccguuaucacaauugaacugucuaacaucaaggagaucaaaugcaaugggaccgacgccaaggugaaacuuauuaagcaggaacuggauaaguauaaaaacgcugugacggaccuccagcugcugaugcagagcacccccgccacaggauccggcucugcuaucuguagcggggucgccgugugcaagguucuccaccuggagggagaggugaauaaaauuaaguccgcgcuucugagcaccaacaaagccgucgugucucucuccaauggcguuagcgugcugacauuuaagguccuugaucugaagaacuacaucgacaaacaacuccugccuauucugaauaagcagucuuguuccaucccgaacauugaaaccgugaucgaguuccagcagaaaaauaaccggcuccuggaaaucacgcgcgaguuuagcgugaaugcuggcgucacaacccccguuucuacauauaugcuuaccaacuccgagcugcucagccugauuaaugauaugccuaucaccaacgaccaaaagaaacuuauguccaacaaugugcagauugugagacagcagucuuacagcaucaugugcauuaucaaggaagagguccuggccuaugugguucaacucccccuguacggggugaucgauacaccuuguuggaaacugcauacgagcccccucugcaccacaaacaccaaggaaggauccaauauuugucugacacggaccgaccgcggcugguacugcgauaacgcugggucugucuccuucuuuccucaggccgagacguguaaggugcagagcaauagaguuuucugcgacacaaugaacucucuuacccugccgagcgaagugaaucucugcaacgucgauaucuuuaaucccaaauaugacuguaagauuaugaccuccaaaacagaugugucuagcuccgucaucaccagccugggagcgauugugucuugcuacggcaagacaaaauguacggccuccaacaagaaucgggggaucaucaagaccuucagcaacggaugcgacuauguuucuaauaaaggcguggacacagucuccgugggcaacacccuuuacuguguuaauaagcaagaggggcagagccuguaugugaaaggagagccuauuaucaacuuuuacgauccccucgucuucccuuccgacgaauuugaugcuucuauuagccaggugaacgagaagaucaaucagucccuggccuucauucgcaaaucugacgaacugcuccacaacgugaaugcuggcaagagcacaaccaacaucaugauuacgaccaucaucauuguuaucauugucauccugcuuucccugauugccguggggcuccugcuguauugcaaggccagaagcacacccgugacccuuucuaaagaucaacucuccggaaucaauaacaucgcuuucagcaauugaggacuaguguccaccugucccuccugggcugcuggauugucucguuuuccugccaaauaaacaggaucagcgcuuuacagaucuaaaaaaaaaaaaaaaaaaaaaaaaaaaaaaaaaaaaaaaaaaaaaaaaaaaaaaaaaaaaaaaaugcaucccccccccccccccccccccccccccccccaaaggcucuuuucagagccaccagaauu

SEQ ID NO: 3455 - RNA, 1994 nt, Artificial Sequence
  mRNA product Design i-1 comprising derived and/or modified sequence from HRSV(A2)__F_DSCav1_mut3 (opt6)
gggagagggcgcuuggcuugcaaggacccugagcugcggcauugaagcacacccaacccaacucgacugaagucagccucacugaaccggaucugagaaucuucucucucugggcuugccagggcucuccgaaccuagcuagcauccucuucaauuccaacuagaaagcuuaccauggaauuacucauacuaaaagccaaugccauaaccacuauucuaacagcaguaacauucuguuucgccucaggacaaaacauaacagaagaauuuuaucaauccaccuguuccgcagucucgaaaggcuaccuuggcgcacuaagaaccggaugguauacaucaguaauaaccauugaacuaucaaauaucaaagaaauaaaaugcaacggaacugacgcaaaagucaaacuaauaaaacaagaauuagacaaauacaaaaacgccguuacagacuuacaacuacuaaugcaaucaacuccagcaacaggaucaggaucugcuauaugcucaggugucgccguauguaaaguguuacaccucgaaggcgaaguaaacaaaauaaaaucagcacuacuauccacaaauaaagcaguaguaucacuauccaaugguguaucaguacucacauucaaaguacuagacuuaaaaaauuauauagauaaacaauuacuaccaauauuaaacaaacaaucaugcucaauaccaaacauagaaaccgucauugaauuucaacaaaaaaacaaucgacuucuugaaauaacacgagaauuuucaguaaaugccggaguaacaaccccagucucaacauacauguuaaccaacucugaacuccuaagccuaaucaacgacaugcccauaacuaacgaccaaaaaaaacuaauguccaauaauguccaaauaguaagacaacaauccuacucaauaaugugcauuauaaaagaagaaguccucgccuauguaguacaacuacccuuauacggaguaauugacacaccauguuggaaacuacauacaucaccacuaugcaccacuaacacaaaagaaggcuccaacauaugccuaacccgaacagaucgcggaugguauugcgacaacgcaggaaguguauccuucuuuccacaagcagaaacaugcaaaguacaauccaacagaguauucugugacaccaugaacucucuaacacuaccuuccgaaguaaauuuaugcaacguagacauauuuaaucccaaauacgacuguaaaauaaugaccucaaaaacugaugucucaucaucagucauuacaucacucggagcaauagucaguugcuauggaaaaaccaaaugcacagcuaguaacaaaaacagggguauaauaaaaacauuuucaaacggaugcgauuacguaucaaauaaaggaguagacaccguauccguaggaaauacucucuacugcguaaacaaacaagaaggacaaucccuauacguaaaaggcgaaccaaucauuaacuuuuacgacccacuuguauuuccaucagacgaauuugaugccucaauaucccaagucaaugaaaaaauaaaccaaagucuagcauucauccgaaaaucagaugaacuuuuacacaacguaaacgccggaaaaucaacaacaaacaucaugaucacaacaaucaucauaguaauaauaguuauacuacuuuccuuaauagcagucggccuacuacucuacugcaaagcacgauccacaccaguaaccuuaucuaaagaccaacucucaggcauaaacaacauagcauucucaaacuaaggacuaguguccaccugucccuccugggcugcuggauugucucguuuuccugccaaauaaacaggaucagcgcuuuacagaucuaaaaaaaaaaaaaaaaaaaaaaaaaaaaaaaaaaaaaaaaaaaaaaaaaaaaaaaaaaaaaaaaugcaucccccccccccccccccccccccccccccccaaaggcucuuuucagagccaccagaauu

SEQ ID NO: 3456 - RNA, 1994 nt, Artificial Sequence
  mRNA product Design i-1 comprising derived and/or modified sequence from HRSV(A2)__F_DSCav1_mut3 (opt11)
gggagagggcgcuuggcuugcaaggacccugagcugcggcauugaagcacacccaacccaacucgacugaagucagccucacugaaccggaucugagaaucuucucucucugggcuugccagggcucuccgaaccuagcuagcauccucuucaauuccaacuagaaagcuuaccauggaacuccucauccuuaaagcaaacgccaucacaaccauccucacagcagucacuuucugcuucgcauccggacaaaacaucacagaagaguucuaucaauccacgugcuccgcaguuuccaaaggauaccuuggagccuuacgaaccggcugguacaccuccgucaucaccauagaacucagcaacaucaaagaaaucaaaugcaacggaaccgacgcaaaagucaaacucaucaaacaagaacuagacaaauacaaaaacgcagucaccgaccuccaacuacucaugcaaucaacccccgcaaccggcuccggcuccgccaucugcuccggaguagccguaugcaaaguccuccaccucgaaggcgaaguuaacaagaucaaguccgcacuccuaucaaccaacaaagcagucgucucccuauccaacggcgucuccguauuaacauucaaaguccucgaccucaaaaacuacauagacaaacagcuacuccccauccuaaacaaacaauccugcuccauccccaacaucgaaacugucaucgaguuccaacagaaaaacaaccgccuccuagaaaucacccgagaguucuccguaaacgccggcgucacuacccccgucucuaccuauaugcuaaccaacucugaacuccuaucccuaaucaacgauaugcccauaacuaacgaccaaaagaaacuuauguccaacaacguacaaauaguccggcaacaaucauacucuaucaugugcaucaucaaagaagaaguacuugccuacguuguccaacucccacuauacggcgucauagacacuccaugcuggaaacuucacaccucaccccucugcaccacuaacacuaaagaaggcucuaacaucugccuuacccgcaccgaccgcggaugguacugcgacaacgcaggcucaguuagcuucuucccacaagccgaaaccugcaaaguccagucaaaccgugucuucugcgauaccaugaacucgcucacccucccuuccgaagucaaccucugcaacgucgacaucuucaaccccaaauacgacugcaaaaucaugaccucaaaaaccgacguaucuucuuccgucaucaccucccucggcgccaucguauccugcuacggcaaaaccaaaugcacugcaucaaacaaaaaccgaggcaucaucaaaaccuucucgaacggaugcgacuacguauccaacaagggcgucgacacagucuccguugguaacacccucuacugcgucaacaaacaagaaggccaaucccuauacguaaaaggcgaacccaucaucaacuucuacgacccccucgucuuccccagugacgaauuugacgccuccaucucccaagucaacgaaaagaucaaccaaucccuugccuucauacgcaaauccgacgaacuccuacacaacguuaacgccggaaaaucaacaaccaacaucaugaucacaaccaucauaaucgucauaaucgucauacuccucucccucauagccgucggccugcuauuguacuguaaagcccgcuccacaccagucacacuuucaaaagaccaacucuccgggaucaacaacaucgccuucuccaacuaaggacuaguguccaccugucccuccugggcugcuggauugucucguuuuccugccaaauaaacaggaucagcgcuuuacagaucuaaaaaaaaaaaaaaaaaaaaaaaaaaaaaaaaaaaaaaaaaaaaaaaaaaaaaaaaaaaaaaaaugcaucccccccccccccccccccccccccccccccaaaggcucuuuucagagccaccagaauu

SEQ ID NO: 3457 - RNA, 1994 nt, Artificial Sequence
  mRNA product Design i-2 comprising derived and/or modified sequence from HRSV(A2)__F_DSCav1_mut3 (opt1)
gggagaggcgcugccuacggagguggcagccaucuccuucucggcaucaagcuuaccauggagcugcucauccugaaggccaacgccaucaccaccauccugacggcggugaccuucugcuucgccagcggccagaacaucaccgaggaguucuaccaguccacgugcagcgccgucuccaagggguaccucggcgcccugcggaccggcugguacaccuccgugaucaccaucgagcugagcaacaucaaggagaucaagugcaacgggaccgacgccaaggugaagcucaucaagcaggagcuggacaaguacaagaacgcggucacggaccugcagcuccugaugcaguccaccccggcaaccggcuccggcuccgccaucugcagcggcgucgccgugugcaaggugcugcaccucgagggggaggucaacaagaucaagagcgcccugcuguccaccaacaaggccguggugagccucuccaacggcgucagcgugcugaccuucaaggugcuggaccucaagaacuacaucgacaagcagcugcugcccauccugaacaagcagagcugcuccauccccaacaucgagacggugaucgaguuccagcagaagaacaaccggcuccuggagaucacccgcgaguucagcgugaacgccggggucaccacccccguguccacguacaugcugaccaacagcgagcuccugucccugaucaacgacaugccgaucaccaacgaccagaagaagcucaugagcaacaacgugcagaucguccggcagcaguccuacagcaucaugugcaucaucaaggaggaggugcuggcguacgugguccagcugccccucuacggcgugaucgacacccccugcuggaagcugcacacgagcccccugugcaccaccaacaccaaggagggguccaacaucugccucacgcgcaccgaccggggcugguacugcgacaacgccggcagcgucuccuucuucccgcaggccgagaccugcaaggugcagagcaaccgcguguucugcgacaccaugaacucccugacgcugcccagcgagguaaaccucugcaacgucgacaucuucaaccccaaguacgacugcaagaucaugaccuccaagaccgacgugagcuccagcgugaucaccucccugggggccaucgucagcugcuacggcaagacgaagugcaccgccagcaacaagaaccgggggaucaucaagaccuucuccaacggcugcgacuacgugagcaacaagggcguggacaccguguccgucgggaacacccuguacugcgugaacaagcaggagggccagagccucuacgugaagggggagcccaucaucaacuucuacgacccgcuggucuuccccuccgacgaguucgacgcgagcaucucccaggugaacgagaagaucaaccagagccuggccuucauccgcaaguccgacgagcugcuccacaacgugaacgccggcaagagcacgaccaacaucaugaucaccaccaucaucaucgucaucaucgugauccugcugucccucaucgccguggggcugcugcucuacugcaaggcccggagcacgcccgucacccuguccaaggaccagcugagcggcaucaacaacaucgcguucuccaacugaggacuagugcaucacauuuaaaagcaucucagccuaccaugagaauaagagaaagaaaaugaagaucaauagcuuauucaucucuuuuucuuuuucguugguguaaagccaacacccugucuaaaaaacauaaauuucuuuaaucauuuugccucuuuucucugugcuucaauuaauaaaaaauggaaagaaccuagaucuaaaaaaaaaaaaaaaaaaaaaaaaaaaaaaaaaaaaaaaaaaaaaaaaaaaaaaaaaaaaaaaaugcaucccccccccccccccccccccccccccccccaaaggcucuuuucagagccaccagaauu

SEQ ID NO: 3458 - RNA, 1994 nt, Artificial Sequence
  mRNA product Design i-2 comprising derived and/or modified sequence from HRSV(A2)__F_DSCav1_mut3 (opt1)
gggagaggcgcugccuacggagguggcagccaucuccuucucggcaucaagcuuaccauggagcugcucauccugaaggccaacgccaucaccaccauccugacggcggugaccuucugcuucgccagcggccagaacaucaccgaggaguucuaccaguccacgugcagcgccgucuccaagggguaccucggcgcccugcgcaccgggugguacaccagcgugaucaccaucgagcuguccaacaucaaggagaucaagugcaacggcaccgacgccaaggugaagcucaucaagcaggagcuggacaaguacaagaacgcggucacggaccugcagcuccugaugcagagcacccccgccaccggguccggcagcgccaucugcuccggcguggccgugugcaagguccugcaccucgagggggaggugaacaagaucaagagcgcgcugcuguccaccaacaaggccguggucagccucuccaacggcgugagcgugcugacguucaagguccuggaccucaagaacuacaucgacaagcagcugcugccgauccucaacaagcaguccugcagcauccccaacaucgagaccgugaucgaguuccagcagaagaacaaccggcugcuggagaucacccgcgaguucuccgugaacgccggggucaccacgcccgugagcaccuacaugcucaccaacuccgagcugcugagccucaucaacgacaugcccaucaccaacgaccagaagaagcugaugagcaacaacgugcagaucguccggcagcaguccuacagcaucaugugcaucaucaaggaggaggugcuggccuacgugguccagcucccgcuguacggcgugaucgacacgcccugcuggaagcugcacaccagcccccucugcaccaccaacacgaaggagggguccaacaucugccugacccgcaccgaccggggcugguacugcgacaacgccggcuccgugagcuucuucccccaggcggagaccugcaagguccaguccaaccgcguguucugcgacacgaugaacagccugacccucccguccgaggucaaccugugcaacguggacaucuucaaccccaaguacgacugcaagaucaugaccagcaagaccgacguguccagcuccgucaucacgagccugggggccaucguguccugcuacggcaagaccaagugcaccgccagcaacaagaaccgggggaucaucaagaccuucuccaacggcugcgacuacgugagcaacaagggcgucgacacgguguccguggggaacacccucuacugcgucaacaagcaggagggccagagccuguacgugaagggggagcccaucaucaacuucuacgacccccugguguucccgagcgacgaguucgacgccuccaucagccaggucaacgagaagaucaaccagucccucgccuucauccgcaagagcgacgagcugcugcacaacgugaacgcgggcaaguccaccaccaacaucaugaucaccacgaucaucaucgugaucaucgucauccuccugagccugaucgccguggggcuccugcuguacugcaaggcccgguccacccccgugacccugagcaaggaccagcucuccggcaucaacaacaucgccuucagcaacugaggacuagugcaucacauuuaaaagcaucucagccuaccaugagaauaagagaaagaaaaugaagaucaauagcuuauucaucucuuuuucuuuuucguugguguaaagccaacacccugucuaaaaaacauaaauuucuuuaaucauuuugccucuuuucucugugcuucaauuaauaaaaaauggaaagaaccuagaucuaaaaaaaaaaaaaaaaaaaaaaaaaaaaaaaaaaaaaaaaaaaaaaaaaaaaaaaaaaaaaaaaugcaucccccccccccccccccccccccccccccccaaaggcucuuuucagagccaccagaauu

SEQ ID NO: 3459 - RNA, 1994 nt, Artificial Sequence
  mRNA product Design i-2 comprising derived and/or modified sequence from HRSV(A2)__F_DSCav1_mut3 (opt2)
gggagaggcgcugccuacggagguggcagccaucuccuucucggcaucaagcuuaccauggagcuccucauccucaaggccaacgccaucaccaccauccucaccgccgucaccuucugcuucgccuccggccagaacaucaccgaggaguucuaccaguccaccugcuccgccgucuccaagggcuaccucggcgcccuccgcaccggcugguacaccuccgucaucaccaucgagcucuccaacaucaaggagaucaagugcaacggcaccgacgccaaggucaagcucaucaagcaggagcucgacaaguacaagaacgccgucaccgaccuccagcuccucaugcaguccacccccgccaccggcuccggcuccgccaucugcuccggcgucgccgucugcaagguccuccaccucgagggcgaggucaacaagaucaaguccgcccuccucuccaccaacaaggccgucgucucccucuccaacggcgucuccguccucaccuucaagguccucgaccucaagaacuacaucgacaagcagcuccuccccauccucaacaagcaguccugcuccauccccaacaucgagaccgucaucgaguuccagcagaagaacaaccgccuccucgagaucacccgcgaguucuccgucaacgccggcgucaccacccccgucuccaccuacaugcucaccaacuccgagcuccucucccucaucaacgacaugcccaucaccaacgaccagaagaagcucauguccaacaacguccagaucguccgccagcaguccuacuccaucaugugcaucaucaaggaggagguccucgccuacgucguccagcucccccucuacggcgucaucgacacccccugcuggaagcuccacaccuccccccucugcaccaccaacaccaaggagggcuccaacaucugccucacccgcaccgaccgcggcugguacugcgacaacgccggcuccgucuccuucuucccccaggccgagaccugcaagguccaguccaaccgcgucuucugcgacaccaugaacucccucacccuccccuccgaggucaaccucugcaacgucgacaucuucaaccccaaguacgacugcaagaucaugaccuccaagaccgacgucuccuccuccgucaucaccucccucggcgccaucgucuccugcuacggcaagaccaagugcaccgccuccaacaagaaccgcggcaucaucaagaccuucuccaacggcugcgacuacgucuccaacaagggcgucgacaccgucuccgucggcaacacccucuacugcgucaacaagcaggagggccagucccucuacgucaagggcgagcccaucaucaacuucuacgacccccucgucuuccccuccgacgaguucgacgccuccaucucccaggucaacgagaagaucaaccagucccucgccuucauccgcaaguccgacgagcuccuccacaacgucaacgccggcaaguccaccaccaacaucaugaucaccaccaucaucaucgucaucaucgucauccuccucucccucaucgccgucggccuccuccucuacugcaaggcccgcuccacccccgucacccucuccaaggaccagcucuccggcaucaacaacaucgccuucuccaacugaggacuagugcaucacauuuaaaagcaucucagccuaccaugagaauaagagaaagaaaaugaagaucaauagcuuauucaucucuuuuucuuuuucguugguguaaagccaacacccugucuaaaaaacauaaauuucuuuaaucauuuugccucuuuucucugugcuucaauuaauaaaaaauggaaagaaccuagaucuaaaaaaaaaaaaaaaaaaaaaaaaaaaaaaaaaaaaaaaaaaaaaaaaaaaaaaaaaaaaaaaaugcaucccccccccccccccccccccccccccccccaaaggcucuuuucagagccaccagaauu

SEQ ID NO: 3460 - RNA, 1994 nt, Artificial Sequence
  mRNA product Design i-2 comprising derived and/or modified sequence from HRSV(A2)__F_DSCav1_mut3 (opt3)
gggagaggcgcugccuacggagguggcagccaucuccuucucggcaucaagcuuaccauggagcugcucauccuuaaggccaacgcuauuaccacaauacugacugcagugacguucugcuuugccagcggccagaauaucaccgaagaguucuaccaauccacauguucugcggucucaaaaggguauuugggagcuuuaagaacugguugguacaccaguguuauuacaaucgaacugagcaacauuaaggagaucaaaugcaauggcaccgacgccaaggugaaacuaauaaagcaggaacucgauaaguauaaaaacgcaguaacugaccugcagcuucugaugcaguccacacccgccaccgggucuggaucggcuaucuguucaggcguggcagucugcaagguguugcaccucgagggugagguuaauaaaauuaagagcgcccugcugaguacgaacaaagcuguggucucccucucuaauggggugagcguauuaacuuuuaagguucuggaucuuaagaacuacaucgacaaacaauugcugccuauucuaaauaagcaguccuguucaaucccaaacauagaaaccgugauugaguuccagcagaaaaauaacaggcuccuggaaaucacacgggaguuuagugucaaugccggagugacuaccccggugagcacauauaugcuuaccaacucugagcuguugucccucauuaaugauaugcccaucacgaacgaccaaaagaaacugaugucaaacaauguccagaucguucgccagcagagcuacaguauuaugugcauaaucaaggaagagguguuagcguauguagugcaacugccucucuacggcgucauugauacuccauguuggaaacuucauacaucuccccugugcaccacuaacacaaaggaaggcuccaauaucuguuugacccgaacggaccgugggugguacugcgauaacgcaggaagcgugucguucuuuccucaggccgagaccuguaagguucagucuaauagaguguucugcgacacaaugaacucccuaacucugccaucagaagucaaucucugcaacguggauauauuuaaucccaaauaugacuguaagauuaugaccaguaaaacagauguaagcuccucuguuaucacuagccugggugcuaucgugucaugcuacggcaagaccaaauguacagccaguaacaagaauagggggauuaucaagaccuucuccaacggaugcgacuaugucagcaauaaaggcguggacacugucucuguggguaacacgcuuuacuguguuaauaagcaagaggggcagucacuguaugugaaaggagagccuauuauaaacuuuuacgauccauugguauucccgagugacgaauuugaugcaagcaucucccaggucaacgagaagauuaaucagucucucgcuuucauccggaaaucggacgaacuguuacacaacgugaaugccggcaagagcacaaccaacaucaugauuacuaccauaaucauuguuaucauugugauccugcuaucccucauagcggucggccugcuuuuguauugcaaggcccgcucaacacccgugacccugaguaaagaucaacucucugggaucaauaacauugcauucagcaauugaggacuagugcaucacauuuaaaagcaucucagccuaccaugagaauaagagaaagaaaaugaagaucaauagcuuauucaucucuuuuucuuuuucguugguguaaagccaacacccugucuaaaaaacauaaauuucuuuaaucauuuugccucuuuucucugugcuucaauuaauaaaaaauggaaagaaccuagaucuaaaaaaaaaaaaaaaaaaaaaaaaaaaaaaaaaaaaaaaaaaaaaaaaaaaaaaaaaaaaaaaaugcaucccccccccccccccccccccccccccccccaaaggcucuuuucagagccaccagaauu

SEQ ID NO: 3461 - RNA, 1994 nt, Artificial Sequence
  mRNA product Design i-2 comprising derived and/or modified sequence from HRSV(A2)__F_DSCav1_mut3 (opt4)
gggagaggcgcugccuacggagguggcagccaucuccuucucggcaucaagcuuaccauggagcugcugauccugaaggccaacgccaucaccaccauccugaccgccgugaccuucugcuucgccagcggccagaacaucaccgaggaguucuaccagagcaccugcagcgccgugagcaagggcuaccugggcgcccugagaaccggcugguacaccagcgugaucaccaucgagcugagcaacaucaaggagaucaagugcaacggcaccgacgccaaggugaagcugaucaagcaggagcuggacaaguacaagaacgccgugaccgaccugcagcugcugaugcagagcacccccgccaccggcagcggcagcgccaucugcagcggcguggccgugugcaaggugcugcaccuggagggcgaggugaacaagaucaagagcgcccugcugagcaccaacaaggccguggugagccugagcaacggcgugagcgugcugaccuucaaggugcuggaccugaagaacuacaucgacaagcagcugcugcccauccugaacaagcagagcugcagcauccccaacaucgagaccgugaucgaguuccagcagaagaacaacagacugcuggagaucaccagagaguucagcgugaacgccggcgugaccacccccgugagcaccuacaugcugaccaacagcgagcugcugagccugaucaacgacaugcccaucaccaacgaccagaagaagcugaugagcaacaacgugcagaucgugagacagcagagcuacagcaucaugugcaucaucaaggaggaggugcuggccuacguggugcagcugccccuguacggcgugaucgacacccccugcuggaagcugcacaccagcccccugugcaccaccaacaccaaggagggcagcaacaucugccugaccagaaccgacagaggcugguacugcgacaacgccggcagcgugagcuucuucccccaggccgagaccugcaaggugcagagcaacagaguguucugcgacaccaugaacagccugacccugcccagcgaggugaaccugugcaacguggacaucuucaaccccaaguacgacugcaagaucaugaccagcaagaccgacgugagcagcagcgugaucaccagccugggcgccaucgugagcugcuacggcaagaccaagugcaccgccagcaacaagaacagaggcaucaucaagaccuucagcaacggcugcgacuacgugagcaacaagggcguggacaccgugagcgugggcaacacccuguacugcgugaacaagcaggagggccagagccuguacgugaagggcgagcccaucaucaacuucuacgacccccugguguuccccagcgacgaguucgacgccagcaucagccaggugaacgagaagaucaaccagagccuggccuucaucagaaagagcgacgagcugcugcacaacgugaacgccggcaagagcaccaccaacaucaugaucaccaccaucaucaucgugaucaucgugauccugcugagccugaucgccgugggccugcugcuguacugcaaggccagaagcacccccgugacccugagcaaggaccagcugagcggcaucaacaacaucgccuucagcaacugaggacuagugcaucacauuuaaaagcaucucagccuaccaugagaauaagagaaagaaaaugaagaucaauagcuuauucaucucuuuuucuuuuucguugguguaaagccaacacccugucuaaaaaacauaaauuucuuuaaucauuuugccucuuuucucugugcuucaauuaauaaaaaauggaaagaaccuagaucuaaaaaaaaaaaaaaaaaaaaaaaaaaaaaaaaaaaaaaaaaaaaaaaaaaaaaaaaaaaaaaaaugcaucccccccccccccccccccccccccccccccaaaggcucuuuucagagccaccagaauu

SEQ ID NO: 3462 - RNA, 1994 nt, Artificial Sequence
  mRNA product Design i-2 comprising derived and/or modified sequence from HRSV(A2)__F_DSCav1_mut3 (opt5)
gggagaggcgcugccuacggagguggcagccaucuccuucucggcaucaagcuuaccauggagcugcucauccugaaggccaacgcuauuaccacaauccuuacggccgugaccuucugcuuugcgagcggccagaauauuacagaagaguucuaccaauccaccuguucugcugucagcaaaggguaucugggagcccucagaacaggcugguacaccuccguuaucacaauugaacugucuaacaucaaggagaucaaaugcaaugggaccgacgccaaggugaaacuuauuaagcaggaacuggauaaguauaaaaacgcugugacggaccuccagcugcugaugcagagcacccccgccacaggauccggcucugcuaucuguagcggggucgccgugugcaagguucuccaccuggagggagaggugaauaaaauuaaguccgcgcuucugagcaccaacaaagccgucgugucucucuccaauggcguuagcgugcugacauuuaagguccuugaucugaagaacuacaucgacaaacaacuccugccuauucugaauaagcagucuuguuccaucccgaacauugaaaccgugaucgaguuccagcagaaaaauaaccggcuccuggaaaucacgcgcgaguuuagcgugaaugcuggcgucacaacccccguuucuacauauaugcuuaccaacuccgagcugcucagccugauuaaugauaugccuaucaccaacgaccaaaagaaacuuauguccaacaaugugcagauugugagacagcagucuuacagcaucaugugcauuaucaaggaagagguccuggccuaugugguucaacucccccuguacggggugaucgauacaccuuguuggaaacugcauacgagcccccucugcaccacaaacaccaaggaaggauccaauauuugucugacacggaccgaccgcggcugguacugcgauaacgcugggucugucuccuucuuuccucaggccgagacguguaaggugcagagcaauagaguuuucugcgacacaaugaacucucuuacccugccgagcgaagugaaucucugcaacgucgauaucuuuaaucccaaauaugacuguaagauuaugaccuccaaaacagaugugucuagcuccgucaucaccagccugggagcgauugugucuugcuacggcaagacaaaauguacggccuccaacaagaaucgggggaucaucaagaccuucagcaacggaugcgacuauguuucuaauaaaggcguggacacagucuccgugggcaacacccuuuacuguguuaauaagcaagaggggcagagccuguaugugaaaggagagccuauuaucaacuuuuacgauccccucgucuucccuuccgacgaauuugaugcuucuauuagccaggugaacgagaagaucaaucagucccuggccuucauucgcaaaucugacgaacugcuccacaacgugaaugcuggcaagagcacaaccaacaucaugauuacgaccaucaucauuguuaucauugucauccugcuuucccugauugccguggggcuccugcuguauugcaaggccagaagcacacccgugacccuuucuaaagaucaacucuccggaaucaauaacaucgcuuucagcaauugaggacuagugcaucacauuuaaaagcaucucagccuaccaugagaauaagagaaagaaaaugaagaucaauagcuuauucaucucuuuuucuuuuucguugguguaaagccaacacccugucuaaaaaacauaaauuucuuuaaucauuuugccucuuuucucugugcuucaauuaauaaaaaauggaaagaaccuagaucuaaaaaaaaaaaaaaaaaaaaaaaaaaaaaaaaaaaaaaaaaaaaaaaaaaaaaaaaaaaaaaaaugcaucccccccccccccccccccccccccccccccaaaggcucuuuucagagccaccagaauu

SEQ ID NO: 3463 - RNA, 1994 nt, Artificial Sequence
  mRNA product Design i-2 comprising derived and/or modified sequence from HRSV(A2)__F_DSCav1_mut3 (opt6)
gggagaggcgcugccuacggagguggcagccaucuccuucucggcaucaagcuuaccauggaauuacucauacuaaaagccaaugccauaaccacuauucuaacagcaguaacauucuguuucgccucaggacaaaacauaacagaagaauuuuaucaauccaccuguuccgcagucucgaaaggcuaccuuggcgcacuaagaaccggaugguauacaucaguaauaaccauugaacuaucaaauaucaaagaaauaaaaugcaacggaacugacgcaaaagucaaacuaauaaaacaagaauuagacaaauacaaaaacgccguuacagacuuacaacuacuaaugcaaucaacuccagcaacaggaucaggaucugcuauaugcucaggugucgccguauguaaaguguuacaccucgaaggcgaaguaaacaaaauaaaaucagcacuacuauccacaaauaaagcaguaguaucacuauccaaugguguaucaguacucacauucaaaguacuagacuuaaaaaauuauauagauaaacaauuacuaccaauauuaaacaaacaaucaugcucaauaccaaacauagaaaccgucauugaauuucaacaaaaaaacaaucgacuucuugaaauaacacgagaauuuucaguaaaugccggaguaacaaccccagucucaacauacauguuaaccaacucugaacuccuaagccuaaucaacgacaugcccauaacuaacgaccaaaaaaaacuaauguccaauaauguccaaauaguaagacaacaauccuacucaauaaugugcauuauaaaagaagaaguccucgccuauguaguacaacuacccuuauacggaguaauugacacaccauguuggaaacuacauacaucaccacuaugcaccacuaacacaaaagaaggcuccaacauaugccuaacccgaacagaucgcggaugguauugcgacaacgcaggaaguguauccuucuuuccacaagcagaaacaugcaaaguacaauccaacagaguauucugugacaccaugaacucucuaacacuaccuuccgaaguaaauuuaugcaacguagacauauuuaaucccaaauacgacuguaaaauaaugaccucaaaaacugaugucucaucaucagucauuacaucacucggagcaauagucaguugcuauggaaaaaccaaaugcacagcuaguaacaaaaacagggguauaauaaaaacauuuucaaacggaugcgauuacguaucaaauaaaggaguagacaccguauccguaggaaauacucucuacugcguaaacaaacaagaaggacaaucccuauacguaaaaggcgaaccaaucauuaacuuuuacgacccacuuguauuuccaucagacgaauuugaugccucaauaucccaagucaaugaaaaaauaaaccaaagucuagcauucauccgaaaaucagaugaacuuuuacacaacguaaacgccggaaaaucaacaacaaacaucaugaucacaacaaucaucauaguaauaauaguuauacuacuuuccuuaauagcagucggccuacuacucuacugcaaagcacgauccacaccaguaaccuuaucuaaagaccaacucucaggcauaaacaacauagcauucucaaacuaaggacuagugcaucacauuuaaaagcaucucagccuaccaugagaauaagagaaagaaaaugaagaucaauagcuuauucaucucuuuuucuuuuucguugguguaaagccaacacccugucuaaaaaacauaaauuucuuuaaucauuuugccucuuuucucugugcuucaauuaauaaaaaauggaaagaaccuagaucuaaaaaaaaaaaaaaaaaaaaaaaaaaaaaaaaaaaaaaaaaaaaaaaaaaaaaaaaaaaaaaaaugcaucccccccccccccccccccccccccccccccaaaggcucuuuucagagccaccagaauu

SEQ ID NO: 3464 - RNA, 1994 nt, Artificial Sequence
  mRNA product Design i-2 comprising derived and/or modified sequence from HRSV(A2)__F_DSCav1_mut3 (opt11)
gggagaggcgcugccuacggagguggcagccaucuccuucucggcaucaagcuuaccauggaacuccucauccuuaaagcaaacgccaucacaaccauccucacagcagucacuuucugcuucgcauccggacaaaacaucacagaagaguucuaucaauccacgugcuccgcaguuuccaaaggauaccuuggagccuuacgaaccggcugguacaccuccgucaucaccauagaacucagcaacaucaaagaaaucaaaugcaacggaaccgacgcaaaagucaaacucaucaaacaagaacuagacaaauacaaaaacgcagucaccgaccuccaacuacucaugcaaucaacccccgcaaccggcuccggcuccgccaucugcuccggaguagccguaugcaaaguccuccaccucgaaggcgaaguuaacaagaucaaguccgcacuccuaucaaccaacaaagcagucgucucccuauccaacggcgucuccguauuaacauucaaaguccucgaccucaaaaacuacauagacaaacagcuacuccccauccuaaacaaacaauccugcuccauccccaacaucgaaacugucaucgaguuccaacagaaaaacaaccgccuccuagaaaucacccgagaguucuccguaaacgccggcgucacuacccccgucucuaccuauaugcuaaccaacucugaacuccuaucccuaaucaacgauaugcccauaacuaacgaccaaaagaaacuuauguccaacaacguacaaauaguccggcaacaaucauacucuaucaugugcaucaucaaagaagaaguacuugccuacguuguccaacucccacuauacggcgucauagacacuccaugcuggaaacuucacaccucaccccucugcaccacuaacacuaaagaaggcucuaacaucugccuuacccgcaccgaccgcggaugguacugcgacaacgcaggcucaguuagcuucuucccacaagccgaaaccugcaaaguccagucaaaccgugucuucugcgauaccaugaacucgcucacccucccuuccgaagucaaccucugcaacgucgacaucuucaaccccaaauacgacugcaaaaucaugaccucaaaaaccgacguaucuucuuccgucaucaccucccucggcgccaucguauccugcuacggcaaaaccaaaugcacugcaucaaacaaaaaccgaggcaucaucaaaaccuucucgaacggaugcgacuacguauccaacaagggcgucgacacagucuccguugguaacacccucuacugcgucaacaaacaagaaggccaaucccuauacguaaaaggcgaacccaucaucaacuucuacgacccccucgucuuccccagugacgaauuugacgccuccaucucccaagucaacgaaaagaucaaccaaucccuugccuucauacgcaaauccgacgaacuccuacacaacguuaacgccggaaaaucaacaaccaacaucaugaucacaaccaucauaaucgucauaaucgucauacuccucucccucauagccgucggccugcuauuguacuguaaagcccgcuccacaccagucacacuuucaaaagaccaacucuccgggaucaacaacaucgccuucuccaacuaaggacuagugcaucacauuuaaaagcaucucagccuaccaugagaauaagagaaagaaaaugaagaucaauagcuuauucaucucuuuuucuuuuucguugguguaaagccaacacccugucuaaaaaacauaaauuucuuuaaucauuuugccucuuuucucugugcuucaauuaauaaaaaauggaaagaaccuagaucuaaaaaaaaaaaaaaaaaaaaaaaaaaaaaaaaaaaaaaaaaaaaaaaaaaaaaaaaaaaaaaaaugcaucccccccccccccccccccccccccccccccaaaggcucuuuucagagccaccagaauu

SEQ ID NO: 3465 - RNA, 1990 nt, Artificial Sequence
  mRNA product Design i-2 comprising derived and/or modified sequence from HRSV(A2)__F_DSCav1_mut3 (opt1)
ggggcgcugccuacggagguggcagccaucuccuucucggcaucaagcuuaccauggagcugcucauccugaaggccaacgccaucaccaccauccugacggcggugaccuucugcuucgccagcggccagaacaucaccgaggaguucuaccaguccacgugcagcgccgucuccaagggguaccucggcgcccugcggaccggcugguacaccuccgugaucaccaucgagcugagcaacaucaaggagaucaagugcaacgggaccgacgccaaggugaagcucaucaagcaggagcuggacaaguacaagaacgcggucacggaccugcagcuccugaugcaguccaccccggcaaccggcuccggcuccgccaucugcagcggcgucgccgugugcaaggugcugcaccucgagggggaggucaacaagaucaagagcgcccugcuguccaccaacaaggccguggugagccucuccaacggcgucagcgugcugaccuucaaggugcuggaccucaagaacuacaucgacaagcagcugcugcccauccugaacaagcagagcugcuccauccccaacaucgagacggugaucgaguuccagcagaagaacaaccggcuccuggagaucacccgcgaguucagcgugaacgccggggucaccacccccguguccacguacaugcugaccaacagcgagcuccugucccugaucaacgacaugccgaucaccaacgaccagaagaagcucaugagcaacaacgugcagaucguccggcagcaguccuacagcaucaugugcaucaucaaggaggaggugcuggcguacgugguccagcugccccucuacggcgugaucgacacccccugcuggaagcugcacacgagcccccugugcaccaccaacaccaaggagggguccaacaucugccucacgcgcaccgaccggggcugguacugcgacaacgccggcagcgucuccuucuucccgcaggccgagaccugcaaggugcagagcaaccgcguguucugcgacaccaugaacucccugacgcugcccagcgagguaaaccucugcaacgucgacaucuucaaccccaaguacgacugcaagaucaugaccuccaagaccgacgugagcuccagcgugaucaccucccugggggccaucgucagcugcuacggcaagacgaagugcaccgccagcaacaagaaccgggggaucaucaagaccuucuccaacggcugcgacuacgugagcaacaagggcguggacaccguguccgucgggaacacccuguacugcgugaacaagcaggagggccagagccucuacgugaagggggagcccaucaucaacuucuacgacccgcuggucuuccccuccgacgaguucgacgcgagcaucucccaggugaacgagaagaucaaccagagccuggccuucauccgcaaguccgacgagcugcuccacaacgugaacgccggcaagagcacgaccaacaucaugaucaccaccaucaucaucgucaucaucgugauccugcugucccucaucgccguggggcugcugcucuacugcaaggcccggagcacgcccgucacccuguccaaggaccagcugagcggcaucaacaacaucgcguucuccaacugaggacuagugcaucacauuuaaaagcaucucagccuaccaugagaauaagagaaagaaaaugaagaucaauagcuuauucaucucuuuuucuuuuucguugguguaaagccaacacccugucuaaaaaacauaaauuucuuuaaucauuuugccucuuuucucugugcuucaauuaauaaaaaauggaaagaaccuagaucuaaaaaaaaaaaaaaaaaaaaaaaaaaaaaaaaaaaaaaaaaaaaaaaaaaaaaaaaaaaaaaaaugcaucccccccccccccccccccccccccccccccaaaggcucuuuucagagccaccagaauu

SEQ ID NO: 3466 - RNA, 1990 nt, Artificial Sequence
  mRNA product Design i-2 comprising derived and/or modified sequence from HRSV(A2)__F_DSCav1_mut3 (opt1)
ggggcgcugccuacggagguggcagccaucuccuucucggcaucaagcuuaccauggagcugcucauccugaaggccaacgccaucaccaccauccugacggcggugaccuucugcuucgccagcggccagaacaucaccgaggaguucuaccaguccacgugcagcgccgucuccaagggguaccucggcgcccugcgcaccgggugguacaccagcgugaucaccaucgagcuguccaacaucaaggagaucaagugcaacggcaccgacgccaaggugaagcucaucaagcaggagcuggacaaguacaagaacgcggucacggaccugcagcuccugaugcagagcacccccgccaccggguccggcagcgccaucugcuccggcguggccgugugcaagguccugcaccucgagggggaggugaacaagaucaagagcgcgcugcuguccaccaacaaggccguggucagccucuccaacggcgugagcgugcugacguucaagguccuggaccucaagaacuacaucgacaagcagcugcugccgauccucaacaagcaguccugcagcauccccaacaucgagaccgugaucgaguuccagcagaagaacaaccggcugcuggagaucacccgcgaguucuccgugaacgccggggucaccacgcccgugagcaccuacaugcucaccaacuccgagcugcugagccucaucaacgacaugcccaucaccaacgaccagaagaagcugaugagcaacaacgugcagaucguccggcagcaguccuacagcaucaugugcaucaucaaggaggaggugcuggccuacgugguccagcucccgcuguacggcgugaucgacacgcccugcuggaagcugcacaccagcccccucugcaccaccaacacgaaggagggguccaacaucugccugacccgcaccgaccggggcugguacugcgacaacgccggcuccgugagcuucuucccccaggcggagaccugcaagguccaguccaaccgcguguucugcgacacgaugaacagccugacccucccguccgaggucaaccugugcaacguggacaucuucaaccccaaguacgacugcaagaucaugaccagcaagaccgacguguccagcuccgucaucacgagccugggggccaucguguccugcuacggcaagaccaagugcaccgccagcaacaagaaccgggggaucaucaagaccuucuccaacggcugcgacuacgugagcaacaagggcgucgacacgguguccguggggaacacccucuacugcgucaacaagcaggagggccagagccuguacgugaagggggagcccaucaucaacuucuacgacccccugguguucccgagcgacgaguucgacgccuccaucagccaggucaacgagaagaucaaccagucccucgccuucauccgcaagagcgacgagcugcugcacaacgugaacgcgggcaaguccaccaccaacaucaugaucaccacgaucaucaucgugaucaucgucauccuccugagccugaucgccguggggcuccugcuguacugcaaggcccgguccacccccgugacccugagcaaggaccagcucuccggcaucaacaacaucgccuucagcaacugaggacuagugcaucacauuuaaaagcaucucagccuaccaugagaauaagagaaagaaaaugaagaucaauagcuuauucaucucuuuuucuuuuucguugguguaaagccaacacccugucuaaaaaacauaaauuucuuuaaucauuuugccucuuuucucugugcuucaauuaauaaaaaauggaaagaaccuagaucuaaaaaaaaaaaaaaaaaaaaaaaaaaaaaaaaaaaaaaaaaaaaaaaaaaaaaaaaaaaaaaaaugcaucccccccccccccccccccccccccccccccaaaggcucuuuucagagccaccagaauu

SEQ ID NO: 3467 - RNA, 1990 nt, Artificial Sequence
  mRNA product Design i-2 comprising derived and/or modified sequence from HRSV(A2)__F_DSCav1_mut3 (opt2)
ggggcgcugccuacggagguggcagccaucuccuucucggcaucaagcuuaccauggagcuccucauccucaaggccaacgccaucaccaccauccucaccgccgucaccuucugcuucgccuccggccagaacaucaccgaggaguucuaccaguccaccugcuccgccgucuccaagggcuaccucggcgcccuccgcaccggcugguacaccuccgucaucaccaucgagcucuccaacaucaaggagaucaagugcaacggcaccgacgccaaggucaagcucaucaagcaggagcucgacaaguacaagaacgccgucaccgaccuccagcuccucaugcaguccacccccgccaccggcuccggcuccgccaucugcuccggcgucgccgucugcaagguccuccaccucgagggcgaggucaacaagaucaaguccgcccuccucuccaccaacaaggccgucgucucccucuccaacggcgucuccguccucaccuucaagguccucgaccucaagaacuacaucgacaagcagcuccuccccauccucaacaagcaguccugcuccauccccaacaucgagaccgucaucgaguuccagcagaagaacaaccgccuccucgagaucacccgcgaguucuccgucaacgccggcgucaccacccccgucuccaccuacaugcucaccaacuccgagcuccucucccucaucaacgacaugcccaucaccaacgaccagaagaagcucauguccaacaacguccagaucguccgccagcaguccuacuccaucaugugcaucaucaaggaggagguccucgccuacgucguccagcucccccucuacggcgucaucgacacccccugcuggaagcuccacaccuccccccucugcaccaccaacaccaaggagggcuccaacaucugccucacccgcaccgaccgcggcugguacugcgacaacgccggcuccgucuccuucuucccccaggccgagaccugcaagguccaguccaaccgcgucuucugcgacaccaugaacucccucacccuccccuccgaggucaaccucugcaacgucgacaucuucaaccccaaguacgacugcaagaucaugaccuccaagaccgacgucuccuccuccgucaucaccucccucggcgccaucgucuccugcuacggcaagaccaagugcaccgccuccaacaagaaccgcggcaucaucaagaccuucuccaacggcugcgacuacgucuccaacaagggcgucgacaccgucuccgucggcaacacccucuacugcgucaacaagcaggagggccagucccucuacgucaagggcgagcccaucaucaacuucuacgacccccucgucuuccccuccgacgaguucgacgccuccaucucccaggucaacgagaagaucaaccagucccucgccuucauccgcaaguccgacgagcuccuccacaacgucaacgccggcaaguccaccaccaacaucaugaucaccaccaucaucaucgucaucaucgucauccuccucucccucaucgccgucggccuccuccucuacugcaaggcccgcuccacccccgucacccucuccaaggaccagcucuccggcaucaacaacaucgccuucuccaacugaggacuagugcaucacauuuaaaagcaucucagccuaccaugagaauaagagaaagaaaaugaagaucaauagcuuauucaucucuuuuucuuuuucguugguguaaagccaacacccugucuaaaaaacauaaauuucuuuaaucauuuugccucuuuucucugugcuucaauuaauaaaaaauggaaagaaccuagaucuaaaaaaaaaaaaaaaaaaaaaaaaaaaaaaaaaaaaaaaaaaaaaaaaaaaaaaaaaaaaaaaaugcaucccccccccccccccccccccccccccccccaaaggcucuuuucagagccaccagaauu

SEQ ID NO: 3468 - RNA, 1990 nt, Artificial Sequence
  mRNA product Design i-2 comprising derived and/or modified sequence from HRSV(A2)__F_DSCav1_mut3 (opt3)
ggggcgcugccuacggagguggcagccaucuccuucucggcaucaagcuuaccauggagcugcucauccuuaaggccaacgcuauuaccacaauacugacugcagugacguucugcuuugccagcggccagaauaucaccgaagaguucuaccaauccacauguucugcggucucaaaaggguauuugggagcuuuaagaacugguugguacaccaguguuauuacaaucgaacugagcaacauuaaggagaucaaaugcaauggcaccgacgccaaggugaaacuaauaaagcaggaacucgauaaguauaaaaacgcaguaacugaccugcagcuucugaugcaguccacacccgccaccgggucuggaucggcuaucuguucaggcguggcagucugcaagguguugcaccucgagggugagguuaauaaaauuaagagcgcccugcugaguacgaacaaagcuguggucucccucucuaauggggugagcguauuaacuuuuaagguucuggaucuuaagaacuacaucgacaaacaauugcugccuauucuaaauaagcaguccuguucaaucccaaacauagaaaccgugauugaguuccagcagaaaaauaacaggcuccuggaaaucacacgggaguuuagugucaaugccggagugacuaccccggugagcacauauaugcuuaccaacucugagcuguugucccucauuaaugauaugcccaucacgaacgaccaaaagaaacugaugucaaacaauguccagaucguucgccagcagagcuacaguauuaugugcauaaucaaggaagagguguuagcguauguagugcaacugccucucuacggcgucauugauacuccauguuggaaacuucauacaucuccccugugcaccacuaacacaaaggaaggcuccaauaucuguuugacccgaacggaccgugggugguacugcgauaacgcaggaagcgugucguucuuuccucaggccgagaccuguaagguucagucuaauagaguguucugcgacacaaugaacucccuaacucugccaucagaagucaaucucugcaacguggauauauuuaaucccaaauaugacuguaagauuaugaccaguaaaacagauguaagcuccucuguuaucacuagccugggugcuaucgugucaugcuacggcaagaccaaauguacagccaguaacaagaauagggggauuaucaagaccuucuccaacggaugcgacuaugucagcaauaaaggcguggacacugucucuguggguaacacgcuuuacuguguuaauaagcaagaggggcagucacuguaugugaaaggagagccuauuauaaacuuuuacgauccauugguauucccgagugacgaauuugaugcaagcaucucccaggucaacgagaagauuaaucagucucucgcuuucauccggaaaucggacgaacuguuacacaacgugaaugccggcaagagcacaaccaacaucaugauuacuaccauaaucauuguuaucauugugauccugcuaucccucauagcggucggccugcuuuuguauugcaaggcccgcucaacacccgugacccugaguaaagaucaacucucugggaucaauaacauugcauucagcaauugaggacuagugcaucacauuuaaaagcaucucagccuaccaugagaauaagagaaagaaaaugaagaucaauagcuuauucaucucuuuuucuuuuucguugguguaaagccaacacccugucuaaaaaacauaaauuucuuuaaucauuuugccucuuuucucugugcuucaauuaauaaaaaauggaaagaaccuagaucuaaaaaaaaaaaaaaaaaaaaaaaaaaaaaaaaaaaaaaaaaaaaaaaaaaaaaaaaaaaaaaaaugcaucccccccccccccccccccccccccccccccaaaggcucuuuucagagccaccagaauu

SEQ ID NO: 3469 - RNA, 1990 nt, Artificial Sequence
  mRNA product Design i-2 comprising derived and/or modified sequence from HRSV(A2)__F_DSCav1_mut3 (opt4)
ggggcgcugccuacggagguggcagccaucuccuucucggcaucaagcuuaccauggagcugcugauccugaaggccaacgccaucaccaccauccugaccgccgugaccuucugcuucgccagcggccagaacaucaccgaggaguucuaccagagcaccugcagcgccgugagcaagggcuaccugggcgcccugagaaccggcugguacaccagcgugaucaccaucgagcugagcaacaucaaggagaucaagugcaacggcaccgacgccaaggugaagcugaucaagcaggagcuggacaaguacaagaacgccgugaccgaccugcagcugcugaugcagagcacccccgccaccggcagcggcagcgccaucugcagcggcguggccgugugcaaggugcugcaccuggagggcgaggugaacaagaucaagagcgcccugcugagcaccaacaaggccguggugagccugagcaacggcgugagcgugcugaccuucaaggugcuggaccugaagaacuacaucgacaagcagcugcugcccauccugaacaagcagagcugcagcauccccaacaucgagaccgugaucgaguuccagcagaagaacaacagacugcuggagaucaccagagaguucagcgugaacgccggcgugaccacccccgugagcaccuacaugcugaccaacagcgagcugcugagccugaucaacgacaugcccaucaccaacgaccagaagaagcugaugagcaacaacgugcagaucgugagacagcagagcuacagcaucaugugcaucaucaaggaggaggugcuggccuacguggugcagcugccccuguacggcgugaucgacacccccugcuggaagcugcacaccagcccccugugcaccaccaacaccaaggagggcagcaacaucugccugaccagaaccgacagaggcugguacugcgacaacgccggcagcgugagcuucuucccccaggccgagaccugcaaggugcagagcaacagaguguucugcgacaccaugaacagccugacccugcccagcgaggugaaccugugcaacguggacaucuucaaccccaaguacgacugcaagaucaugaccagcaagaccgacgugagcagcagcgugaucaccagccugggcgccaucgugagcugcuacggcaagaccaagugcaccgccagcaacaagaacagaggcaucaucaagaccuucagcaacggcugcgacuacgugagcaacaagggcguggacaccgugagcgugggcaacacccuguacugcgugaacaagcaggagggccagagccuguacgugaagggcgagcccaucaucaacuucuacgacccccugguguuccccagcgacgaguucgacgccagcaucagccaggugaacgagaagaucaaccagagccuggccuucaucagaaagagcgacgagcugcugcacaacgugaacgccggcaagagcaccaccaacaucaugaucaccaccaucaucaucgugaucaucgugauccugcugagccugaucgccgugggccugcugcuguacugcaaggccagaagcacccccgugacccugagcaaggaccagcugagcggcaucaacaacaucgccuucagcaacugaggacuagugcaucacauuuaaaagcaucucagccuaccaugagaauaagagaaagaaaaugaagaucaauagcuuauucaucucuuuuucuuuuucguugguguaaagccaacacccugucuaaaaaacauaaauuucuuuaaucauuuugccucuuuucucugugcuucaauuaauaaaaaauggaaagaaccuagaucuaaaaaaaaaaaaaaaaaaaaaaaaaaaaaaaaaaaaaaaaaaaaaaaaaaaaaaaaaaaaaaaaugcaucccccccccccccccccccccccccccccccaaaggcucuuuucagagccaccagaauu

SEQ ID NO: 3470 - RNA, 1990 nt, Artificial Sequence
  mRNA product Design i-2 comprising derived and/or modified sequence from HRSV(A2)__F_DSCav1_mut3 (opt5)
ggggcgcugccuacggagguggcagccaucuccuucucggcaucaagcuuaccauggagcugcucauccugaaggccaacgcuauuaccacaauccuuacggccgugaccuucugcuuugcgagcggccagaauauuacagaagaguucuaccaauccaccuguucugcugucagcaaaggguaucugggagcccucagaacaggcugguacaccuccguuaucacaauugaacugucuaacaucaaggagaucaaaugcaaugggaccgacgccaaggugaaacuuauuaagcaggaacuggauaaguauaaaaacgcugugacggaccuccagcugcugaugcagagcacccccgccacaggauccggcucugcuaucuguagcggggucgccgugugcaagguucuccaccuggagggagaggugaauaaaauuaaguccgcgcuucugagcaccaacaaagccgucgugucucucuccaauggcguuagcgugcugacauuuaagguccuugaucugaagaacuacaucgacaaacaacuccugccuauucugaauaagcagucuuguuccaucccgaacauugaaaccgugaucgaguuccagcagaaaaauaaccggcuccuggaaaucacgcgcgaguuuagcgugaaugcuggcgucacaacccccguuucuacauauaugcuuaccaacuccgagcugcucagccugauuaaugauaugccuaucaccaacgaccaaaagaaacuuauguccaacaaugugcagauugugagacagcagucuuacagcaucaugugcauuaucaaggaagagguccuggccuaugugguucaacucccccuguacggggugaucgauacaccuuguuggaaacugcauacgagcccccucugcaccacaaacaccaaggaaggauccaauauuugucugacacggaccgaccgcggcugguacugcgauaacgcugggucugucuccuucuuuccucaggccgagacguguaaggugcagagcaauagaguuuucugcgacacaaugaacucucuuacccugccgagcgaagugaaucucugcaacgucgauaucuuuaaucccaaauaugacuguaagauuaugaccuccaaaacagaugugucuagcuccgucaucaccagccugggagcgauugugucuugcuacggcaagacaaaauguacggccuccaacaagaaucgggggaucaucaagaccuucagcaacggaugcgacuauguuucuaauaaaggcguggacacagucuccgugggcaacacccuuuacuguguuaauaagcaagaggggcagagccuguaugugaaaggagagccuauuaucaacuuuuacgauccccucgucuucccuuccgacgaauuugaugcuucuauuagccaggugaacgagaagaucaaucagucccuggccuucauucgcaaaucugacgaacugcuccacaacgugaaugcuggcaagagcacaaccaacaucaugauuacgaccaucaucauuguuaucauugucauccugcuuucccugauugccguggggcuccugcuguauugcaaggccagaagcacacccgugacccuuucuaaagaucaacucuccggaaucaauaacaucgcuuucagcaauugaggacuagugcaucacauuuaaaagcaucucagccuaccaugagaauaagagaaagaaaaugaagaucaauagcuuauucaucucuuuuucuuuuucguugguguaaagccaacacccugucuaaaaaacauaaauuucuuuaaucauuuugccucuuuucucugugcuucaauuaauaaaaaauggaaagaaccuagaucuaaaaaaaaaaaaaaaaaaaaaaaaaaaaaaaaaaaaaaaaaaaaaaaaaaaaaaaaaaaaaaaaugcaucccccccccccccccccccccccccccccccaaaggcucuuuucagagccaccagaauu

SEQ ID NO: 3471 - RNA, 1990 nt, Artificial Sequence
  mRNA product Design i-2 comprising derived and/or modified sequence from HRSV(A2)__F_DSCav1_mut3 (opt6)
ggggcgcugccuacggagguggcagccaucuccuucucggcaucaagcuuaccauggaauuacucauacuaaaagccaaugccauaaccacuauucuaacagcaguaacauucuguuucgccucaggacaaaacauaacagaagaauuuuaucaauccaccuguuccgcagucucgaaaggcuaccuuggcgcacuaagaaccggaugguauacaucaguaauaaccauugaacuaucaaauaucaaagaaauaaaaugcaacggaacugacgcaaaagucaaacuaauaaaacaagaauuagacaaauacaaaaacgccguuacagacuuacaacuacuaaugcaaucaacuccagcaacaggaucaggaucugcuauaugcucaggugucgccguauguaaaguguuacaccucgaaggcgaaguaaacaaaauaaaaucagcacuacuauccacaaauaaagcaguaguaucacuauccaaugguguaucaguacucacauucaaaguacuagacuuaaaaaauuauauagauaaacaauuacuaccaauauuaaacaaacaaucaugcucaauaccaaacauagaaaccgucauugaauuucaacaaaaaaacaaucgacuucuugaaauaacacgagaauuuucaguaaaugccggaguaacaaccccagucucaacauacauguuaaccaacucugaacuccuaagccuaaucaacgacaugcccauaacuaacgaccaaaaaaaacuaauguccaauaauguccaaauaguaagacaacaauccuacucaauaaugugcauuauaaaagaagaaguccucgccuauguaguacaacuacccuuauacggaguaauugacacaccauguuggaaacuacauacaucaccacuaugcaccacuaacacaaaagaaggcuccaacauaugccuaacccgaacagaucgcggaugguauugcgacaacgcaggaaguguauccuucuuuccacaagcagaaacaugcaaaguacaauccaacagaguauucugugacaccaugaacucucuaacacuaccuuccgaaguaaauuuaugcaacguagacauauuuaaucccaaauacgacuguaaaauaaugaccucaaaaacugaugucucaucaucagucauuacaucacucggagcaauagucaguugcuauggaaaaaccaaaugcacagcuaguaacaaaaacagggguauaauaaaaacauuuucaaacggaugcgauuacguaucaaauaaaggaguagacaccguauccguaggaaauacucucuacugcguaaacaaacaagaaggacaaucccuauacguaaaaggcgaaccaaucauuaacuuuuacgacccacuuguauuuccaucagacgaauuugaugccucaauaucccaagucaaugaaaaaauaaaccaaagucuagcauucauccgaaaaucagaugaacuuuuacacaacguaaacgccggaaaaucaacaacaaacaucaugaucacaacaaucaucauaguaauaauaguuauacuacuuuccuuaauagcagucggccuacuacucuacugcaaagcacgauccacaccaguaaccuuaucuaaagaccaacucucaggcauaaacaacauagcauucucaaacuaaggacuagugcaucacauuuaaaagcaucucagccuaccaugagaauaagagaaagaaaaugaagaucaauagcuuauucaucucuuuuucuuuuucguugguguaaagccaacacccugucuaaaaaacauaaauuucuuuaaucauuuugccucuuuucucugugcuucaauuaauaaaaaauggaaagaaccuagaucuaaaaaaaaaaaaaaaaaaaaaaaaaaaaaaaaaaaaaaaaaaaaaaaaaaaaaaaaaaaaaaaaugcaucccccccccccccccccccccccccccccccaaaggcucuuuucagagccaccagaauu

SEQ ID NO: 3472 - RNA, 1990 nt, Artificial Sequence
  mRNA product Design i-2 comprising derived and/or modified sequence from HRSV(A2)__F_DSCav1_mut3 (opt11)
ggggcgcugccuacggagguggcagccaucuccuucucggcaucaagcuuaccauggaacuccucauccuuaaagcaaacgccaucacaaccauccucacagcagucacuuucugcuucgcauccggacaaaacaucacagaagaguucuaucaauccacgugcuccgcaguuuccaaaggauaccuuggagccuuacgaaccggcugguacaccuccgucaucaccauagaacucagcaacaucaaagaaaucaaaugcaacggaaccgacgcaaaagucaaacucaucaaacaagaacuagacaaauacaaaaacgcagucaccgaccuccaacuacucaugcaaucaacccccgcaaccggcuccggcuccgccaucugcuccggaguagccguaugcaaaguccuccaccucgaaggcgaaguuaacaagaucaaguccgcacuccuaucaaccaacaaagcagucgucucccuauccaacggcgucuccguauuaacauucaaaguccucgaccucaaaaacuacauagacaaacagcuacuccccauccuaaacaaacaauccugcuccauccccaacaucgaaacugucaucgaguuccaacagaaaaacaaccgccuccuagaaaucacccgagaguucuccguaaacgccggcgucacuacccccgucucuaccuauaugcuaaccaacucugaacuccuaucccuaaucaacgauaugcccauaacuaacgaccaaaagaaacuuauguccaacaacguacaaauaguccggcaacaaucauacucuaucaugugcaucaucaaagaagaaguacuugccuacguuguccaacucccacuauacggcgucauagacacuccaugcuggaaacuucacaccucaccccucugcaccacuaacacuaaagaaggcucuaacaucugccuuacccgcaccgaccgcggaugguacugcgacaacgcaggcucaguuagcuucuucccacaagccgaaaccugcaaaguccagucaaaccgugucuucugcgauaccaugaacucgcucacccucccuuccgaagucaaccucugcaacgucgacaucuucaaccccaaauacgacugcaaaaucaugaccucaaaaaccgacguaucuucuuccgucaucaccucccucggcgccaucguauccugcuacggcaaaaccaaaugcacugcaucaaacaaaaaccgaggcaucaucaaaaccuucucgaacggaugcgacuacguauccaacaagggcgucgacacagucuccguugguaacacccucuacugcgucaacaaacaagaaggccaaucccuauacguaaaaggcgaacccaucaucaacuucuacgacccccucgucuuccccagugacgaauuugacgccuccaucucccaagucaacgaaaagaucaaccaaucccuugccuucauacgcaaauccgacgaacuccuacacaacguuaacgccggaaaaucaacaaccaacaucaugaucacaaccaucauaaucgucauaaucgucauacuccucucccucauagccgucggccugcuauuguacuguaaagcccgcuccacaccagucacacuuucaaaagaccaacucuccgggaucaacaacaucgccuucuccaacuaaggacuagugcaucacauuuaaaagcaucucagccuaccaugagaauaagagaaagaaaaugaagaucaauagcuuauucaucucuuuuucuuuuucguugguguaaagccaacacccugucuaaaaaacauaaauuucuuuaaucauuuugccucuuuucucugugcuucaauuaauaaaaaauggaaagaaccuagaucuaaaaaaaaaaaaaaaaaaaaaaaaaaaaaaaaaaaaaaaaaaaaaaaaaaaaaaaaaaaaaaaaugcaucccccccccccccccccccccccccccccccaaaggcucuuuucagagccaccagaauu

SEQ ID NO: 3473 - RNA, 1825 nt, Artificial Sequence
  mRNA product Design i-3 comprising derived and/or modified sequence from HRSV(A2)__F_DSCav1_mut3 (opt1) R6770
gggagaaagcuuaccauggagcugcucauccugaaggccaacgccaucaccaccauccugacggcggugaccuucugcuucgccagcggccagaacaucaccgaggaguucuaccaguccacgugcagcgccgucuccaagggguaccucggcgcccugcggaccggcugguacaccuccgugaucaccaucgagcugagcaacaucaaggagaucaagugcaacgggaccgacgccaaggugaagcucaucaagcaggagcuggacaaguacaagaacgcggucacggaccugcagcuccugaugcaguccaccccggcaaccggcuccggcuccgccaucugcagcggcgucgccgugugcaaggugcugcaccucgagggggaggucaacaagaucaagagcgcccugcuguccaccaacaaggccguggugagccucuccaacggcgucagcgugcugaccuucaaggugcuggaccucaagaacuacaucgacaagcagcugcugcccauccugaacaagcagagcugcuccauccccaacaucgagacggugaucgaguuccagcagaagaacaaccggcuccuggagaucacccgcgaguucagcgugaacgccggggucaccacccccguguccacguacaugcugaccaacagcgagcuccugucccugaucaacgacaugccgaucaccaacgaccagaagaagcucaugagcaacaacgugcagaucguccggcagcaguccuacagcaucaugugcaucaucaaggaggaggugcuggcguacgugguccagcugccccucuacggcgugaucgacacccccugcuggaagcugcacacgagcccccugugcaccaccaacaccaaggagggguccaacaucugccucacgcgcaccgaccggggcugguacugcgacaacgccggcagcgucuccuucuucccgcaggccgagaccugcaaggugcagagcaaccgcguguucugcgacaccaugaacucccugacgcugcccagcgagguaaaccucugcaacgucgacaucuucaaccccaaguacgacugcaagaucaugaccuccaagaccgacgugagcuccagcgugaucaccucccugggggccaucgucagcugcuacggcaagacgaagugcaccgccagcaacaagaaccgggggaucaucaagaccuucuccaacggcugcgacuacgugagcaacaagggcguggacaccguguccgucgggaacacccuguacugcgugaacaagcaggagggccagagccucuacgugaagggggagcccaucaucaacuucuacgacccgcuggucuuccccuccgacgaguucgacgcgagcaucucccaggugaacgagaagaucaaccagagccuggccuucauccgcaaguccgacgagcugcuccacaacgugaacgccggcaagagcacgaccaacaucaugaucaccaccaucaucaucgucaucaucgugauccugcugucccucaucgccguggggcugcugcucuacugcaaggcccggagcacgcccgucacccuguccaaggaccagcugagcggcaucaacaacaucgcguucuccaacugaggacuaguuauaagacugacuagcccgaugggccucccaacgggcccuccuccccuccuugcaccgagauuaauaaaaaaaaaaaaaaaaaaaaaaaaaaaaaaaaaaaaaaaaaaaaaaaaaaaaaaaaaaaaaaaaugcaucccccccccccccccccccccccccccccccaaaggcucuuuucagagccaccagaauu

SEQ ID NO: 3474 - RNA, 1825 nt, Artificial Sequence
  mRNA product Design i-3 comprising derived and/or modified sequence from HRSV(A2)__F_DSCav1_mut3 (opt1)
gggagaaagcuuaccauggagcugcucauccugaaggccaacgccaucaccaccauccugacggcggugaccuucugcuucgccagcggccagaacaucaccgaggaguucuaccaguccacgugcagcgccgucuccaagggguaccucggcgcccugcgcaccgggugguacaccagcgugaucaccaucgagcuguccaacaucaaggagaucaagugcaacggcaccgacgccaaggugaagcucaucaagcaggagcuggacaaguacaagaacgcggucacggaccugcagcuccugaugcagagcacccccgccaccggguccggcagcgccaucugcuccggcguggccgugugcaagguccugcaccucgagggggaggugaacaagaucaagagcgcgcugcuguccaccaacaaggccguggucagccucuccaacggcgugagcgugcugacguucaagguccuggaccucaagaacuacaucgacaagcagcugcugccgauccucaacaagcaguccugcagcauccccaacaucgagaccgugaucgaguuccagcagaagaacaaccggcugcuggagaucacccgcgaguucuccgugaacgccggggucaccacgcccgugagcaccuacaugcucaccaacuccgagcugcugagccucaucaacgacaugcccaucaccaacgaccagaagaagcugaugagcaacaacgugcagaucguccggcagcaguccuacagcaucaugugcaucaucaaggaggaggugcuggccuacgugguccagcucccgcuguacggcgugaucgacacgcccugcuggaagcugcacaccagcccccucugcaccaccaacacgaaggagggguccaacaucugccugacccgcaccgaccggggcugguacugcgacaacgccggcuccgugagcuucuucccccaggcggagaccugcaagguccaguccaaccgcguguucugcgacacgaugaacagccugacccucccguccgaggucaaccugugcaacguggacaucuucaaccccaaguacgacugcaagaucaugaccagcaagaccgacguguccagcuccgucaucacgagccugggggccaucguguccugcuacggcaagaccaagugcaccgccagcaacaagaaccgggggaucaucaagaccuucuccaacggcugcgacuacgugagcaacaagggcgucgacacgguguccguggggaacacccucuacugcgucaacaagcaggagggccagagccuguacgugaagggggagcccaucaucaacuucuacgacccccugguguucccgagcgacgaguucgacgccuccaucagccaggucaacgagaagaucaaccagucccucgccuucauccgcaagagcgacgagcugcugcacaacgugaacgcgggcaaguccaccaccaacaucaugaucaccacgaucaucaucgugaucaucgucauccuccugagccugaucgccguggggcuccugcuguacugcaaggcccgguccacccccgugacccugagcaaggaccagcucuccggcaucaacaacaucgccuucagcaacugaggacuaguuauaagacugacuagcccgaugggccucccaacgggcccuccuccccuccuugcaccgagauuaauaaaaaaaaaaaaaaaaaaaaaaaaaaaaaaaaaaaaaaaaaaaaaaaaaaaaaaaaaaaaaaaaugcaucccccccccccccccccccccccccccccccaaaggcucuuuucagagccaccagaauu

SEQ ID NO: 3475 - RNA, 1825 nt, Artificial Sequence
  mRNA product Design i-3 comprising derived and/or modified sequence from HRSV(A2)__F_DSCav1_mut3 (opt2)
gggagaaagcuuaccauggagcuccucauccucaaggccaacgccaucaccaccauccucaccgccgucaccuucugcuucgccuccggccagaacaucaccgaggaguucuaccaguccaccugcuccgccgucuccaagggcuaccucggcgcccuccgcaccggcugguacaccuccgucaucaccaucgagcucuccaacaucaaggagaucaagugcaacggcaccgacgccaaggucaagcucaucaagcaggagcucgacaaguacaagaacgccgucaccgaccuccagcuccucaugcaguccacccccgccaccggcuccggcuccgccaucugcuccggcgucgccgucugcaagguccuccaccucgagggcgaggucaacaagaucaaguccgcccuccucuccaccaacaaggccgucgucucccucuccaacggcgucuccguccucaccuucaagguccucgaccucaagaacuacaucgacaagcagcuccuccccauccucaacaagcaguccugcuccauccccaacaucgagaccgucaucgaguuccagcagaagaacaaccgccuccucgagaucacccgcgaguucuccgucaacgccggcgucaccacccccgucuccaccuacaugcucaccaacuccgagcuccucucccucaucaacgacaugcccaucaccaacgaccagaagaagcucauguccaacaacguccagaucguccgccagcaguccuacuccaucaugugcaucaucaaggaggagguccucgccuacgucguccagcucccccucuacggcgucaucgacacccccugcuggaagcuccacaccuccccccucugcaccaccaacaccaaggagggcuccaacaucugccucacccgcaccgaccgcggcugguacugcgacaacgccggcuccgucuccuucuucccccaggccgagaccugcaagguccaguccaaccgcgucuucugcgacaccaugaacucccucacccuccccuccgaggucaaccucugcaacgucgacaucuucaaccccaaguacgacugcaagaucaugaccuccaagaccgacgucuccuccuccgucaucaccucccucggcgccaucgucuccugcuacggcaagaccaagugcaccgccuccaacaagaaccgcggcaucaucaagaccuucuccaacggcugcgacuacgucuccaacaagggcgucgacaccgucuccgucggcaacacccucuacugcgucaacaagcaggagggccagucccucuacgucaagggcgagcccaucaucaacuucuacgacccccucgucuuccccuccgacgaguucgacgccuccaucucccaggucaacgagaagaucaaccagucccucgccuucauccgcaaguccgacgagcuccuccacaacgucaacgccggcaaguccaccaccaacaucaugaucaccaccaucaucaucgucaucaucgucauccuccucucccucaucgccgucggccuccuccucuacugcaaggcccgcuccacccccgucacccucuccaaggaccagcucuccggcaucaacaacaucgccuucuccaacugaggacuaguuauaagacugacuagcccgaugggccucccaacgggcccuccuccccuccuugcaccgagauuaauaaaaaaaaaaaaaaaaaaaaaaaaaaaaaaaaaaaaaaaaaaaaaaaaaaaaaaaaaaaaaaaaugcaucccccccccccccccccccccccccccccccaaaggcucuuuucagagccaccagaauu

SEQ ID NO: 3476 - RNA, 1825 nt, Artificial Sequence
  mRNA product Design i-3 comprising derived and/or modified sequence from HRSV(A2)__F_DSCav1_mut3 (opt3)
gggagaaagcuuaccauggagcugcucauccuuaaggccaacgcuauuaccacaauacugacugcagugacguucugcuuugccagcggccagaauaucaccgaagaguucuaccaauccacauguucugcggucucaaaaggguauuugggagcuuuaagaacugguugguacaccaguguuauuacaaucgaacugagcaacauuaaggagaucaaaugcaauggcaccgacgccaaggugaaacuaauaaagcaggaacucgauaaguauaaaaacgcaguaacugaccugcagcuucugaugcaguccacacccgccaccgggucuggaucggcuaucuguucaggcguggcagucugcaagguguugcaccucgagggugagguuaauaaaauuaagagcgcccugcugaguacgaacaaagcuguggucucccucucuaauggggugagcguauuaacuuuuaagguucuggaucuuaagaacuacaucgacaaacaauugcugccuauucuaaauaagcaguccuguucaaucccaaacauagaaaccgugauugaguuccagcagaaaaauaacaggcuccuggaaaucacacgggaguuuagugucaaugccggagugacuaccccggugagcacauauaugcuuaccaacucugagcuguugucccucauuaaugauaugcccaucacgaacgaccaaaagaaacugaugucaaacaauguccagaucguucgccagcagagcuacaguauuaugugcauaaucaaggaagagguguuagcguauguagugcaacugccucucuacggcgucauugauacuccauguuggaaacuucauacaucuccccugugcaccacuaacacaaaggaaggcuccaauaucuguuugacccgaacggaccgugggugguacugcgauaacgcaggaagcgugucguucuuuccucaggccgagaccuguaagguucagucuaauagaguguucugcgacacaaugaacucccuaacucugccaucagaagucaaucucugcaacguggauauauuuaaucccaaauaugacuguaagauuaugaccaguaaaacagauguaagcuccucuguuaucacuagccugggugcuaucgugucaugcuacggcaagaccaaauguacagccaguaacaagaauagggggauuaucaagaccuucuccaacggaugcgacuaugucagcaauaaaggcguggacacugucucuguggguaacacgcuuuacuguguuaauaagcaagaggggcagucacuguaugugaaaggagagccuauuauaaacuuuuacgauccauugguauucccgagugacgaauuugaugcaagcaucucccaggucaacgagaagauuaaucagucucucgcuuucauccggaaaucggacgaacuguuacacaacgugaaugccggcaagagcacaaccaacaucaugauuacuaccauaaucauuguuaucauugugauccugcuaucccucauagcggucggccugcuuuuguauugcaaggcccgcucaacacccgugacccugaguaaagaucaacucucugggaucaauaacauugcauucagcaauugaggacuaguuauaagacugacuagcccgaugggccucccaacgggcccuccuccccuccuugcaccgagauuaauaaaaaaaaaaaaaaaaaaaaaaaaaaaaaaaaaaaaaaaaaaaaaaaaaaaaaaaaaaaaaaaaugcaucccccccccccccccccccccccccccccccaaaggcucuuuucagagccaccagaauu

SEQ ID NO: 3477 - RNA, 1825 nt, Artificial Sequence
  mRNA product Design i-3 comprising derived and/or modified sequence from HRSV(A2)__F_DSCav1_mut3 (opt4)
gggagaaagcuuaccauggagcugcugauccugaaggccaacgccaucaccaccauccugaccgccgugaccuucugcuucgccagcggccagaacaucaccgaggaguucuaccagagcaccugcagcgccgugagcaagggcuaccugggcgcccugagaaccggcugguacaccagcgugaucaccaucgagcugagcaacaucaaggagaucaagugcaacggcaccgacgccaaggugaagcugaucaagcaggagcuggacaaguacaagaacgccgugaccgaccugcagcugcugaugcagagcacccccgccaccggcagcggcagcgccaucugcagcggcguggccgugugcaaggugcugcaccuggagggcgaggugaacaagaucaagagcgcccugcugagcaccaacaaggccguggugagccugagcaacggcgugagcgugcugaccuucaaggugcuggaccugaagaacuacaucgacaagcagcugcugcccauccugaacaagcagagcugcagcauccccaacaucgagaccgugaucgaguuccagcagaagaacaacagacugcuggagaucaccagagaguucagcgugaacgccggcgugaccacccccgugagcaccuacaugcugaccaacagcgagcugcugagccugaucaacgacaugcccaucaccaacgaccagaagaagcugaugagcaacaacgugcagaucgugagacagcagagcuacagcaucaugugcaucaucaaggaggaggugcuggccuacguggugcagcugccccuguacggcgugaucgacacccccugcuggaagcugcacaccagcccccugugcaccaccaacaccaaggagggcagcaacaucugccugaccagaaccgacagaggcugguacugcgacaacgccggcagcgugagcuucuucccccaggccgagaccugcaaggugcagagcaacagaguguucugcgacaccaugaacagccugacccugcccagcgaggugaaccugugcaacguggacaucuucaaccccaaguacgacugcaagaucaugaccagcaagaccgacgugagcagcagcgugaucaccagccugggcgccaucgugagcugcuacggcaagaccaagugcaccgccagcaacaagaacagaggcaucaucaagaccuucagcaacggcugcgacuacgugagcaacaagggcguggacaccgugagcgugggcaacacccuguacugcgugaacaagcaggagggccagagccuguacgugaagggcgagcccaucaucaacuucuacgacccccugguguuccccagcgacgaguucgacgccagcaucagccaggugaacgagaagaucaaccagagccuggccuucaucagaaagagcgacgagcugcugcacaacgugaacgccggcaagagcaccaccaacaucaugaucaccaccaucaucaucgugaucaucgugauccugcugagccugaucgccgugggccugcugcuguacugcaaggccagaagcacccccgugacccugagcaaggaccagcugagcggcaucaacaacaucgccuucagcaacugaggacuaguuauaagacugacuagcccgaugggccucccaacgggcccuccuccccuccuugcaccgagauuaauaaaaaaaaaaaaaaaaaaaaaaaaaaaaaaaaaaaaaaaaaaaaaaaaaaaaaaaaaaaaaaaaugcaucccccccccccccccccccccccccccccccaaaggcucuuuucagagccaccagaauu

SEQ ID NO: 3478 - RNA, 1825 nt, Artificial Sequence
  mRNA product Design i-3 comprising derived and/or modified sequence from HRSV(A2)__F_DSCav1_mut3 (opt5)
gggagaaagcuuaccauggagcugcucauccugaaggccaacgcuauuaccacaauccuuacggccgugaccuucugcuuugcgagcggccagaauauuacagaagaguucuaccaauccaccuguucugcugucagcaaaggguaucugggagcccucagaacaggcugguacaccuccguuaucacaauugaacugucuaacaucaaggagaucaaaugcaaugggaccgacgccaaggugaaacuuauuaagcaggaacuggauaaguauaaaaacgcugugacggaccuccagcugcugaugcagagcacccccgccacaggauccggcucugcuaucuguagcggggucgccgugugcaagguucuccaccuggagggagaggugaauaaaauuaaguccgcgcuucugagcaccaacaaagccgucgugucucucuccaauggcguuagcgugcugacauuuaagguccuugaucugaagaacuacaucgacaaacaacuccugccuauucugaauaagcagucuuguuccaucccgaacauugaaaccgugaucgaguuccagcagaaaaauaaccggcuccuggaaaucacgcgcgaguuuagcgugaaugcuggcgucacaacccccguuucuacauauaugcuuaccaacuccgagcugcucagccugauuaaugauaugccuaucaccaacgaccaaaagaaacuuauguccaacaaugugcagauugugagacagcagucuuacagcaucaugugcauuaucaaggaagagguccuggccuaugugguucaacucccccuguacggggugaucgauacaccuuguuggaaacugcauacgagcccccucugcaccacaaacaccaaggaaggauccaauauuugucugacacggaccgaccgcggcugguacugcgauaacgcugggucugucuccuucuuuccucaggccgagacguguaaggugcagagcaauagaguuuucugcgacacaaugaacucucuuacccugccgagcgaagugaaucucugcaacgucgauaucuuuaaucccaaauaugacuguaagauuaugaccuccaaaacagaugugucuagcuccgucaucaccagccugggagcgauugugucuugcuacggcaagacaaaauguacggccuccaacaagaaucgggggaucaucaagaccuucagcaacggaugcgacuauguuucuaauaaaggcguggacacagucuccgugggcaacacccuuuacuguguuaauaagcaagaggggcagagccuguaugugaaaggagagccuauuaucaacuuuuacgauccccucgucuucccuuccgacgaauuugaugcuucuauuagccaggugaacgagaagaucaaucagucccuggccuucauucgcaaaucugacgaacugcuccacaacgugaaugcuggcaagagcacaaccaacaucaugauuacgaccaucaucauuguuaucauugucauccugcuuucccugauugccguggggcuccugcuguauugcaaggccagaagcacacccgugacccuuucuaaagaucaacucuccggaaucaauaacaucgcuuucagcaauugaggacuaguuauaagacugacuagcccgaugggccucccaacgggcccuccuccccuccuugcaccgagauuaauaaaaaaaaaaaaaaaaaaaaaaaaaaaaaaaaaaaaaaaaaaaaaaaaaaaaaaaaaaaaaaaaugcaucccccccccccccccccccccccccccccccaaaggcucuuuucagagccaccagaauu

SEQ ID NO: 3479 - RNA, 1825 nt, Artificial Sequence
  mRNA product Design i-3 comprising derived and/or modified sequence from HRSV(A2)__F_DSCav1_mut3 (opt6)
gggagaaagcuuaccauggaauuacucauacuaaaagccaaugccauaaccacuauucuaacagcaguaacauucuguuucgccucaggacaaaacauaacagaagaauuuuaucaauccaccuguuccgcagucucgaaaggcuaccuuggcgcacuaagaaccggaugguauacaucaguaauaaccauugaacuaucaaauaucaaagaaauaaaaugcaacggaacugacgcaaaagucaaacuaauaaaacaagaauuagacaaauacaaaaacgccguuacagacuuacaacuacuaaugcaaucaacuccagcaacaggaucaggaucugcuauaugcucaggugucgccguauguaaaguguuacaccucgaaggcgaaguaaacaaaauaaaaucagcacuacuauccacaaauaaagcaguaguaucacuauccaaugguguaucaguacucacauucaaaguacuagacuuaaaaaauuauauagauaaacaauuacuaccaauauuaaacaaacaaucaugcucaauaccaaacauagaaaccgucauugaauuucaacaaaaaaacaaucgacuucuugaaauaacacgagaauuuucaguaaaugccggaguaacaaccccagucucaacauacauguuaaccaacucugaacuccuaagccuaaucaacgacaugcccauaacuaacgaccaaaaaaaacuaauguccaauaauguccaaauaguaagacaacaauccuacucaauaaugugcauuauaaaagaagaaguccucgccuauguaguacaacuacccuuauacggaguaauugacacaccauguuggaaacuacauacaucaccacuaugcaccacuaacacaaaagaaggcuccaacauaugccuaacccgaacagaucgcggaugguauugcgacaacgcaggaaguguauccuucuuuccacaagcagaaacaugcaaaguacaauccaacagaguauucugugacaccaugaacucucuaacacuaccuuccgaaguaaauuuaugcaacguagacauauuuaaucccaaauacgacuguaaaauaaugaccucaaaaacugaugucucaucaucagucauuacaucacucggagcaauagucaguugcuauggaaaaaccaaaugcacagcuaguaacaaaaacagggguauaauaaaaacauuuucaaacggaugcgauuacguaucaaauaaaggaguagacaccguauccguaggaaauacucucuacugcguaaacaaacaagaaggacaaucccuauacguaaaaggcgaaccaaucauuaacuuuuacgacccacuuguauuuccaucagacgaauuugaugccucaauaucccaagucaaugaaaaaauaaaccaaagucuagcauucauccgaaaaucagaugaacuuuuacacaacguaaacgccggaaaaucaacaacaaacaucaugaucacaacaaucaucauaguaauaauaguuauacuacuuuccuuaauagcagucggccuacuacucuacugcaaagcacgauccacaccaguaaccuuaucuaaagaccaacucucaggcauaaacaacauagcauucucaaacuaaggacuaguuauaagacugacuagcccgaugggccucccaacgggcccuccuccccuccuugcaccgagauuaauaaaaaaaaaaaaaaaaaaaaaaaaaaaaaaaaaaaaaaaaaaaaaaaaaaaaaaaaaaaaaaaaugcaucccccccccccccccccccccccccccccccaaaggcucuuuucagagccaccagaauu

SEQ ID NO: 3480 - RNA, 1825 nt, Artificial Sequence
  mRNA product Design i-3 comprising derived and/or modified sequence from HRSV(A2)__F_DSCav1_mut3 (opt11)
gggagaaagcuuaccauggaacuccucauccuuaaagcaaacgccaucacaaccauccucacagcagucacuuucugcuucgcauccggacaaaacaucacagaagaguucuaucaauccacgugcuccgcaguuuccaaaggauaccuuggagccuuacgaaccggcugguacaccuccgucaucaccauagaacucagcaacaucaaagaaaucaaaugcaacggaaccgacgcaaaagucaaacucaucaaacaagaacuagacaaauacaaaaacgcagucaccgaccuccaacuacucaugcaaucaacccccgcaaccggcuccggcuccgccaucugcuccggaguagccguaugcaaaguccuccaccucgaaggcgaaguuaacaagaucaaguccgcacuccuaucaaccaacaaagcagucgucucccuauccaacggcgucuccguauuaacauucaaaguccucgaccucaaaaacuacauagacaaacagcuacuccccauccuaaacaaacaauccugcuccauccccaacaucgaaacugucaucgaguuccaacagaaaaacaaccgccuccuagaaaucacccgagaguucuccguaaacgccggcgucacuacccccgucucuaccuauaugcuaaccaacucugaacuccuaucccuaaucaacgauaugcccauaacuaacgaccaaaagaaacuuauguccaacaacguacaaauaguccggcaacaaucauacucuaucaugugcaucaucaaagaagaaguacuugccuacguuguccaacucccacuauacggcgucauagacacuccaugcuggaaacuucacaccucaccccucugcaccacuaacacuaaagaaggcucuaacaucugccuuacccgcaccgaccgcggaugguacugcgacaacgcaggcucaguuagcuucuucccacaagccgaaaccugcaaaguccagucaaaccgugucuucugcgauaccaugaacucgcucacccucccuuccgaagucaaccucugcaacgucgacaucuucaaccccaaauacgacugcaaaaucaugaccucaaaaaccgacguaucuucuuccgucaucaccucccucggcgccaucguauccugcuacggcaaaaccaaaugcacugcaucaaacaaaaaccgaggcaucaucaaaaccuucucgaacggaugcgacuacguauccaacaagggcgucgacacagucuccguugguaacacccucuacugcgucaacaaacaagaaggccaaucccuauacguaaaaggcgaacccaucaucaacuucuacgacccccucgucuuccccagugacgaauuugacgccuccaucucccaagucaacgaaaagaucaaccaaucccuugccuucauacgcaaauccgacgaacuccuacacaacguuaacgccggaaaaucaacaaccaacaucaugaucacaaccaucauaaucgucauaaucgucauacuccucucccucauagccgucggccugcuauuguacuguaaagcccgcuccacaccagucacacuuucaaaagaccaacucuccgggaucaacaacaucgccuucuccaacuaaggacuaguuauaagacugacuagcccgaugggccucccaacgggcccuccuccccuccuugcaccgagauuaauaaaaaaaaaaaaaaaaaaaaaaaaaaaaaaaaaaaaaaaaaaaaaaaaaaaaaaaaaaaaaaaaugcaucccccccccccccccccccccccccccccccaaaggcucuuuucagagccaccagaauu

SEQ ID NO: 3481 - protein, 514 aa, Artificial Sequence
  derived and/or modified protein sequence (artificial) from HRSV(A2)__F-del_DSCav1_mut3
MELLILKANAITTILTAVTFCFASGQNITEEFYQSTCSAVSKGYLGALRTGWYTSVITIELSNIKEIKCNGTDAKVKLIKQELDKYKNAVTDLQLLMQSTPATGSGSAICSGVAVCKVLHLEGEVNKIKSALLSTNKAVVSLSNGVSVLTFKVLDLKNYIDKQLLPILNKQSCSIPNIETVIEFQQKNNRLLEITREFSVNAGVTTPVSTYMLTNSELLSLINDMPITNDQKKLMSNNVQIVRQQSYSIMCIIKEEVLAYVVQLPLYGVIDTPCWKLHTSPLCTTNTKEGSNICLTRTDRGWYCDNAGSVSFFPQAETCKVQSNRVFCDTMNSLTLPSEVNLCNVDIFNPKYDCKIMTSKTDVSSSVITSLGAIVSCYGKTKCTASNKNRGIIKTFSNGCDYVSNKGVDTVSVGNTLYCVNKQEGQSLYVKGEPIINFYDPLVFPSDEFDASISQVNEKINQSLAFIRKSDELLHNVNAGKSTTNIMITTIIIVIIVILLSLIAVGLLLYCKAR

SEQ ID NO: 3482 - RNA, 1545 nt, Artificial Sequence
  derived and/or modified CDS sequence (opt1) from HRSV(A2)__F-del_DSCav1_mut3
auggagcugcucauccugaaggccaacgccaucaccaccauccugacggcggugaccuucugcuucgccagcggccagaacaucaccgaggaguucuaccaguccacgugcagcgccgucuccaagggguaccucggcgcccugcggaccggcugguacaccuccgugaucaccaucgagcugagcaacaucaaggagaucaagugcaacgggaccgacgccaaggugaagcucaucaagcaggagcuggacaaguacaagaacgcggucacggaccugcagcuccugaugcaguccaccccggcaaccggcuccggcuccgccaucugcagcggcgucgccgugugcaaggugcugcaccucgagggggaggucaacaagaucaagagcgcccugcuguccaccaacaaggccguggugagccucuccaacggcgucagcgugcugaccuucaaggugcuggaccucaagaacuacaucgacaagcagcugcugcccauccugaacaagcagagcugcuccauccccaacaucgagacggugaucgaguuccagcagaagaacaaccggcuccuggagaucacccgcgaguucagcgugaacgccggggucaccacccccguguccacguacaugcugaccaacagcgagcuccugucccugaucaacgacaugccgaucaccaacgaccagaagaagcucaugagcaacaacgugcagaucguccggcagcaguccuacagcaucaugugcaucaucaaggaggaggugcuggcguacgugguccagcugccccucuacggcgugaucgacacccccugcuggaagcugcacacgagcccccugugcaccaccaacaccaaggagggguccaacaucugccucacgcgcaccgaccggggcugguacugcgacaacgccggcagcgucuccuucuucccgcaggccgagaccugcaaggugcagagcaaccgcguguucugcgacaccaugaacucccugacgcugcccagcgagguaaaccucugcaacgucgacaucuucaaccccaaguacgacugcaagaucaugaccuccaagaccgacgugagcuccagcgugaucaccucccugggggccaucgucagcugcuacggcaagacgaagugcaccgccagcaacaagaaccgggggaucaucaagaccuucuccaacggcugcgacuacgugagcaacaagggcguggacaccguguccgucgggaacacccuguacugcgugaacaagcaggagggccagagccucuacgugaagggggagcccaucaucaacuucuacgacccgcuggucuuccccuccgacgaguucgacgcgagcaucucccaggugaacgagaagaucaaccagagccuggccuucauccgcaaguccgacgagcugcuccacaacgugaacgccggcaagagcacgaccaacaucaugaucaccaccaucaucaucgucaucaucgugauccugcugucccucaucgccguggggcugcugcucuacugcaaggcccgguga

SEQ ID NO: 3483 - RNA, 1545 nt, Artificial Sequence
  derived and/or modified CDS sequence (opt1) from HRSV(A2)__F-del_DSCav1_mut3
auggagcugcucauccugaaggccaacgccaucaccaccauccugacggcggugaccuucugcuucgccagcggccagaacaucaccgaggaguucuaccaguccacgugcagcgccgucuccaagggguaccucggcgcccugcgcaccgggugguacaccagcgugaucaccaucgagcuguccaacaucaaggagaucaagugcaacggcaccgacgccaaggugaagcucaucaagcaggagcuggacaaguacaagaacgcggucacggaccugcagcuccugaugcagagcacccccgccaccggguccggcagcgccaucugcuccggcguggccgugugcaagguccugcaccucgagggggaggugaacaagaucaagagcgcgcugcuguccaccaacaaggccguggucagccucuccaacggcgugagcgugcugacguucaagguccuggaccucaagaacuacaucgacaagcagcugcugccgauccucaacaagcaguccugcagcauccccaacaucgagaccgugaucgaguuccagcagaagaacaaccggcugcuggagaucacccgcgaguucuccgugaacgccggggucaccacgcccgugagcaccuacaugcucaccaacuccgagcugcugagccucaucaacgacaugcccaucaccaacgaccagaagaagcugaugagcaacaacgugcagaucguccggcagcaguccuacagcaucaugugcaucaucaaggaggaggugcuggccuacgugguccagcucccgcuguacggcgugaucgacacgcccugcuggaagcugcacaccagcccccucugcaccaccaacacgaaggagggguccaacaucugccugacccgcaccgaccggggcugguacugcgacaacgccggcuccgugagcuucuucccccaggcggagaccugcaagguccaguccaaccgcguguucugcgacacgaugaacagccugacccucccguccgaggucaaccugugcaacguggacaucuucaaccccaaguacgacugcaagaucaugaccagcaagaccgacguguccagcuccgucaucacgagccugggggccaucguguccugcuacggcaagaccaagugcaccgccagcaacaagaaccgggggaucaucaagaccuucuccaacggcugcgacuacgugagcaacaagggcgucgacacgguguccguggggaacacccucuacugcgucaacaagcaggagggccagagccuguacgugaagggggagcccaucaucaacuucuacgacccccugguguucccgagcgacgaguucgacgccuccaucagccaggucaacgagaagaucaaccagucccucgccuucauccgcaagagcgacgagcugcugcacaacgugaacgcgggcaaguccaccaccaacaucaugaucaccacgaucaucaucgugaucaucgucauccuccugagccugaucgccguggggcuccugcuguacugcaaggcccgguga

SEQ ID NO: 3484 - RNA, 1545 nt, Artificial Sequence
  derived and/or modified CDS sequence (opt2) from HRSV(A2)__F-del_DSCav1_mut3
auggagcuccucauccucaaggccaacgccaucaccaccauccucaccgccgucaccuucugcuucgccuccggccagaacaucaccgaggaguucuaccaguccaccugcuccgccgucuccaagggcuaccucggcgcccuccgcaccggcugguacaccuccgucaucaccaucgagcucuccaacaucaaggagaucaagugcaacggcaccgacgccaaggucaagcucaucaagcaggagcucgacaaguacaagaacgccgucaccgaccuccagcuccucaugcaguccacccccgccaccggcuccggcuccgccaucugcuccggcgucgccgucugcaagguccuccaccucgagggcgaggucaacaagaucaaguccgcccuccucuccaccaacaaggccgucgucucccucuccaacggcgucuccguccucaccuucaagguccucgaccucaagaacuacaucgacaagcagcuccuccccauccucaacaagcaguccugcuccauccccaacaucgagaccgucaucgaguuccagcagaagaacaaccgccuccucgagaucacccgcgaguucuccgucaacgccggcgucaccacccccgucuccaccuacaugcucaccaacuccgagcuccucucccucaucaacgacaugcccaucaccaacgaccagaagaagcucauguccaacaacguccagaucguccgccagcaguccuacuccaucaugugcaucaucaaggaggagguccucgccuacgucguccagcucccccucuacggcgucaucgacacccccugcuggaagcuccacaccuccccccucugcaccaccaacaccaaggagggcuccaacaucugccucacccgcaccgaccgcggcugguacugcgacaacgccggcuccgucuccuucuucccccaggccgagaccugcaagguccaguccaaccgcgucuucugcgacaccaugaacucccucacccuccccuccgaggucaaccucugcaacgucgacaucuucaaccccaaguacgacugcaagaucaugaccuccaagaccgacgucuccuccuccgucaucaccucccucggcgccaucgucuccugcuacggcaagaccaagugcaccgccuccaacaagaaccgcggcaucaucaagaccuucuccaacggcugcgacuacgucuccaacaagggcgucgacaccgucuccgucggcaacacccucuacugcgucaacaagcaggagggccagucccucuacgucaagggcgagcccaucaucaacuucuacgacccccucgucuuccccuccgacgaguucgacgccuccaucucccaggucaacgagaagaucaaccagucccucgccuucauccgcaaguccgacgagcuccuccacaacgucaacgccggcaaguccaccaccaacaucaugaucaccaccaucaucaucgucaucaucgucauccuccucucccucaucgccgucggccuccuccucuacugcaaggcccgcuga

SEQ ID NO: 3485 - RNA, 1545 nt, Artificial Sequence
  derived and/or modified CDS sequence (opt3) from HRSV(A2)__F-del_DSCav1_mut3
auggagcugcucauccuuaaggccaacgcuauuaccacaauacugacugcagugacguucugcuuugccagcggccagaauaucaccgaagaguucuaccaauccacauguucugcggucucaaaaggguauuugggagcuuuaagaacugguugguacaccaguguuauuacaaucgaacugagcaacauuaaggagaucaaaugcaauggcaccgacgccaaggugaaacuaauaaagcaggaacucgauaaguauaaaaacgcaguaacugaccugcagcuucugaugcaguccacacccgccaccgggucuggaucggcuaucuguucaggcguggcagucugcaagguguugcaccucgagggugagguuaauaaaauuaagagcgcccugcugaguacgaacaaagcuguggucucccucucuaauggggugagcguauuaacuuuuaagguucuggaucuuaagaacuacaucgacaaacaauugcugccuauucuaaauaagcaguccuguucaaucccaaacauagaaaccgugauugaguuccagcagaaaaauaacaggcuccuggaaaucacacgggaguuuagugucaaugccggagugacuaccccggugagcacauauaugcuuaccaacucugagcuguugucccucauuaaugauaugcccaucacgaacgaccaaaagaaacugaugucaaacaauguccagaucguucgccagcagagcuacaguauuaugugcauaaucaaggaagagguguuagcguauguagugcaacugccucucuacggcgucauugauacuccauguuggaaacuucauacaucuccccugugcaccacuaacacaaaggaaggcuccaauaucuguuugacccgaacggaccgugggugguacugcgauaacgcaggaagcgugucguucuuuccucaggccgagaccuguaagguucagucuaauagaguguucugcgacacaaugaacucccuaacucugccaucagaagucaaucucugcaacguggauauauuuaaucccaaauaugacuguaagauuaugaccaguaaaacagauguaagcuccucuguuaucacuagccugggugcuaucgugucaugcuacggcaagaccaaauguacagccaguaacaagaauagggggauuaucaagaccuucuccaacggaugcgacuaugucagcaauaaaggcguggacacugucucuguggguaacacgcuuuacuguguuaauaagcaagaggggcagucacuguaugugaaaggagagccuauuauaaacuuuuacgauccauugguauucccgagugacgaauuugaugcaagcaucucccaggucaacgagaagauuaaucagucucucgcuuucauccggaaaucggacgaacuguuacacaacgugaaugccggcaagagcacaaccaacaucaugauuacuaccauaaucauuguuaucauugugauccugcuaucccucauagcggucggccugcuuuuguauugcaaggcccgcuga

SEQ ID NO: 3486 - RNA, 1545 nt, Artificial Sequence
  derived and/or modified CDS sequence (opt4) from HRSV(A2)__F-del_DSCav1_mut3
auggagcugcugauccugaaggccaacgccaucaccaccauccugaccgccgugaccuucugcuucgccagcggccagaacaucaccgaggaguucuaccagagcaccugcagcgccgugagcaagggcuaccugggcgcccugagaaccggcugguacaccagcgugaucaccaucgagcugagcaacaucaaggagaucaagugcaacggcaccgacgccaaggugaagcugaucaagcaggagcuggacaaguacaagaacgccgugaccgaccugcagcugcugaugcagagcacccccgccaccggcagcggcagcgccaucugcagcggcguggccgugugcaaggugcugcaccuggagggcgaggugaacaagaucaagagcgcccugcugagcaccaacaaggccguggugagccugagcaacggcgugagcgugcugaccuucaaggugcuggaccugaagaacuacaucgacaagcagcugcugcccauccugaacaagcagagcugcagcauccccaacaucgagaccgugaucgaguuccagcagaagaacaacagacugcuggagaucaccagagaguucagcgugaacgccggcgugaccacccccgugagcaccuacaugcugaccaacagcgagcugcugagccugaucaacgacaugcccaucaccaacgaccagaagaagcugaugagcaacaacgugcagaucgugagacagcagagcuacagcaucaugugcaucaucaaggaggaggugcuggccuacguggugcagcugccccuguacggcgugaucgacacccccugcuggaagcugcacaccagcccccugugcaccaccaacaccaaggagggcagcaacaucugccugaccagaaccgacagaggcugguacugcgacaacgccggcagcgugagcuucuucccccaggccgagaccugcaaggugcagagcaacagaguguucugcgacaccaugaacagccugacccugcccagcgaggugaaccugugcaacguggacaucuucaaccccaaguacgacugcaagaucaugaccagcaagaccgacgugagcagcagcgugaucaccagccugggcgccaucgugagcugcuacggcaagaccaagugcaccgccagcaacaagaacagaggcaucaucaagaccuucagcaacggcugcgacuacgugagcaacaagggcguggacaccgugagcgugggcaacacccuguacugcgugaacaagcaggagggccagagccuguacgugaagggcgagcccaucaucaacuucuacgacccccugguguuccccagcgacgaguucgacgccagcaucagccaggugaacgagaagaucaaccagagccuggccuucaucagaaagagcgacgagcugcugcacaacgugaacgccggcaagagcaccaccaacaucaugaucaccaccaucaucaucgugaucaucgugauccugcugagccugaucgccgugggccugcugcuguacugcaaggccagauga

SEQ ID NO: 3487 - RNA, 1545 nt, Artificial Sequence
  derived and/or modified CDS sequence (opt5) from HRSV(A2)__F-del_DSCav1_mut3
auggagcugcucauccugaaggccaacgcuauuaccacaauccuuacggccgugaccuucugcuuugcgagcggccagaauauuacagaagaguucuaccaauccaccuguucugcugucagcaaaggguaucugggagcccucagaacaggcugguacaccuccguuaucacaauugaacugucuaacaucaaggagaucaaaugcaaugggaccgacgccaaggugaaacuuauuaagcaggaacuggauaaguauaaaaacgcugugacggaccuccagcugcugaugcagagcacccccgccacaggauccggcucugcuaucuguagcggggucgccgugugcaagguucuccaccuggagggagaggugaauaaaauuaaguccgcgcuucugagcaccaacaaagccgucgugucucucuccaauggcguuagcgugcugacauuuaagguccuugaucugaagaacuacaucgacaaacaacuccugccuauucugaauaagcagucuuguuccaucccgaacauugaaaccgugaucgaguuccagcagaaaaauaaccggcuccuggaaaucacgcgcgaguuuagcgugaaugcuggcgucacaacccccguuucuacauauaugcuuaccaacuccgagcugcucagccugauuaaugauaugccuaucaccaacgaccaaaagaaacuuauguccaacaaugugcagauugugagacagcagucuuacagcaucaugugcauuaucaaggaagagguccuggccuaugugguucaacucccccuguacggggugaucgauacaccuuguuggaaacugcauacgagcccccucugcaccacaaacaccaaggaaggauccaauauuugucugacacggaccgaccgcggcugguacugcgauaacgcugggucugucuccuucuuuccucaggccgagacguguaaggugcagagcaauagaguuuucugcgacacaaugaacucucuuacccugccgagcgaagugaaucucugcaacgucgauaucuuuaaucccaaauaugacuguaagauuaugaccuccaaaacagaugugucuagcuccgucaucaccagccugggagcgauugugucuugcuacggcaagacaaaauguacggccuccaacaagaaucgggggaucaucaagaccuucagcaacggaugcgacuauguuucuaauaaaggcguggacacagucuccgugggcaacacccuuuacuguguuaauaagcaagaggggcagagccuguaugugaaaggagagccuauuaucaacuuuuacgauccccucgucuucccuuccgacgaauuugaugcuucuauuagccaggugaacgagaagaucaaucagucccuggccuucauucgcaaaucugacgaacugcuccacaacgugaaugcuggcaagagcacaaccaacaucaugauuacgaccaucaucauuguuaucauugucauccugcuuucccugauugccguggggcuccugcuguauugcaaggccagauga

SEQ ID NO: 3488 - RNA, 1545 nt, Artificial Sequence
  derived and/or modified CDS sequence (opt6) from HRSV(A2)__F-del_DSCav1_mut3
auggaauuacuaauccugaaagcaaacgcaauuacuacaauacuaacagcaguaaccuuuugcuuugccucaggacaaaacauaacugaagaauuuuaccaaucaacuugcucagcagucucaaaaggcuaucuaggagcacuacgaacagguugguauacuucagucauaacaauagaauuaucaaacauaaaagaaauuaaauguaacggaacugacgcaaaaguaaaacucaucaaacaagaacucgauaaauacaaaaacgcuguaaccgacuuacaacuacuaaugcaaucaacuccagcaacaggcuccggauccgcaauaugcagugguguagcaguaugcaaaguccuacaccuagaaggagaaguaaauaagauaaaaucugcucuacuaucaacaaauaaagcaguugucucccuaucaaauggagucucaguacucaccuucaaaguauuagaccucaaaaacuacauagacaaacaacuauuaccaauacucaacaaacaauccugcuccaucccuaacauagaaaccguaaucgaauuucaacaaaaaaauaacagacucuuagaaauaacuagagaauuuucaguuaaugcaggcgugacaacaccaguaucaacauauaugcuaacaaacuccgaacuccuaucccuaauaaacgacaugccaaucacaaacgaccaaaaaaaacuaauguccaacaacguacaaaucguaagacaacaaucauacucuauaaugugcauaauaaaagaagaaguacuggccuacguaguacaauuaccacucuacggaguaauagacaccccaugcuggaaacuccauacaucaccccuaugcacaacaaacacaaaagaaggauccaacauaugucucacuagaacagacagaggcugguacugcgacaacgcuggauccgucucauucuucccccaagcagaaacauguaaaguacaaucuaauagaguauuuugugacacaaugaacagccucacacuaccauccgaagucaaccuauguaacguagauauauuuaaucccaaauacgacugcaaaauaaugacauccaaaacagauguaucaucauccguuaucaccucacuaggagccauaguuucaugcuacggaaaaacaaaaugcacugcaucuaacaaaaauagagguauaauaaaaacauuuuccaacggcugcgacuacgucucaaacaaaggcguagacaccguaucaguaggaaauacauuauauugcguaaauaaacaagaaggccaaucccuauacguaaaaggagaacccaucauaaacuucuaugacccacuuguuuuccccucagacgaauuugacgccucaauaucacaaguaaaugaaaaaauaaaccaaucucuugccuucauuagaaaaucagacgaauuacuacacaacgucaacgcaggaaaaucaacaacaaacaucaugauaacaacgauaauaauagucauaauaguaauacuacuaucauuaaucgcagucggacuccuauuauauugcaaagcuagauaa

SEQ ID NO: 3489 - RNA, 1545 nt, Artificial Sequence
  derived and/or modified CDS sequence (opt11) from HRSV(A2)__F-del_DSCav1_mut3
auggaacuacucauacuaaaagccaacgccauaaccaccauccucaccgcaguaacuuucugcuucgcuuccggccaaaacaucaccgaagaauuuuaccaaaguaccugcagcgcagucucaaaaggauaccuaggcgcccuacgcacaggcugguacaccuccgucauuaccaucgaacucuccaacaucaaagaaauuaaaugcaacgguacagacgcaaaagucaaacucaucaaacaagaacucgacaaauacaaaaacgcagucaccgaccuccaacuccucaugcaauccacccccgccacaggcucuggcuccgccaucugcucaggcguagcagucugcaaaguccugcaccucgaaggcgaagucaacaaaaucaagucagcccuccucuccaccaacaaggccgucguaucccucucaaacggaguuagcguccucaccuucaaaguccuagaccucaaaaacuacaucgauaaacaacuacuccccauccuaaacaaacaaucaugcuccaucccaaacaucgaaaccguaaucgaguuccaacaaaagaacaaccgccuccucgaaaucacacgugaguucuccguuaacgccggcgucaccacccccgucucuacauacaugcucaccaacuccgaacuccuuucccucaucaacgacaugccaaucaccaacgaccaaaagaaacucaugucaaacaacguacaaaucguccgacaacaaagcuacuccaucaugugcaucaucaaagaagaaguccuugcauacgucguucaacuaccccucuacggcguaaucgacacucccugcuggaaacuccacaccuccccgcucugcacaaccaacaccaaagaaggcagcaacaucugccucacccgaaccgaccgcggcugguacugcgauaacgccggauccgucuccuucuucccacaagcagaaacuugcaaaguccaauccaaccgcgucuucugcgacaccaugaacucccucacacuccccuccgaagucaaccugugcaacgucgacaucuucaacccaaaauacgacugcaaaaucaugaccucaaaaaccgacgucucaucuucugucaucaccucucucggcgcuaucgucuccugcuauggcaaaaccaaaugcaccgccuccaacaagaaccgcggcauuaucaagaccuucuccaacggcugcgacuacgucuccaauaagggcgucgacaccgucucugucggcaacacccuuuacugcguaaacaaacaagaaggucaaucucucuacgucaaaggagaacccaucaucaacuucuacgacccccuggucuuccccuccgacgaguucgaugcaucaaucucccaagucaacgaaaagaucaaccaaucucucgcuuucauccgcaaauccgacgaacuccuacacaacguaaacgccggcaaauccaccacaaacaucaugaucaccaccauuaucauagucaucaucgucauccuccucuccuuaaucgccguuggccuccuucucuacugcaaagcccgauaa

SEQ ID NO: 3490 - RNA, 1821 nt, Artificial Sequence
  mRNA product Design a-1 comprising derived and/or modified sequence from HRSV(A2)__F-del_DSCav1_mut3 (opt1)
gggagagucccgcagucggcguccagcggcucugcuuguucgugugugugucguugcaggccuuauucaagcuuaccauggagcugcucauccugaaggccaacgccaucaccaccauccugacggcggugaccuucugcuucgccagcggccagaacaucaccgaggaguucuaccaguccacgugcagcgccgucuccaagggguaccucggcgcccugcggaccggcugguacaccuccgugaucaccaucgagcugagcaacaucaaggagaucaagugcaacgggaccgacgccaaggugaagcucaucaagcaggagcuggacaaguacaagaacgcggucacggaccugcagcuccugaugcaguccaccccggcaaccggcuccggcuccgccaucugcagcggcgucgccgugugcaaggugcugcaccucgagggggaggucaacaagaucaagagcgcccugcuguccaccaacaaggccguggugagccucuccaacggcgucagcgugcugaccuucaaggugcuggaccucaagaacuacaucgacaagcagcugcugcccauccugaacaagcagagcugcuccauccccaacaucgagacggugaucgaguuccagcagaagaacaaccggcuccuggagaucacccgcgaguucagcgugaacgccggggucaccacccccguguccacguacaugcugaccaacagcgagcuccugucccugaucaacgacaugccgaucaccaacgaccagaagaagcucaugagcaacaacgugcagaucguccggcagcaguccuacagcaucaugugcaucaucaaggaggaggugcuggcguacgugguccagcugccccucuacggcgugaucgacacccccugcuggaagcugcacacgagcccccugugcaccaccaacaccaaggagggguccaacaucugccucacgcgcaccgaccggggcugguacugcgacaacgccggcagcgucuccuucuucccgcaggccgagaccugcaaggugcagagcaaccgcguguucugcgacaccaugaacucccugacgcugcccagcgagguaaaccucugcaacgucgacaucuucaaccccaaguacgacugcaagaucaugaccuccaagaccgacgugagcuccagcgugaucaccucccugggggccaucgucagcugcuacggcaagacgaagugcaccgccagcaacaagaaccgggggaucaucaagaccuucuccaacggcugcgacuacgugagcaacaagggcguggacaccguguccgucgggaacacccuguacugcgugaacaagcaggagggccagagccucuacgugaagggggagcccaucaucaacuucuacgacccgcuggucuuccccuccgacgaguucgacgcgagcaucucccaggugaacgagaagaucaaccagagccuggccuucauccgcaaguccgacgagcugcuccacaacgugaacgccggcaagagcacgaccaacaucaugaucaccaccaucaucaucgucaucaucgugauccugcugucccucaucgccguggggcugcugcucuacugcaaggcccggugaggacuagucccuguucccagagcccacuuuuuuuucuuuuuuugaaauaaaauagccugucuuucagaucuaaaaaaaaaaaaaaaaaaaaaaaaaaaaaaaaaaaaaaaaaaaaaaaaaaaaaaaaaaaaaaaaugcaucccccccccccccccccccccccccccccccaaaggcucuuuucagagccaccagaauu

SEQ ID NO: 3491 - RNA, 1821 nt, Artificial Sequence
  mRNA product Design a-1 comprising derived and/or modified sequence from HRSV(A2)__F-del_DSCav1_mut3 (opt1)
gggagagucccgcagucggcguccagcggcucugcuuguucgugugugugucguugcaggccuuauucaagcuuaccauggagcugcucauccugaaggccaacgccaucaccaccauccugacggcggugaccuucugcuucgccagcggccagaacaucaccgaggaguucuaccaguccacgugcagcgccgucuccaagggguaccucggcgcccugcgcaccgggugguacaccagcgugaucaccaucgagcuguccaacaucaaggagaucaagugcaacggcaccgacgccaaggugaagcucaucaagcaggagcuggacaaguacaagaacgcggucacggaccugcagcuccugaugcagagcacccccgccaccggguccggcagcgccaucugcuccggcguggccgugugcaagguccugcaccucgagggggaggugaacaagaucaagagcgcgcugcuguccaccaacaaggccguggucagccucuccaacggcgugagcgugcugacguucaagguccuggaccucaagaacuacaucgacaagcagcugcugccgauccucaacaagcaguccugcagcauccccaacaucgagaccgugaucgaguuccagcagaagaacaaccggcugcuggagaucacccgcgaguucuccgugaacgccggggucaccacgcccgugagcaccuacaugcucaccaacuccgagcugcugagccucaucaacgacaugcccaucaccaacgaccagaagaagcugaugagcaacaacgugcagaucguccggcagcaguccuacagcaucaugugcaucaucaaggaggaggugcuggccuacgugguccagcucccgcuguacggcgugaucgacacgcccugcuggaagcugcacaccagcccccucugcaccaccaacacgaaggagggguccaacaucugccugacccgcaccgaccggggcugguacugcgacaacgccggcuccgugagcuucuucccccaggcggagaccugcaagguccaguccaaccgcguguucugcgacacgaugaacagccugacccucccguccgaggucaaccugugcaacguggacaucuucaaccccaaguacgacugcaagaucaugaccagcaagaccgacguguccagcuccgucaucacgagccugggggccaucguguccugcuacggcaagaccaagugcaccgccagcaacaagaaccgggggaucaucaagaccuucuccaacggcugcgacuacgugagcaacaagggcgucgacacgguguccguggggaacacccucuacugcgucaacaagcaggagggccagagccuguacgugaagggggagcccaucaucaacuucuacgacccccugguguucccgagcgacgaguucgacgccuccaucagccaggucaacgagaagaucaaccagucccucgccuucauccgcaagagcgacgagcugcugcacaacgugaacgcgggcaaguccaccaccaacaucaugaucaccacgaucaucaucgugaucaucgucauccuccugagccugaucgccguggggcuccugcuguacugcaaggcccggugaggacuagucccuguucccagagcccacuuuuuuuucuuuuuuugaaauaaaauagccugucuuucagaucuaaaaaaaaaaaaaaaaaaaaaaaaaaaaaaaaaaaaaaaaaaaaaaaaaaaaaaaaaaaaaaaaugcaucccccccccccccccccccccccccccccccaaaggcucuuuucagagccaccagaauu

SEQ ID NO: 3492 - RNA, 1821 nt, Artificial Sequence
  mRNA product Design a-1 comprising derived and/or modified sequence from HRSV(A2)__F-del_DSCav1_mut3 (opt2)
gggagagucccgcagucggcguccagcggcucugcuuguucgugugugugucguugcaggccuuauucaagcuuaccauggagcuccucauccucaaggccaacgccaucaccaccauccucaccgccgucaccuucugcuucgccuccggccagaacaucaccgaggaguucuaccaguccaccugcuccgccgucuccaagggcuaccucggcgcccuccgcaccggcugguacaccuccgucaucaccaucgagcucuccaacaucaaggagaucaagugcaacggcaccgacgccaaggucaagcucaucaagcaggagcucgacaaguacaagaacgccgucaccgaccuccagcuccucaugcaguccacccccgccaccggcuccggcuccgccaucugcuccggcgucgccgucugcaagguccuccaccucgagggcgaggucaacaagaucaaguccgcccuccucuccaccaacaaggccgucgucucccucuccaacggcgucuccguccucaccuucaagguccucgaccucaagaacuacaucgacaagcagcuccuccccauccucaacaagcaguccugcuccauccccaacaucgagaccgucaucgaguuccagcagaagaacaaccgccuccucgagaucacccgcgaguucuccgucaacgccggcgucaccacccccgucuccaccuacaugcucaccaacuccgagcuccucucccucaucaacgacaugcccaucaccaacgaccagaagaagcucauguccaacaacguccagaucguccgccagcaguccuacuccaucaugugcaucaucaaggaggagguccucgccuacgucguccagcucccccucuacggcgucaucgacacccccugcuggaagcuccacaccuccccccucugcaccaccaacaccaaggagggcuccaacaucugccucacccgcaccgaccgcggcugguacugcgacaacgccggcuccgucuccuucuucccccaggccgagaccugcaagguccaguccaaccgcgucuucugcgacaccaugaacucccucacccuccccuccgaggucaaccucugcaacgucgacaucuucaaccccaaguacgacugcaagaucaugaccuccaagaccgacgucuccuccuccgucaucaccucccucggcgccaucgucuccugcuacggcaagaccaagugcaccgccuccaacaagaaccgcggcaucaucaagaccuucuccaacggcugcgacuacgucuccaacaagggcgucgacaccgucuccgucggcaacacccucuacugcgucaacaagcaggagggccagucccucuacgucaagggcgagcccaucaucaacuucuacgacccccucgucuuccccuccgacgaguucgacgccuccaucucccaggucaacgagaagaucaaccagucccucgccuucauccgcaaguccgacgagcuccuccacaacgucaacgccggcaaguccaccaccaacaucaugaucaccaccaucaucaucgucaucaucgucauccuccucucccucaucgccgucggccuccuccucuacugcaaggcccgcugaggacuagucccuguucccagagcccacuuuuuuuucuuuuuuugaaauaaaauagccugucuuucagaucuaaaaaaaaaaaaaaaaaaaaaaaaaaaaaaaaaaaaaaaaaaaaaaaaaaaaaaaaaaaaaaaaugcaucccccccccccccccccccccccccccccccaaaggcucuuuucagagccaccagaauu

SEQ ID NO: 3493 - RNA, 1821 nt, Artificial Sequence
  mRNA product Design a-1 comprising derived and/or modified sequence from HRSV(A2)__F-del_DSCav1_mut3 (opt3)
gggagagucccgcagucggcguccagcggcucugcuuguucgugugugugucguugcaggccuuauucaagcuuaccauggagcugcucauccuuaaggccaacgcuauuaccacaauacugacugcagugacguucugcuuugccagcggccagaauaucaccgaagaguucuaccaauccacauguucugcggucucaaaaggguauuugggagcuuuaagaacugguugguacaccaguguuauuacaaucgaacugagcaacauuaaggagaucaaaugcaauggcaccgacgccaaggugaaacuaauaaagcaggaacucgauaaguauaaaaacgcaguaacugaccugcagcuucugaugcaguccacacccgccaccgggucuggaucggcuaucuguucaggcguggcagucugcaagguguugcaccucgagggugagguuaauaaaauuaagagcgcccugcugaguacgaacaaagcuguggucucccucucuaauggggugagcguauuaacuuuuaagguucuggaucuuaagaacuacaucgacaaacaauugcugccuauucuaaauaagcaguccuguucaaucccaaacauagaaaccgugauugaguuccagcagaaaaauaacaggcuccuggaaaucacacgggaguuuagugucaaugccggagugacuaccccggugagcacauauaugcuuaccaacucugagcuguugucccucauuaaugauaugcccaucacgaacgaccaaaagaaacugaugucaaacaauguccagaucguucgccagcagagcuacaguauuaugugcauaaucaaggaagagguguuagcguauguagugcaacugccucucuacggcgucauugauacuccauguuggaaacuucauacaucuccccugugcaccacuaacacaaaggaaggcuccaauaucuguuugacccgaacggaccgugggugguacugcgauaacgcaggaagcgugucguucuuuccucaggccgagaccuguaagguucagucuaauagaguguucugcgacacaaugaacucccuaacucugccaucagaagucaaucucugcaacguggauauauuuaaucccaaauaugacuguaagauuaugaccaguaaaacagauguaagcuccucuguuaucacuagccugggugcuaucgugucaugcuacggcaagaccaaauguacagccaguaacaagaauagggggauuaucaagaccuucuccaacggaugcgacuaugucagcaauaaaggcguggacacugucucuguggguaacacgcuuuacuguguuaauaagcaagaggggcagucacuguaugugaaaggagagccuauuauaaacuuuuacgauccauugguauucccgagugacgaauuugaugcaagcaucucccaggucaacgagaagauuaaucagucucucgcuuucauccggaaaucggacgaacuguuacacaacgugaaugccggcaagagcacaaccaacaucaugauuacuaccauaaucauuguuaucauugugauccugcuaucccucauagcggucggccugcuuuuguauugcaaggcccgcugaggacuagucccuguucccagagcccacuuuuuuuucuuuuuuugaaauaaaauagccugucuuucagaucuaaaaaaaaaaaaaaaaaaaaaaaaaaaaaaaaaaaaaaaaaaaaaaaaaaaaaaaaaaaaaaaaugcaucccccccccccccccccccccccccccccccaaaggcucuuuucagagccaccagaauu

SEQ ID NO: 3494 - RNA, 1821 nt, Artificial Sequence
  mRNA product Design a-1 comprising derived and/or modified sequence from HRSV(A2)__F-del_DSCav1_mut3 (opt4)
gggagagucccgcagucggcguccagcggcucugcuuguucgugugugugucguugcaggccuuauucaagcuuaccauggagcugcugauccugaaggccaacgccaucaccaccauccugaccgccgugaccuucugcuucgccagcggccagaacaucaccgaggaguucuaccagagcaccugcagcgccgugagcaagggcuaccugggcgcccugagaaccggcugguacaccagcgugaucaccaucgagcugagcaacaucaaggagaucaagugcaacggcaccgacgccaaggugaagcugaucaagcaggagcuggacaaguacaagaacgccgugaccgaccugcagcugcugaugcagagcacccccgccaccggcagcggcagcgccaucugcagcggcguggccgugugcaaggugcugcaccuggagggcgaggugaacaagaucaagagcgcccugcugagcaccaacaaggccguggugagccugagcaacggcgugagcgugcugaccuucaaggugcuggaccugaagaacuacaucgacaagcagcugcugcccauccugaacaagcagagcugcagcauccccaacaucgagaccgugaucgaguuccagcagaagaacaacagacugcuggagaucaccagagaguucagcgugaacgccggcgugaccacccccgugagcaccuacaugcugaccaacagcgagcugcugagccugaucaacgacaugcccaucaccaacgaccagaagaagcugaugagcaacaacgugcagaucgugagacagcagagcuacagcaucaugugcaucaucaaggaggaggugcuggccuacguggugcagcugccccuguacggcgugaucgacacccccugcuggaagcugcacaccagcccccugugcaccaccaacaccaaggagggcagcaacaucugccugaccagaaccgacagaggcugguacugcgacaacgccggcagcgugagcuucuucccccaggccgagaccugcaaggugcagagcaacagaguguucugcgacaccaugaacagccugacccugcccagcgaggugaaccugugcaacguggacaucuucaaccccaaguacgacugcaagaucaugaccagcaagaccgacgugagcagcagcgugaucaccagccugggcgccaucgugagcugcuacggcaagaccaagugcaccgccagcaacaagaacagaggcaucaucaagaccuucagcaacggcugcgacuacgugagcaacaagggcguggacaccgugagcgugggcaacacccuguacugcgugaacaagcaggagggccagagccuguacgugaagggcgagcccaucaucaacuucuacgacccccugguguuccccagcgacgaguucgacgccagcaucagccaggugaacgagaagaucaaccagagccuggccuucaucagaaagagcgacgagcugcugcacaacgugaacgccggcaagagcaccaccaacaucaugaucaccaccaucaucaucgugaucaucgugauccugcugagccugaucgccgugggccugcugcuguacugcaaggccagaugaggacuagucccuguucccagagcccacuuuuuuuucuuuuuuugaaauaaaauagccugucuuucagaucuaaaaaaaaaaaaaaaaaaaaaaaaaaaaaaaaaaaaaaaaaaaaaaaaaaaaaaaaaaaaaaaaugcaucccccccccccccccccccccccccccccccaaaggcucuuuucagagccaccagaauu

SEQ ID NO: 3495 - RNA, 1821 nt, Artificial Sequence
  mRNA product Design a-1 comprising derived and/or modified sequence from HRSV(A2)__F-del_DSCav1_mut3 (opt5)
gggagagucccgcagucggcguccagcggcucugcuuguucgugugugugucguugcaggccuuauucaagcuuaccauggagcugcucauccugaaggccaacgcuauuaccacaauccuuacggccgugaccuucugcuuugcgagcggccagaauauuacagaagaguucuaccaauccaccuguucugcugucagcaaaggguaucugggagcccucagaacaggcugguacaccuccguuaucacaauugaacugucuaacaucaaggagaucaaaugcaaugggaccgacgccaaggugaaacuuauuaagcaggaacuggauaaguauaaaaacgcugugacggaccuccagcugcugaugcagagcacccccgccacaggauccggcucugcuaucuguagcggggucgccgugugcaagguucuccaccuggagggagaggugaauaaaauuaaguccgcgcuucugagcaccaacaaagccgucgugucucucuccaauggcguuagcgugcugacauuuaagguccuugaucugaagaacuacaucgacaaacaacuccugccuauucugaauaagcagucuuguuccaucccgaacauugaaaccgugaucgaguuccagcagaaaaauaaccggcuccuggaaaucacgcgcgaguuuagcgugaaugcuggcgucacaacccccguuucuacauauaugcuuaccaacuccgagcugcucagccugauuaaugauaugccuaucaccaacgaccaaaagaaacuuauguccaacaaugugcagauugugagacagcagucuuacagcaucaugugcauuaucaaggaagagguccuggccuaugugguucaacucccccuguacggggugaucgauacaccuuguuggaaacugcauacgagcccccucugcaccacaaacaccaaggaaggauccaauauuugucugacacggaccgaccgcggcugguacugcgauaacgcugggucugucuccuucuuuccucaggccgagacguguaaggugcagagcaauagaguuuucugcgacacaaugaacucucuuacccugccgagcgaagugaaucucugcaacgucgauaucuuuaaucccaaauaugacuguaagauuaugaccuccaaaacagaugugucuagcuccgucaucaccagccugggagcgauugugucuugcuacggcaagacaaaauguacggccuccaacaagaaucgggggaucaucaagaccuucagcaacggaugcgacuauguuucuaauaaaggcguggacacagucuccgugggcaacacccuuuacuguguuaauaagcaagaggggcagagccuguaugugaaaggagagccuauuaucaacuuuuacgauccccucgucuucccuuccgacgaauuugaugcuucuauuagccaggugaacgagaagaucaaucagucccuggccuucauucgcaaaucugacgaacugcuccacaacgugaaugcuggcaagagcacaaccaacaucaugauuacgaccaucaucauuguuaucauugucauccugcuuucccugauugccguggggcuccugcuguauugcaaggccagaugaggacuagucccuguucccagagcccacuuuuuuuucuuuuuuugaaauaaaauagccugucuuucagaucuaaaaaaaaaaaaaaaaaaaaaaaaaaaaaaaaaaaaaaaaaaaaaaaaaaaaaaaaaaaaaaaaugcaucccccccccccccccccccccccccccccccaaaggcucuuuucagagccaccagaauu

SEQ ID NO: 3496 - RNA, 1821 nt, Artificial Sequence
  mRNA product Design a-1 comprising derived and/or modified sequence from HRSV(A2)__F-del_DSCav1_mut3 (opt6)
gggagagucccgcagucggcguccagcggcucugcuuguucgugugugugucguugcaggccuuauucaagcuuaccauggaauuacuaauccugaaagcaaacgcaauuacuacaauacuaacagcaguaaccuuuugcuuugccucaggacaaaacauaacugaagaauuuuaccaaucaacuugcucagcagucucaaaaggcuaucuaggagcacuacgaacagguugguauacuucagucauaacaauagaauuaucaaacauaaaagaaauuaaauguaacggaacugacgcaaaaguaaaacucaucaaacaagaacucgauaaauacaaaaacgcuguaaccgacuuacaacuacuaaugcaaucaacuccagcaacaggcuccggauccgcaauaugcagugguguagcaguaugcaaaguccuacaccuagaaggagaaguaaauaagauaaaaucugcucuacuaucaacaaauaaagcaguugucucccuaucaaauggagucucaguacucaccuucaaaguauuagaccucaaaaacuacauagacaaacaacuauuaccaauacucaacaaacaauccugcuccaucccuaacauagaaaccguaaucgaauuucaacaaaaaaauaacagacucuuagaaauaacuagagaauuuucaguuaaugcaggcgugacaacaccaguaucaacauauaugcuaacaaacuccgaacuccuaucccuaauaaacgacaugccaaucacaaacgaccaaaaaaaacuaauguccaacaacguacaaaucguaagacaacaaucauacucuauaaugugcauaauaaaagaagaaguacuggccuacguaguacaauuaccacucuacggaguaauagacaccccaugcuggaaacuccauacaucaccccuaugcacaacaaacacaaaagaaggauccaacauaugucucacuagaacagacagaggcugguacugcgacaacgcuggauccgucucauucuucccccaagcagaaacauguaaaguacaaucuaauagaguauuuugugacacaaugaacagccucacacuaccauccgaagucaaccuauguaacguagauauauuuaaucccaaauacgacugcaaaauaaugacauccaaaacagauguaucaucauccguuaucaccucacuaggagccauaguuucaugcuacggaaaaacaaaaugcacugcaucuaacaaaaauagagguauaauaaaaacauuuuccaacggcugcgacuacgucucaaacaaaggcguagacaccguaucaguaggaaauacauuauauugcguaaauaaacaagaaggccaaucccuauacguaaaaggagaacccaucauaaacuucuaugacccacuuguuuuccccucagacgaauuugacgccucaauaucacaaguaaaugaaaaaauaaaccaaucucuugccuucauuagaaaaucagacgaauuacuacacaacgucaacgcaggaaaaucaacaacaaacaucaugauaacaacgauaauaauagucauaauaguaauacuacuaucauuaaucgcagucggacuccuauuauauugcaaagcuagauaaggacuagucccuguucccagagcccacuuuuuuuucuuuuuuugaaauaaaauagccugucuuucagaucuaaaaaaaaaaaaaaaaaaaaaaaaaaaaaaaaaaaaaaaaaaaaaaaaaaaaaaaaaaaaaaaaugcaucccccccccccccccccccccccccccccccaaaggcucuuuucagagccaccagaauu

SEQ ID NO: 3497 - RNA, 1821 nt, Artificial Sequence
  mRNA product Design a-1 comprising derived and/or modified sequence from HRSV(A2)__F-del_DSCav1_mut3 (opt11)
gggagagucccgcagucggcguccagcggcucugcuuguucgugugugugucguugcaggccuuauucaagcuuaccauggaacuacucauacuaaaagccaacgccauaaccaccauccucaccgcaguaacuuucugcuucgcuuccggccaaaacaucaccgaagaauuuuaccaaaguaccugcagcgcagucucaaaaggauaccuaggcgcccuacgcacaggcugguacaccuccgucauuaccaucgaacucuccaacaucaaagaaauuaaaugcaacgguacagacgcaaaagucaaacucaucaaacaagaacucgacaaauacaaaaacgcagucaccgaccuccaacuccucaugcaauccacccccgccacaggcucuggcuccgccaucugcucaggcguagcagucugcaaaguccugcaccucgaaggcgaagucaacaaaaucaagucagcccuccucuccaccaacaaggccgucguaucccucucaaacggaguuagcguccucaccuucaaaguccuagaccucaaaaacuacaucgauaaacaacuacuccccauccuaaacaaacaaucaugcuccaucccaaacaucgaaaccguaaucgaguuccaacaaaagaacaaccgccuccucgaaaucacacgugaguucuccguuaacgccggcgucaccacccccgucucuacauacaugcucaccaacuccgaacuccuuucccucaucaacgacaugccaaucaccaacgaccaaaagaaacucaugucaaacaacguacaaaucguccgacaacaaagcuacuccaucaugugcaucaucaaagaagaaguccuugcauacgucguucaacuaccccucuacggcguaaucgacacucccugcuggaaacuccacaccuccccgcucugcacaaccaacaccaaagaaggcagcaacaucugccucacccgaaccgaccgcggcugguacugcgauaacgccggauccgucuccuucuucccacaagcagaaacuugcaaaguccaauccaaccgcgucuucugcgacaccaugaacucccucacacuccccuccgaagucaaccugugcaacgucgacaucuucaacccaaaauacgacugcaaaaucaugaccucaaaaaccgacgucucaucuucugucaucaccucucucggcgcuaucgucuccugcuauggcaaaaccaaaugcaccgccuccaacaagaaccgcggcauuaucaagaccuucuccaacggcugcgacuacgucuccaauaagggcgucgacaccgucucugucggcaacacccuuuacugcguaaacaaacaagaaggucaaucucucuacgucaaaggagaacccaucaucaacuucuacgacccccuggucuuccccuccgacgaguucgaugcaucaaucucccaagucaacgaaaagaucaaccaaucucucgcuuucauccgcaaauccgacgaacuccuacacaacguaaacgccggcaaauccaccacaaacaucaugaucaccaccauuaucauagucaucaucgucauccuccucuccuuaaucgccguuggccuccuucucuacugcaaagcccgauaaggacuagucccuguucccagagcccacuuuuuuuucuuuuuuugaaauaaaauagccugucuuucagaucuaaaaaaaaaaaaaaaaaaaaaaaaaaaaaaaaaaaaaaaaaaaaaaaaaaaaaaaaaaaaaaaaugcaucccccccccccccccccccccccccccccccaaaggcucuuuucagagccaccagaauu

SEQ ID NO: 3498 - RNA, 1840 nt, Artificial Sequence
  mRNA product Design a-2 comprising derived and/or modified sequence from HRSV(A2)__F-del_DSCav1_mut3 (opt1)
gggagaguccgcucagccagguugcagaagcggcuuagcguguguccuaaucuucucucugcguguagguaggccugugccgcaaacaagcuuaccauggagcugcucauccugaaggccaacgccaucaccaccauccugacggcggugaccuucugcuucgccagcggccagaacaucaccgaggaguucuaccaguccacgugcagcgccgucuccaagggguaccucggcgcccugcggaccggcugguacaccuccgugaucaccaucgagcugagcaacaucaaggagaucaagugcaacgggaccgacgccaaggugaagcucaucaagcaggagcuggacaaguacaagaacgcggucacggaccugcagcuccugaugcaguccaccccggcaaccggcuccggcuccgccaucugcagcggcgucgccgugugcaaggugcugcaccucgagggggaggucaacaagaucaagagcgcccugcuguccaccaacaaggccguggugagccucuccaacggcgucagcgugcugaccuucaaggugcuggaccucaagaacuacaucgacaagcagcugcugcccauccugaacaagcagagcugcuccauccccaacaucgagacggugaucgaguuccagcagaagaacaaccggcuccuggagaucacccgcgaguucagcgugaacgccggggucaccacccccguguccacguacaugcugaccaacagcgagcuccugucccugaucaacgacaugccgaucaccaacgaccagaagaagcucaugagcaacaacgugcagaucguccggcagcaguccuacagcaucaugugcaucaucaaggaggaggugcuggcguacgugguccagcugccccucuacggcgugaucgacacccccugcuggaagcugcacacgagcccccugugcaccaccaacaccaaggagggguccaacaucugccucacgcgcaccgaccggggcugguacugcgacaacgccggcagcgucuccuucuucccgcaggccgagaccugcaaggugcagagcaaccgcguguucugcgacaccaugaacucccugacgcugcccagcgagguaaaccucugcaacgucgacaucuucaaccccaaguacgacugcaagaucaugaccuccaagaccgacgugagcuccagcgugaucaccucccugggggccaucgucagcugcuacggcaagacgaagugcaccgccagcaacaagaaccgggggaucaucaagaccuucuccaacggcugcgacuacgugagcaacaagggcguggacaccguguccgucgggaacacccuguacugcgugaacaagcaggagggccagagccucuacgugaagggggagcccaucaucaacuucuacgacccgcuggucuuccccuccgacgaguucgacgcgagcaucucccaggugaacgagaagaucaaccagagccuggccuucauccgcaaguccgacgagcugcuccacaacgugaacgccggcaagagcacgaccaacaucaugaucaccaccaucaucaucgucaucaucgugauccugcugucccucaucgccguggggcugcugcucuacugcaaggcccggugaggacuagucccuguucccagagcccacuuuuuuuucuuuuuuugaaauaaaauagccugucuuucagaucuaaaaaaaaaaaaaaaaaaaaaaaaaaaaaaaaaaaaaaaaaaaaaaaaaaaaaaaaaaaaaaaaugcaucccccccccccccccccccccccccccccccaaaggcucuuuucagagccaccagaauu

SEQ ID NO: 3499 - RNA, 1840 nt, Artificial Sequence
  mRNA product Design a-2 comprising derived and/or modified sequence from HRSV(A2)__F-del_DSCav1_mut3 (opt1)
gggagaguccgcucagccagguugcagaagcggcuuagcguguguccuaaucuucucucugcguguagguaggccugugccgcaaacaagcuuaccauggagcugcucauccugaaggccaacgccaucaccaccauccugacggcggugaccuucugcuucgccagcggccagaacaucaccgaggaguucuaccaguccacgugcagcgccgucuccaagggguaccucggcgcccugcgcaccgggugguacaccagcgugaucaccaucgagcuguccaacaucaaggagaucaagugcaacggcaccgacgccaaggugaagcucaucaagcaggagcuggacaaguacaagaacgcggucacggaccugcagcuccugaugcagagcacccccgccaccggguccggcagcgccaucugcuccggcguggccgugugcaagguccugcaccucgagggggaggugaacaagaucaagagcgcgcugcuguccaccaacaaggccguggucagccucuccaacggcgugagcgugcugacguucaagguccuggaccucaagaacuacaucgacaagcagcugcugccgauccucaacaagcaguccugcagcauccccaacaucgagaccgugaucgaguuccagcagaagaacaaccggcugcuggagaucacccgcgaguucuccgugaacgccggggucaccacgcccgugagcaccuacaugcucaccaacuccgagcugcugagccucaucaacgacaugcccaucaccaacgaccagaagaagcugaugagcaacaacgugcagaucguccggcagcaguccuacagcaucaugugcaucaucaaggaggaggugcuggccuacgugguccagcucccgcuguacggcgugaucgacacgcccugcuggaagcugcacaccagcccccucugcaccaccaacacgaaggagggguccaacaucugccugacccgcaccgaccggggcugguacugcgacaacgccggcuccgugagcuucuucccccaggcggagaccugcaagguccaguccaaccgcguguucugcgacacgaugaacagccugacccucccguccgaggucaaccugugcaacguggacaucuucaaccccaaguacgacugcaagaucaugaccagcaagaccgacguguccagcuccgucaucacgagccugggggccaucguguccugcuacggcaagaccaagugcaccgccagcaacaagaaccgggggaucaucaagaccuucuccaacggcugcgacuacgugagcaacaagggcgucgacacgguguccguggggaacacccucuacugcgucaacaagcaggagggccagagccuguacgugaagggggagcccaucaucaacuucuacgacccccugguguucccgagcgacgaguucgacgccuccaucagccaggucaacgagaagaucaaccagucccucgccuucauccgcaagagcgacgagcugcugcacaacgugaacgcgggcaaguccaccaccaacaucaugaucaccacgaucaucaucgugaucaucgucauccuccugagccugaucgccguggggcuccugcuguacugcaaggcccggugaggacuagucccuguucccagagcccacuuuuuuuucuuuuuuugaaauaaaauagccugucuuucagaucuaaaaaaaaaaaaaaaaaaaaaaaaaaaaaaaaaaaaaaaaaaaaaaaaaaaaaaaaaaaaaaaaugcaucccccccccccccccccccccccccccccccaaaggcucuuuucagagccaccagaauu

SEQ ID NO: 3500 - RNA, 1840 nt, Artificial Sequence
  mRNA product Design a-2 comprising derived and/or modified sequence from HRSV(A2)__F-del_DSCav1_mut3 (opt2)
gggagaguccgcucagccagguugcagaagcggcuuagcguguguccuaaucuucucucugcguguagguaggccugugccgcaaacaagcuuaccauggagcuccucauccucaaggccaacgccaucaccaccauccucaccgccgucaccuucugcuucgccuccggccagaacaucaccgaggaguucuaccaguccaccugcuccgccgucuccaagggcuaccucggcgcccuccgcaccggcugguacaccuccgucaucaccaucgagcucuccaacaucaaggagaucaagugcaacggcaccgacgccaaggucaagcucaucaagcaggagcucgacaaguacaagaacgccgucaccgaccuccagcuccucaugcaguccacccccgccaccggcuccggcuccgccaucugcuccggcgucgccgucugcaagguccuccaccucgagggcgaggucaacaagaucaaguccgcccuccucuccaccaacaaggccgucgucucccucuccaacggcgucuccguccucaccuucaagguccucgaccucaagaacuacaucgacaagcagcuccuccccauccucaacaagcaguccugcuccauccccaacaucgagaccgucaucgaguuccagcagaagaacaaccgccuccucgagaucacccgcgaguucuccgucaacgccggcgucaccacccccgucuccaccuacaugcucaccaacuccgagcuccucucccucaucaacgacaugcccaucaccaacgaccagaagaagcucauguccaacaacguccagaucguccgccagcaguccuacuccaucaugugcaucaucaaggaggagguccucgccuacgucguccagcucccccucuacggcgucaucgacacccccugcuggaagcuccacaccuccccccucugcaccaccaacaccaaggagggcuccaacaucugccucacccgcaccgaccgcggcugguacugcgacaacgccggcuccgucuccuucuucccccaggccgagaccugcaagguccaguccaaccgcgucuucugcgacaccaugaacucccucacccuccccuccgaggucaaccucugcaacgucgacaucuucaaccccaaguacgacugcaagaucaugaccuccaagaccgacgucuccuccuccgucaucaccucccucggcgccaucgucuccugcuacggcaagaccaagugcaccgccuccaacaagaaccgcggcaucaucaagaccuucuccaacggcugcgacuacgucuccaacaagggcgucgacaccgucuccgucggcaacacccucuacugcgucaacaagcaggagggccagucccucuacgucaagggcgagcccaucaucaacuucuacgacccccucgucuuccccuccgacgaguucgacgccuccaucucccaggucaacgagaagaucaaccagucccucgccuucauccgcaaguccgacgagcuccuccacaacgucaacgccggcaaguccaccaccaacaucaugaucaccaccaucaucaucgucaucaucgucauccuccucucccucaucgccgucggccuccuccucuacugcaaggcccgcugaggacuagucccuguucccagagcccacuuuuuuuucuuuuuuugaaauaaaauagccugucuuucagaucuaaaaaaaaaaaaaaaaaaaaaaaaaaaaaaaaaaaaaaaaaaaaaaaaaaaaaaaaaaaaaaaaugcaucccccccccccccccccccccccccccccccaaaggcucuuuucagagccaccagaauu

SEQ ID NO: 3501 - RNA, 1840 nt, Artificial Sequence
  mRNA product Design a-2 comprising derived and/or modified sequence from HRSV(A2)__F-del_DSCav1_mut3 (opt3)
gggagaguccgcucagccagguugcagaagcggcuuagcguguguccuaaucuucucucugcguguagguaggccugugccgcaaacaagcuuaccauggagcugcucauccuuaaggccaacgcuauuaccacaauacugacugcagugacguucugcuuugccagcggccagaauaucaccgaagaguucuaccaauccacauguucugcggucucaaaaggguauuugggagcuuuaagaacugguugguacaccaguguuauuacaaucgaacugagcaacauuaaggagaucaaaugcaauggcaccgacgccaaggugaaacuaauaaagcaggaacucgauaaguauaaaaacgcaguaacugaccugcagcuucugaugcaguccacacccgccaccgggucuggaucggcuaucuguucaggcguggcagucugcaagguguugcaccucgagggugagguuaauaaaauuaagagcgcccugcugaguacgaacaaagcuguggucucccucucuaauggggugagcguauuaacuuuuaagguucuggaucuuaagaacuacaucgacaaacaauugcugccuauucuaaauaagcaguccuguucaaucccaaacauagaaaccgugauugaguuccagcagaaaaauaacaggcuccuggaaaucacacgggaguuuagugucaaugccggagugacuaccccggugagcacauauaugcuuaccaacucugagcuguugucccucauuaaugauaugcccaucacgaacgaccaaaagaaacugaugucaaacaauguccagaucguucgccagcagagcuacaguauuaugugcauaaucaaggaagagguguuagcguauguagugcaacugccucucuacggcgucauugauacuccauguuggaaacuucauacaucuccccugugcaccacuaacacaaaggaaggcuccaauaucuguuugacccgaacggaccgugggugguacugcgauaacgcaggaagcgugucguucuuuccucaggccgagaccuguaagguucagucuaauagaguguucugcgacacaaugaacucccuaacucugccaucagaagucaaucucugcaacguggauauauuuaaucccaaauaugacuguaagauuaugaccaguaaaacagauguaagcuccucuguuaucacuagccugggugcuaucgugucaugcuacggcaagaccaaauguacagccaguaacaagaauagggggauuaucaagaccuucuccaacggaugcgacuaugucagcaauaaaggcguggacacugucucuguggguaacacgcuuuacuguguuaauaagcaagaggggcagucacuguaugugaaaggagagccuauuauaaacuuuuacgauccauugguauucccgagugacgaauuugaugcaagcaucucccaggucaacgagaagauuaaucagucucucgcuuucauccggaaaucggacgaacuguuacacaacgugaaugccggcaagagcacaaccaacaucaugauuacuaccauaaucauuguuaucauugugauccugcuaucccucauagcggucggccugcuuuuguauugcaaggcccgcugaggacuagucccuguucccagagcccacuuuuuuuucuuuuuuugaaauaaaauagccugucuuucagaucuaaaaaaaaaaaaaaaaaaaaaaaaaaaaaaaaaaaaaaaaaaaaaaaaaaaaaaaaaaaaaaaaugcaucccccccccccccccccccccccccccccccaaaggcucuuuucagagccaccagaauu

SEQ ID NO: 3502 - RNA, 1840 nt, Artificial Sequence
  mRNA product Design a-2 comprising derived and/or modified sequence from HRSV(A2)__F-del_DSCav1_mut3 (opt4)
gggagaguccgcucagccagguugcagaagcggcuuagcguguguccuaaucuucucucugcguguagguaggccugugccgcaaacaagcuuaccauggagcugcugauccugaaggccaacgccaucaccaccauccugaccgccgugaccuucugcuucgccagcggccagaacaucaccgaggaguucuaccagagcaccugcagcgccgugagcaagggcuaccugggcgcccugagaaccggcugguacaccagcgugaucaccaucgagcugagcaacaucaaggagaucaagugcaacggcaccgacgccaaggugaagcugaucaagcaggagcuggacaaguacaagaacgccgugaccgaccugcagcugcugaugcagagcacccccgccaccggcagcggcagcgccaucugcagcggcguggccgugugcaaggugcugcaccuggagggcgaggugaacaagaucaagagcgcccugcugagcaccaacaaggccguggugagccugagcaacggcgugagcgugcugaccuucaaggugcuggaccugaagaacuacaucgacaagcagcugcugcccauccugaacaagcagagcugcagcauccccaacaucgagaccgugaucgaguuccagcagaagaacaacagacugcuggagaucaccagagaguucagcgugaacgccggcgugaccacccccgugagcaccuacaugcugaccaacagcgagcugcugagccugaucaacgacaugcccaucaccaacgaccagaagaagcugaugagcaacaacgugcagaucgugagacagcagagcuacagcaucaugugcaucaucaaggaggaggugcuggccuacguggugcagcugccccuguacggcgugaucgacacccccugcuggaagcugcacaccagcccccugugcaccaccaacaccaaggagggcagcaacaucugccugaccagaaccgacagaggcugguacugcgacaacgccggcagcgugagcuucuucccccaggccgagaccugcaaggugcagagcaacagaguguucugcgacaccaugaacagccugacccugcccagcgaggugaaccugugcaacguggacaucuucaaccccaaguacgacugcaagaucaugaccagcaagaccgacgugagcagcagcgugaucaccagccugggcgccaucgugagcugcuacggcaagaccaagugcaccgccagcaacaagaacagaggcaucaucaagaccuucagcaacggcugcgacuacgugagcaacaagggcguggacaccgugagcgugggcaacacccuguacugcgugaacaagcaggagggccagagccuguacgugaagggcgagcccaucaucaacuucuacgacccccugguguuccccagcgacgaguucgacgccagcaucagccaggugaacgagaagaucaaccagagccuggccuucaucagaaagagcgacgagcugcugcacaacgugaacgccggcaagagcaccaccaacaucaugaucaccaccaucaucaucgugaucaucgugauccugcugagccugaucgccgugggccugcugcuguacugcaaggccagaugaggacuagucccuguucccagagcccacuuuuuuuucuuuuuuugaaauaaaauagccugucuuucagaucuaaaaaaaaaaaaaaaaaaaaaaaaaaaaaaaaaaaaaaaaaaaaaaaaaaaaaaaaaaaaaaaaugcaucccccccccccccccccccccccccccccccaaaggcucuuuucagagccaccagaauu

SEQ ID NO: 3503 - RNA, 1840 nt, Artificial Sequence
  mRNA product Design a-2 comprising derived and/or modified sequence from HRSV(A2)__F-del_DSCav1_mut3 (opt5)
gggagaguccgcucagccagguugcagaagcggcuuagcguguguccuaaucuucucucugcguguagguaggccugugccgcaaacaagcuuaccauggagcugcucauccugaaggccaacgcuauuaccacaauccuuacggccgugaccuucugcuuugcgagcggccagaauauuacagaagaguucuaccaauccaccuguucugcugucagcaaaggguaucugggagcccucagaacaggcugguacaccuccguuaucacaauugaacugucuaacaucaaggagaucaaaugcaaugggaccgacgccaaggugaaacuuauuaagcaggaacuggauaaguauaaaaacgcugugacggaccuccagcugcugaugcagagcacccccgccacaggauccggcucugcuaucuguagcggggucgccgugugcaagguucuccaccuggagggagaggugaauaaaauuaaguccgcgcuucugagcaccaacaaagccgucgugucucucuccaauggcguuagcgugcugacauuuaagguccuugaucugaagaacuacaucgacaaacaacuccugccuauucugaauaagcagucuuguuccaucccgaacauugaaaccgugaucgaguuccagcagaaaaauaaccggcuccuggaaaucacgcgcgaguuuagcgugaaugcuggcgucacaacccccguuucuacauauaugcuuaccaacuccgagcugcucagccugauuaaugauaugccuaucaccaacgaccaaaagaaacuuauguccaacaaugugcagauugugagacagcagucuuacagcaucaugugcauuaucaaggaagagguccuggccuaugugguucaacucccccuguacggggugaucgauacaccuuguuggaaacugcauacgagcccccucugcaccacaaacaccaaggaaggauccaauauuugucugacacggaccgaccgcggcugguacugcgauaacgcugggucugucuccuucuuuccucaggccgagacguguaaggugcagagcaauagaguuuucugcgacacaaugaacucucuuacccugccgagcgaagugaaucucugcaacgucgauaucuuuaaucccaaauaugacuguaagauuaugaccuccaaaacagaugugucuagcuccgucaucaccagccugggagcgauugugucuugcuacggcaagacaaaauguacggccuccaacaagaaucgggggaucaucaagaccuucagcaacggaugcgacuauguuucuaauaaaggcguggacacagucuccgugggcaacacccuuuacuguguuaauaagcaagaggggcagagccuguaugugaaaggagagccuauuaucaacuuuuacgauccccucgucuucccuuccgacgaauuugaugcuucuauuagccaggugaacgagaagaucaaucagucccuggccuucauucgcaaaucugacgaacugcuccacaacgugaaugcuggcaagagcacaaccaacaucaugauuacgaccaucaucauuguuaucauugucauccugcuuucccugauugccguggggcuccugcuguauugcaaggccagaugaggacuagucccuguucccagagcccacuuuuuuuucuuuuuuugaaauaaaauagccugucuuucagaucuaaaaaaaaaaaaaaaaaaaaaaaaaaaaaaaaaaaaaaaaaaaaaaaaaaaaaaaaaaaaaaaaugcaucccccccccccccccccccccccccccccccaaaggcucuuuucagagccaccagaauu

SEQ ID NO: 3504 - RNA, 1840 nt, Artificial Sequence
  mRNA product Design a-2 comprising derived and/or modified sequence from HRSV(A2)__F-del_DSCav1_mut3 (opt6)
gggagaguccgcucagccagguugcagaagcggcuuagcguguguccuaaucuucucucugcguguagguaggccugugccgcaaacaagcuuaccauggaauuacuaauccugaaagcaaacgcaauuacuacaauacuaacagcaguaaccuuuugcuuugccucaggacaaaacauaacugaagaauuuuaccaaucaacuugcucagcagucucaaaaggcuaucuaggagcacuacgaacagguugguauacuucagucauaacaauagaauuaucaaacauaaaagaaauuaaauguaacggaacugacgcaaaaguaaaacucaucaaacaagaacucgauaaauacaaaaacgcuguaaccgacuuacaacuacuaaugcaaucaacuccagcaacaggcuccggauccgcaauaugcagugguguagcaguaugcaaaguccuacaccuagaaggagaaguaaauaagauaaaaucugcucuacuaucaacaaauaaagcaguugucucccuaucaaauggagucucaguacucaccuucaaaguauuagaccucaaaaacuacauagacaaacaacuauuaccaauacucaacaaacaauccugcuccaucccuaacauagaaaccguaaucgaauuucaacaaaaaaauaacagacucuuagaaauaacuagagaauuuucaguuaaugcaggcgugacaacaccaguaucaacauauaugcuaacaaacuccgaacuccuaucccuaauaaacgacaugccaaucacaaacgaccaaaaaaaacuaauguccaacaacguacaaaucguaagacaacaaucauacucuauaaugugcauaauaaaagaagaaguacuggccuacguaguacaauuaccacucuacggaguaauagacaccccaugcuggaaacuccauacaucaccccuaugcacaacaaacacaaaagaaggauccaacauaugucucacuagaacagacagaggcugguacugcgacaacgcuggauccgucucauucuucccccaagcagaaacauguaaaguacaaucuaauagaguauuuugugacacaaugaacagccucacacuaccauccgaagucaaccuauguaacguagauauauuuaaucccaaauacgacugcaaaauaaugacauccaaaacagauguaucaucauccguuaucaccucacuaggagccauaguuucaugcuacggaaaaacaaaaugcacugcaucuaacaaaaauagagguauaauaaaaacauuuuccaacggcugcgacuacgucucaaacaaaggcguagacaccguaucaguaggaaauacauuauauugcguaaauaaacaagaaggccaaucccuauacguaaaaggagaacccaucauaaacuucuaugacccacuuguuuuccccucagacgaauuugacgccucaauaucacaaguaaaugaaaaaauaaaccaaucucuugccuucauuagaaaaucagacgaauuacuacacaacgucaacgcaggaaaaucaacaacaaacaucaugauaacaacgauaauaauagucauaauaguaauacuacuaucauuaaucgcagucggacuccuauuauauugcaaagcuagauaaggacuagucccuguucccagagcccacuuuuuuuucuuuuuuugaaauaaaauagccugucuuucagaucuaaaaaaaaaaaaaaaaaaaaaaaaaaaaaaaaaaaaaaaaaaaaaaaaaaaaaaaaaaaaaaaaugcaucccccccccccccccccccccccccccccccaaaggcucuuuucagagccaccagaauu

SEQ ID NO: 3505 - RNA, 1840 nt, Artificial Sequence
  mRNA product Design a-2 comprising derived and/or modified sequence from HRSV(A2)__F-del_DSCav1_mut3 (opt11)
gggagaguccgcucagccagguugcagaagcggcuuagcguguguccuaaucuucucucugcguguagguaggccugugccgcaaacaagcuuaccauggaacuacucauacuaaaagccaacgccauaaccaccauccucaccgcaguaacuuucugcuucgcuuccggccaaaacaucaccgaagaauuuuaccaaaguaccugcagcgcagucucaaaaggauaccuaggcgcccuacgcacaggcugguacaccuccgucauuaccaucgaacucuccaacaucaaagaaauuaaaugcaacgguacagacgcaaaagucaaacucaucaaacaagaacucgacaaauacaaaaacgcagucaccgaccuccaacuccucaugcaauccacccccgccacaggcucuggcuccgccaucugcucaggcguagcagucugcaaaguccugcaccucgaaggcgaagucaacaaaaucaagucagcccuccucuccaccaacaaggccgucguaucccucucaaacggaguuagcguccucaccuucaaaguccuagaccucaaaaacuacaucgauaaacaacuacuccccauccuaaacaaacaaucaugcuccaucccaaacaucgaaaccguaaucgaguuccaacaaaagaacaaccgccuccucgaaaucacacgugaguucuccguuaacgccggcgucaccacccccgucucuacauacaugcucaccaacuccgaacuccuuucccucaucaacgacaugccaaucaccaacgaccaaaagaaacucaugucaaacaacguacaaaucguccgacaacaaagcuacuccaucaugugcaucaucaaagaagaaguccuugcauacgucguucaacuaccccucuacggcguaaucgacacucccugcuggaaacuccacaccuccccgcucugcacaaccaacaccaaagaaggcagcaacaucugccucacccgaaccgaccgcggcugguacugcgauaacgccggauccgucuccuucuucccacaagcagaaacuugcaaaguccaauccaaccgcgucuucugcgacaccaugaacucccucacacuccccuccgaagucaaccugugcaacgucgacaucuucaacccaaaauacgacugcaaaaucaugaccucaaaaaccgacgucucaucuucugucaucaccucucucggcgcuaucgucuccugcuauggcaaaaccaaaugcaccgccuccaacaagaaccgcggcauuaucaagaccuucuccaacggcugcgacuacgucuccaauaagggcgucgacaccgucucugucggcaacacccuuuacugcguaaacaaacaagaaggucaaucucucuacgucaaaggagaacccaucaucaacuucuacgacccccuggucuuccccuccgacgaguucgaugcaucaaucucccaagucaacgaaaagaucaaccaaucucucgcuuucauccgcaaauccgacgaacuccuacacaacguaaacgccggcaaauccaccacaaacaucaugaucaccaccauuaucauagucaucaucgucauccuccucuccuuaaucgccguuggccuccuucucuacugcaaagcccgauaaggacuagucccuguucccagagcccacuuuuuuuucuuuuuuugaaauaaaauagccugucuuucagaucuaaaaaaaaaaaaaaaaaaaaaaaaaaaaaaaaaaaaaaaaaaaaaaaaaaaaaaaaaaaaaaaaugcaucccccccccccccccccccccccccccccccaaaggcucuuuucagagccaccagaauu

SEQ ID NO: 3506 - RNA, 1918 nt, Artificial Sequence
  mRNA product Design a-3 comprising derived and/or modified sequence from HRSV(A2)__F-del_DSCav1_mut3 (opt1)
gggagagggcgcuuggcuugcaaggacccugagcugcggcauugaagcacacccaacccaacucgacugaagucagccucacugaaccggaucugagaaucuucucucucugggcuugccagggcucuccgaaccuagcuagcauccucuucaauuccaacuagaaagcuuaccauggagcugcucauccugaaggccaacgccaucaccaccauccugacggcggugaccuucugcuucgccagcggccagaacaucaccgaggaguucuaccaguccacgugcagcgccgucuccaagggguaccucggcgcccugcggaccggcugguacaccuccgugaucaccaucgagcugagcaacaucaaggagaucaagugcaacgggaccgacgccaaggugaagcucaucaagcaggagcuggacaaguacaagaacgcggucacggaccugcagcuccugaugcaguccaccccggcaaccggcuccggcuccgccaucugcagcggcgucgccgugugcaaggugcugcaccucgagggggaggucaacaagaucaagagcgcccugcuguccaccaacaaggccguggugagccucuccaacggcgucagcgugcugaccuucaaggugcuggaccucaagaacuacaucgacaagcagcugcugcccauccugaacaagcagagcugcuccauccccaacaucgagacggugaucgaguuccagcagaagaacaaccggcuccuggagaucacccgcgaguucagcgugaacgccggggucaccacccccguguccacguacaugcugaccaacagcgagcuccugucccugaucaacgacaugccgaucaccaacgaccagaagaagcucaugagcaacaacgugcagaucguccggcagcaguccuacagcaucaugugcaucaucaaggaggaggugcuggcguacgugguccagcugccccucuacggcgugaucgacacccccugcuggaagcugcacacgagcccccugugcaccaccaacaccaaggagggguccaacaucugccucacgcgcaccgaccggggcugguacugcgacaacgccggcagcgucuccuucuucccgcaggccgagaccugcaaggugcagagcaaccgcguguucugcgacaccaugaacucccugacgcugcccagcgagguaaaccucugcaacgucgacaucuucaaccccaaguacgacugcaagaucaugaccuccaagaccgacgugagcuccagcgugaucaccucccugggggccaucgucagcugcuacggcaagacgaagugcaccgccagcaacaagaaccgggggaucaucaagaccuucuccaacggcugcgacuacgugagcaacaagggcguggacaccguguccgucgggaacacccuguacugcgugaacaagcaggagggccagagccucuacgugaagggggagcccaucaucaacuucuacgacccgcuggucuuccccuccgacgaguucgacgcgagcaucucccaggugaacgagaagaucaaccagagccuggccuucauccgcaaguccgacgagcugcuccacaacgugaacgccggcaagagcacgaccaacaucaugaucaccaccaucaucaucgucaucaucgugauccugcugucccucaucgccguggggcugcugcucuacugcaaggcccggugaggacuagucccuguucccagagcccacuuuuuuuucuuuuuuugaaauaaaauagccugucuuucagaucuaaaaaaaaaaaaaaaaaaaaaaaaaaaaaaaaaaaaaaaaaaaaaaaaaaaaaaaaaaaaaaaaugcaucccccccccccccccccccccccccccccccaaaggcucuuuucagagccaccagaauu

SEQ ID NO: 3507 - RNA, 1918 nt, Artificial Sequence
  mRNA product Design a-3 comprising derived and/or modified sequence from HRSV(A2)__F-del_DSCav1_mut3 (opt1)
gggagagggcgcuuggcuugcaaggacccugagcugcggcauugaagcacacccaacccaacucgacugaagucagccucacugaaccggaucugagaaucuucucucucugggcuugccagggcucuccgaaccuagcuagcauccucuucaauuccaacuagaaagcuuaccauggagcugcucauccugaaggccaacgccaucaccaccauccugacggcggugaccuucugcuucgccagcggccagaacaucaccgaggaguucuaccaguccacgugcagcgccgucuccaagggguaccucggcgcccugcgcaccgggugguacaccagcgugaucaccaucgagcuguccaacaucaaggagaucaagugcaacggcaccgacgccaaggugaagcucaucaagcaggagcuggacaaguacaagaacgcggucacggaccugcagcuccugaugcagagcacccccgccaccggguccggcagcgccaucugcuccggcguggccgugugcaagguccugcaccucgagggggaggugaacaagaucaagagcgcgcugcuguccaccaacaaggccguggucagccucuccaacggcgugagcgugcugacguucaagguccuggaccucaagaacuacaucgacaagcagcugcugccgauccucaacaagcaguccugcagcauccccaacaucgagaccgugaucgaguuccagcagaagaacaaccggcugcuggagaucacccgcgaguucuccgugaacgccggggucaccacgcccgugagcaccuacaugcucaccaacuccgagcugcugagccucaucaacgacaugcccaucaccaacgaccagaagaagcugaugagcaacaacgugcagaucguccggcagcaguccuacagcaucaugugcaucaucaaggaggaggugcuggccuacgugguccagcucccgcuguacggcgugaucgacacgcccugcuggaagcugcacaccagcccccucugcaccaccaacacgaaggagggguccaacaucugccugacccgcaccgaccggggcugguacugcgacaacgccggcuccgugagcuucuucccccaggcggagaccugcaagguccaguccaaccgcguguucugcgacacgaugaacagccugacccucccguccgaggucaaccugugcaacguggacaucuucaaccccaaguacgacugcaagaucaugaccagcaagaccgacguguccagcuccgucaucacgagccugggggccaucguguccugcuacggcaagaccaagugcaccgccagcaacaagaaccgggggaucaucaagaccuucuccaacggcugcgacuacgugagcaacaagggcgucgacacgguguccguggggaacacccucuacugcgucaacaagcaggagggccagagccuguacgugaagggggagcccaucaucaacuucuacgacccccugguguucccgagcgacgaguucgacgccuccaucagccaggucaacgagaagaucaaccagucccucgccuucauccgcaagagcgacgagcugcugcacaacgugaacgcgggcaaguccaccaccaacaucaugaucaccacgaucaucaucgugaucaucgucauccuccugagccugaucgccguggggcuccugcuguacugcaaggcccggugaggacuagucccuguucccagagcccacuuuuuuuucuuuuuuugaaauaaaauagccugucuuucagaucuaaaaaaaaaaaaaaaaaaaaaaaaaaaaaaaaaaaaaaaaaaaaaaaaaaaaaaaaaaaaaaaaugcaucccccccccccccccccccccccccccccccaaaggcucuuuucagagccaccagaauu

SEQ ID NO: 3508 - RNA, 1918 nt, Artificial Sequence
  mRNA product Design a-3 comprising derived and/or modified sequence from HRSV(A2)__F-del_DSCav1_mut3 (opt2)
gggagagggcgcuuggcuugcaaggacccugagcugcggcauugaagcacacccaacccaacucgacugaagucagccucacugaaccggaucugagaaucuucucucucugggcuugccagggcucuccgaaccuagcuagcauccucuucaauuccaacuagaaagcuuaccauggagcuccucauccucaaggccaacgccaucaccaccauccucaccgccgucaccuucugcuucgccuccggccagaacaucaccgaggaguucuaccaguccaccugcuccgccgucuccaagggcuaccucggcgcccuccgcaccggcugguacaccuccgucaucaccaucgagcucuccaacaucaaggagaucaagugcaacggcaccgacgccaaggucaagcucaucaagcaggagcucgacaaguacaagaacgccgucaccgaccuccagcuccucaugcaguccacccccgccaccggcuccggcuccgccaucugcuccggcgucgccgucugcaagguccuccaccucgagggcgaggucaacaagaucaaguccgcccuccucuccaccaacaaggccgucgucucccucuccaacggcgucuccguccucaccuucaagguccucgaccucaagaacuacaucgacaagcagcuccuccccauccucaacaagcaguccugcuccauccccaacaucgagaccgucaucgaguuccagcagaagaacaaccgccuccucgagaucacccgcgaguucuccgucaacgccggcgucaccacccccgucuccaccuacaugcucaccaacuccgagcuccucucccucaucaacgacaugcccaucaccaacgaccagaagaagcucauguccaacaacguccagaucguccgccagcaguccuacuccaucaugugcaucaucaaggaggagguccucgccuacgucguccagcucccccucuacggcgucaucgacacccccugcuggaagcuccacaccuccccccucugcaccaccaacaccaaggagggcuccaacaucugccucacccgcaccgaccgcggcugguacugcgacaacgccggcuccgucuccuucuucccccaggccgagaccugcaagguccaguccaaccgcgucuucugcgacaccaugaacucccucacccuccccuccgaggucaaccucugcaacgucgacaucuucaaccccaaguacgacugcaagaucaugaccuccaagaccgacgucuccuccuccgucaucaccucccucggcgccaucgucuccugcuacggcaagaccaagugcaccgccuccaacaagaaccgcggcaucaucaagaccuucuccaacggcugcgacuacgucuccaacaagggcgucgacaccgucuccgucggcaacacccucuacugcgucaacaagcaggagggccagucccucuacgucaagggcgagcccaucaucaacuucuacgacccccucgucuuccccuccgacgaguucgacgccuccaucucccaggucaacgagaagaucaaccagucccucgccuucauccgcaaguccgacgagcuccuccacaacgucaacgccggcaaguccaccaccaacaucaugaucaccaccaucaucaucgucaucaucgucauccuccucucccucaucgccgucggccuccuccucuacugcaaggcccgcugaggacuagucccuguucccagagcccacuuuuuuuucuuuuuuugaaauaaaauagccugucuuucagaucuaaaaaaaaaaaaaaaaaaaaaaaaaaaaaaaaaaaaaaaaaaaaaaaaaaaaaaaaaaaaaaaaugcaucccccccccccccccccccccccccccccccaaaggcucuuuucagagccaccagaauu

SEQ ID NO: 3509 - RNA, 1918 nt, Artificial Sequence
  mRNA product Design a-3 comprising derived and/or modified sequence from HRSV(A2)__F-del_DSCav1_mut3 (opt3)
gggagagggcgcuuggcuugcaaggacccugagcugcggcauugaagcacacccaacccaacucgacugaagucagccucacugaaccggaucugagaaucuucucucucugggcuugccagggcucuccgaaccuagcuagcauccucuucaauuccaacuagaaagcuuaccauggagcugcucauccuuaaggccaacgcuauuaccacaauacugacugcagugacguucugcuuugccagcggccagaauaucaccgaagaguucuaccaauccacauguucugcggucucaaaaggguauuugggagcuuuaagaacugguugguacaccaguguuauuacaaucgaacugagcaacauuaaggagaucaaaugcaauggcaccgacgccaaggugaaacuaauaaagcaggaacucgauaaguauaaaaacgcaguaacugaccugcagcuucugaugcaguccacacccgccaccgggucuggaucggcuaucuguucaggcguggcagucugcaagguguugcaccucgagggugagguuaauaaaauuaagagcgcccugcugaguacgaacaaagcuguggucucccucucuaauggggugagcguauuaacuuuuaagguucuggaucuuaagaacuacaucgacaaacaauugcugccuauucuaaauaagcaguccuguucaaucccaaacauagaaaccgugauugaguuccagcagaaaaauaacaggcuccuggaaaucacacgggaguuuagugucaaugccggagugacuaccccggugagcacauauaugcuuaccaacucugagcuguugucccucauuaaugauaugcccaucacgaacgaccaaaagaaacugaugucaaacaauguccagaucguucgccagcagagcuacaguauuaugugcauaaucaaggaagagguguuagcguauguagugcaacugccucucuacggcgucauugauacuccauguuggaaacuucauacaucuccccugugcaccacuaacacaaaggaaggcuccaauaucuguuugacccgaacggaccgugggugguacugcgauaacgcaggaagcgugucguucuuuccucaggccgagaccuguaagguucagucuaauagaguguucugcgacacaaugaacucccuaacucugccaucagaagucaaucucugcaacguggauauauuuaaucccaaauaugacuguaagauuaugaccaguaaaacagauguaagcuccucuguuaucacuagccugggugcuaucgugucaugcuacggcaagaccaaauguacagccaguaacaagaauagggggauuaucaagaccuucuccaacggaugcgacuaugucagcaauaaaggcguggacacugucucuguggguaacacgcuuuacuguguuaauaagcaagaggggcagucacuguaugugaaaggagagccuauuauaaacuuuuacgauccauugguauucccgagugacgaauuugaugcaagcaucucccaggucaacgagaagauuaaucagucucucgcuuucauccggaaaucggacgaacuguuacacaacgugaaugccggcaagagcacaaccaacaucaugauuacuaccauaaucauuguuaucauugugauccugcuaucccucauagcggucggccugcuuuuguauugcaaggcccgcugaggacuagucccuguucccagagcccacuuuuuuuucuuuuuuugaaauaaaauagccugucuuucagaucuaaaaaaaaaaaaaaaaaaaaaaaaaaaaaaaaaaaaaaaaaaaaaaaaaaaaaaaaaaaaaaaaugcaucccccccccccccccccccccccccccccccaaaggcucuuuucagagccaccagaauu

SEQ ID NO: 3510 - RNA, 1918 nt, Artificial Sequence
  mRNA product Design a-3 comprising derived and/or modified sequence from HRSV(A2)__F-del_DSCav1_mut3 (opt4)
gggagagggcgcuuggcuugcaaggacccugagcugcggcauugaagcacacccaacccaacucgacugaagucagccucacugaaccggaucugagaaucuucucucucugggcuugccagggcucuccgaaccuagcuagcauccucuucaauuccaacuagaaagcuuaccauggagcugcugauccugaaggccaacgccaucaccaccauccugaccgccgugaccuucugcuucgccagcggccagaacaucaccgaggaguucuaccagagcaccugcagcgccgugagcaagggcuaccugggcgcccugagaaccggcugguacaccagcgugaucaccaucgagcugagcaacaucaaggagaucaagugcaacggcaccgacgccaaggugaagcugaucaagcaggagcuggacaaguacaagaacgccgugaccgaccugcagcugcugaugcagagcacccccgccaccggcagcggcagcgccaucugcagcggcguggccgugugcaaggugcugcaccuggagggcgaggugaacaagaucaagagcgcccugcugagcaccaacaaggccguggugagccugagcaacggcgugagcgugcugaccuucaaggugcuggaccugaagaacuacaucgacaagcagcugcugcccauccugaacaagcagagcugcagcauccccaacaucgagaccgugaucgaguuccagcagaagaacaacagacugcuggagaucaccagagaguucagcgugaacgccggcgugaccacccccgugagcaccuacaugcugaccaacagcgagcugcugagccugaucaacgacaugcccaucaccaacgaccagaagaagcugaugagcaacaacgugcagaucgugagacagcagagcuacagcaucaugugcaucaucaaggaggaggugcuggccuacguggugcagcugccccuguacggcgugaucgacacccccugcuggaagcugcacaccagcccccugugcaccaccaacaccaaggagggcagcaacaucugccugaccagaaccgacagaggcugguacugcgacaacgccggcagcgugagcuucuucccccaggccgagaccugcaaggugcagagcaacagaguguucugcgacaccaugaacagccugacccugcccagcgaggugaaccugugcaacguggacaucuucaaccccaaguacgacugcaagaucaugaccagcaagaccgacgugagcagcagcgugaucaccagccugggcgccaucgugagcugcuacggcaagaccaagugcaccgccagcaacaagaacagaggcaucaucaagaccuucagcaacggcugcgacuacgugagcaacaagggcguggacaccgugagcgugggcaacacccuguacugcgugaacaagcaggagggccagagccuguacgugaagggcgagcccaucaucaacuucuacgacccccugguguuccccagcgacgaguucgacgccagcaucagccaggugaacgagaagaucaaccagagccuggccuucaucagaaagagcgacgagcugcugcacaacgugaacgccggcaagagcaccaccaacaucaugaucaccaccaucaucaucgugaucaucgugauccugcugagccugaucgccgugggccugcugcuguacugcaaggccagaugaggacuagucccuguucccagagcccacuuuuuuuucuuuuuuugaaauaaaauagccugucuuucagaucuaaaaaaaaaaaaaaaaaaaaaaaaaaaaaaaaaaaaaaaaaaaaaaaaaaaaaaaaaaaaaaaaugcaucccccccccccccccccccccccccccccccaaaggcucuuuucagagccaccagaauu

SEQ ID NO: 3511 - RNA, 1918 nt, Artificial Sequence
  mRNA product Design a-3 comprising derived and/or modified sequence from HRSV(A2)__F-del_DSCav1_mut3 (opt5)
gggagagggcgcuuggcuugcaaggacccugagcugcggcauugaagcacacccaacccaacucgacugaagucagccucacugaaccggaucugagaaucuucucucucugggcuugccagggcucuccgaaccuagcuagcauccucuucaauuccaacuagaaagcuuaccauggagcugcucauccugaaggccaacgcuauuaccacaauccuuacggccgugaccuucugcuuugcgagcggccagaauauuacagaagaguucuaccaauccaccuguucugcugucagcaaaggguaucugggagcccucagaacaggcugguacaccuccguuaucacaauugaacugucuaacaucaaggagaucaaaugcaaugggaccgacgccaaggugaaacuuauuaagcaggaacuggauaaguauaaaaacgcugugacggaccuccagcugcugaugcagagcacccccgccacaggauccggcucugcuaucuguagcggggucgccgugugcaagguucuccaccuggagggagaggugaauaaaauuaaguccgcgcuucugagcaccaacaaagccgucgugucucucuccaauggcguuagcgugcugacauuuaagguccuugaucugaagaacuacaucgacaaacaacuccugccuauucugaauaagcagucuuguuccaucccgaacauugaaaccgugaucgaguuccagcagaaaaauaaccggcuccuggaaaucacgcgcgaguuuagcgugaaugcuggcgucacaacccccguuucuacauauaugcuuaccaacuccgagcugcucagccugauuaaugauaugccuaucaccaacgaccaaaagaaacuuauguccaacaaugugcagauugugagacagcagucuuacagcaucaugugcauuaucaaggaagagguccuggccuaugugguucaacucccccuguacggggugaucgauacaccuuguuggaaacugcauacgagcccccucugcaccacaaacaccaaggaaggauccaauauuugucugacacggaccgaccgcggcugguacugcgauaacgcugggucugucuccuucuuuccucaggccgagacguguaaggugcagagcaauagaguuuucugcgacacaaugaacucucuuacccugccgagcgaagugaaucucugcaacgucgauaucuuuaaucccaaauaugacuguaagauuaugaccuccaaaacagaugugucuagcuccgucaucaccagccugggagcgauugugucuugcuacggcaagacaaaauguacggccuccaacaagaaucgggggaucaucaagaccuucagcaacggaugcgacuauguuucuaauaaaggcguggacacagucuccgugggcaacacccuuuacuguguuaauaagcaagaggggcagagccuguaugugaaaggagagccuauuaucaacuuuuacgauccccucgucuucccuuccgacgaauuugaugcuucuauuagccaggugaacgagaagaucaaucagucccuggccuucauucgcaaaucugacgaacugcuccacaacgugaaugcuggcaagagcacaaccaacaucaugauuacgaccaucaucauuguuaucauugucauccugcuuucccugauugccguggggcuccugcuguauugcaaggccagaugaggacuagucccuguucccagagcccacuuuuuuuucuuuuuuugaaauaaaauagccugucuuucagaucuaaaaaaaaaaaaaaaaaaaaaaaaaaaaaaaaaaaaaaaaaaaaaaaaaaaaaaaaaaaaaaaaugcaucccccccccccccccccccccccccccccccaaaggcucuuuucagagccaccagaauu

SEQ ID NO: 3512 - RNA, 1918 nt, Artificial Sequence
  mRNA product Design a-3 comprising derived and/or modified sequence from HRSV(A2)__F-del_DSCav1_mut3 (opt6)
gggagagggcgcuuggcuugcaaggacccugagcugcggcauugaagcacacccaacccaacucgacugaagucagccucacugaaccggaucugagaaucuucucucucugggcuugccagggcucuccgaaccuagcuagcauccucuucaauuccaacuagaaagcuuaccauggaauuacuaauccugaaagcaaacgcaauuacuacaauacuaacagcaguaaccuuuugcuuugccucaggacaaaacauaacugaagaauuuuaccaaucaacuugcucagcagucucaaaaggcuaucuaggagcacuacgaacagguugguauacuucagucauaacaauagaauuaucaaacauaaaagaaauuaaauguaacggaacugacgcaaaaguaaaacucaucaaacaagaacucgauaaauacaaaaacgcuguaaccgacuuacaacuacuaaugcaaucaacuccagcaacaggcuccggauccgcaauaugcagugguguagcaguaugcaaaguccuacaccuagaaggagaaguaaauaagauaaaaucugcucuacuaucaacaaauaaagcaguugucucccuaucaaauggagucucaguacucaccuucaaaguauuagaccucaaaaacuacauagacaaacaacuauuaccaauacucaacaaacaauccugcuccaucccuaacauagaaaccguaaucgaauuucaacaaaaaaauaacagacucuuagaaauaacuagagaauuuucaguuaaugcaggcgugacaacaccaguaucaacauauaugcuaacaaacuccgaacuccuaucccuaauaaacgacaugccaaucacaaacgaccaaaaaaaacuaauguccaacaacguacaaaucguaagacaacaaucauacucuauaaugugcauaauaaaagaagaaguacuggccuacguaguacaauuaccacucuacggaguaauagacaccccaugcuggaaacuccauacaucaccccuaugcacaacaaacacaaaagaaggauccaacauaugucucacuagaacagacagaggcugguacugcgacaacgcuggauccgucucauucuucccccaagcagaaacauguaaaguacaaucuaauagaguauuuugugacacaaugaacagccucacacuaccauccgaagucaaccuauguaacguagauauauuuaaucccaaauacgacugcaaaauaaugacauccaaaacagauguaucaucauccguuaucaccucacuaggagccauaguuucaugcuacggaaaaacaaaaugcacugcaucuaacaaaaauagagguauaauaaaaacauuuuccaacggcugcgacuacgucucaaacaaaggcguagacaccguaucaguaggaaauacauuauauugcguaaauaaacaagaaggccaaucccuauacguaaaaggagaacccaucauaaacuucuaugacccacuuguuuuccccucagacgaauuugacgccucaauaucacaaguaaaugaaaaaauaaaccaaucucuugccuucauuagaaaaucagacgaauuacuacacaacgucaacgcaggaaaaucaacaacaaacaucaugauaacaacgauaauaauagucauaauaguaauacuacuaucauuaaucgcagucggacuccuauuauauugcaaagcuagauaaggacuagucccuguucccagagcccacuuuuuuuucuuuuuuugaaauaaaauagccugucuuucagaucuaaaaaaaaaaaaaaaaaaaaaaaaaaaaaaaaaaaaaaaaaaaaaaaaaaaaaaaaaaaaaaaaugcaucccccccccccccccccccccccccccccccaaaggcucuuuucagagccaccagaauu

SEQ ID NO: 3513 - RNA, 1918 nt, Artificial Sequence
  mRNA product Design a-3 comprising derived and/or modified sequence from HRSV(A2)__F-del_DSCav1_mut3 (opt11)
gggagagggcgcuuggcuugcaaggacccugagcugcggcauugaagcacacccaacccaacucgacugaagucagccucacugaaccggaucugagaaucuucucucucugggcuugccagggcucuccgaaccuagcuagcauccucuucaauuccaacuagaaagcuuaccauggaacuacucauacuaaaagccaacgccauaaccaccauccucaccgcaguaacuuucugcuucgcuuccggccaaaacaucaccgaagaauuuuaccaaaguaccugcagcgcagucucaaaaggauaccuaggcgcccuacgcacaggcugguacaccuccgucauuaccaucgaacucuccaacaucaaagaaauuaaaugcaacgguacagacgcaaaagucaaacucaucaaacaagaacucgacaaauacaaaaacgcagucaccgaccuccaacuccucaugcaauccacccccgccacaggcucuggcuccgccaucugcucaggcguagcagucugcaaaguccugcaccucgaaggcgaagucaacaaaaucaagucagcccuccucuccaccaacaaggccgucguaucccucucaaacggaguuagcguccucaccuucaaaguccuagaccucaaaaacuacaucgauaaacaacuacuccccauccuaaacaaacaaucaugcuccaucccaaacaucgaaaccguaaucgaguuccaacaaaagaacaaccgccuccucgaaaucacacgugaguucuccguuaacgccggcgucaccacccccgucucuacauacaugcucaccaacuccgaacuccuuucccucaucaacgacaugccaaucaccaacgaccaaaagaaacucaugucaaacaacguacaaaucguccgacaacaaagcuacuccaucaugugcaucaucaaagaagaaguccuugcauacgucguucaacuaccccucuacggcguaaucgacacucccugcuggaaacuccacaccuccccgcucugcacaaccaacaccaaagaaggcagcaacaucugccucacccgaaccgaccgcggcugguacugcgauaacgccggauccgucuccuucuucccacaagcagaaacuugcaaaguccaauccaaccgcgucuucugcgacaccaugaacucccucacacuccccuccgaagucaaccugugcaacgucgacaucuucaacccaaaauacgacugcaaaaucaugaccucaaaaaccgacgucucaucuucugucaucaccucucucggcgcuaucgucuccugcuauggcaaaaccaaaugcaccgccuccaacaagaaccgcggcauuaucaagaccuucuccaacggcugcgacuacgucuccaauaagggcgucgacaccgucucugucggcaacacccuuuacugcguaaacaaacaagaaggucaaucucucuacgucaaaggagaacccaucaucaacuucuacgacccccuggucuuccccuccgacgaguucgaugcaucaaucucccaagucaacgaaaagaucaaccaaucucucgcuuucauccgcaaauccgacgaacuccuacacaacguaaacgccggcaaauccaccacaaacaucaugaucaccaccauuaucauagucaucaucgucauccuccucuccuuaaucgccguuggccuccuucucuacugcaaagcccgauaaggacuagucccuguucccagagcccacuuuuuuuucuuuuuuugaaauaaaauagccugucuuucagaucuaaaaaaaaaaaaaaaaaaaaaaaaaaaaaaaaaaaaaaaaaaaaaaaaaaaaaaaaaaaaaaaaugcaucccccccccccccccccccccccccccccccaaaggcucuuuucagagccaccagaauu

SEQ ID NO: 3514 - RNA, 1867 nt, Artificial Sequence
  mRNA product Design a-4 comprising derived and/or modified sequence from HRSV(A2)__F-del_DSCav1_mut3 (opt1)
gggagacuccugucgggcggaaguaggaggaguagaguuuaaaaacaguacucuuuuuccgguucgggacguaguugaagcaacgacaagccggauaaccgcucuugagacaggaagcuuaccauggagcugcucauccugaaggccaacgccaucaccaccauccugacggcggugaccuucugcuucgccagcggccagaacaucaccgaggaguucuaccaguccacgugcagcgccgucuccaagggguaccucggcgcccugcggaccggcugguacaccuccgugaucaccaucgagcugagcaacaucaaggagaucaagugcaacgggaccgacgccaaggugaagcucaucaagcaggagcuggacaaguacaagaacgcggucacggaccugcagcuccugaugcaguccaccccggcaaccggcuccggcuccgccaucugcagcggcgucgccgugugcaaggugcugcaccucgagggggaggucaacaagaucaagagcgcccugcuguccaccaacaaggccguggugagccucuccaacggcgucagcgugcugaccuucaaggugcuggaccucaagaacuacaucgacaagcagcugcugcccauccugaacaagcagagcugcuccauccccaacaucgagacggugaucgaguuccagcagaagaacaaccggcuccuggagaucacccgcgaguucagcgugaacgccggggucaccacccccguguccacguacaugcugaccaacagcgagcuccugucccugaucaacgacaugccgaucaccaacgaccagaagaagcucaugagcaacaacgugcagaucguccggcagcaguccuacagcaucaugugcaucaucaaggaggaggugcuggcguacgugguccagcugccccucuacggcgugaucgacacccccugcuggaagcugcacacgagcccccugugcaccaccaacaccaaggagggguccaacaucugccucacgcgcaccgaccggggcugguacugcgacaacgccggcagcgucuccuucuucccgcaggccgagaccugcaaggugcagagcaaccgcguguucugcgacaccaugaacucccugacgcugcccagcgagguaaaccucugcaacgucgacaucuucaaccccaaguacgacugcaagaucaugaccuccaagaccgacgugagcuccagcgugaucaccucccugggggccaucgucagcugcuacggcaagacgaagugcaccgccagcaacaagaaccgggggaucaucaagaccuucuccaacggcugcgacuacgugagcaacaagggcguggacaccguguccgucgggaacacccuguacugcgugaacaagcaggagggccagagccucuacgugaagggggagcccaucaucaacuucuacgacccgcuggucuuccccuccgacgaguucgacgcgagcaucucccaggugaacgagaagaucaaccagagccuggccuucauccgcaaguccgacgagcugcuccacaacgugaacgccggcaagagcacgaccaacaucaugaucaccaccaucaucaucgucaucaucgugauccugcugucccucaucgccguggggcugcugcucuacugcaaggcccggugaggacuagucccuguucccagagcccacuuuuuuuucuuuuuuugaaauaaaauagccugucuuucagaucuaaaaaaaaaaaaaaaaaaaaaaaaaaaaaaaaaaaaaaaaaaaaaaaaaaaaaaaaaaaaaaaaugcaucccccccccccccccccccccccccccccccaaaggcucuuuucagagccaccagaauu

SEQ ID NO: 3515 - RNA, 1867 nt, Artificial Sequence
  mRNA product Design a-4 comprising derived and/or modified sequence from HRSV(A2)__F-del_DSCav1_mut3 (opt1)
gggagacuccugucgggcggaaguaggaggaguagaguuuaaaaacaguacucuuuuuccgguucgggacguaguugaagcaacgacaagccggauaaccgcucuugagacaggaagcuuaccauggagcugcucauccugaaggccaacgccaucaccaccauccugacggcggugaccuucugcuucgccagcggccagaacaucaccgaggaguucuaccaguccacgugcagcgccgucuccaagggguaccucggcgcccugcgcaccgggugguacaccagcgugaucaccaucgagcuguccaacaucaaggagaucaagugcaacggcaccgacgccaaggugaagcucaucaagcaggagcuggacaaguacaagaacgcggucacggaccugcagcuccugaugcagagcacccccgccaccggguccggcagcgccaucugcuccggcguggccgugugcaagguccugcaccucgagggggaggugaacaagaucaagagcgcgcugcuguccaccaacaaggccguggucagccucuccaacggcgugagcgugcugacguucaagguccuggaccucaagaacuacaucgacaagcagcugcugccgauccucaacaagcaguccugcagcauccccaacaucgagaccgugaucgaguuccagcagaagaacaaccggcugcuggagaucacccgcgaguucuccgugaacgccggggucaccacgcccgugagcaccuacaugcucaccaacuccgagcugcugagccucaucaacgacaugcccaucaccaacgaccagaagaagcugaugagcaacaacgugcagaucguccggcagcaguccuacagcaucaugugcaucaucaaggaggaggugcuggccuacgugguccagcucccgcuguacggcgugaucgacacgcccugcuggaagcugcacaccagcccccucugcaccaccaacacgaaggagggguccaacaucugccugacccgcaccgaccggggcugguacugcgacaacgccggcuccgugagcuucuucccccaggcggagaccugcaagguccaguccaaccgcguguucugcgacacgaugaacagccugacccucccguccgaggucaaccugugcaacguggacaucuucaaccccaaguacgacugcaagaucaugaccagcaagaccgacguguccagcuccgucaucacgagccugggggccaucguguccugcuacggcaagaccaagugcaccgccagcaacaagaaccgggggaucaucaagaccuucuccaacggcugcgacuacgugagcaacaagggcgucgacacgguguccguggggaacacccucuacugcgucaacaagcaggagggccagagccuguacgugaagggggagcccaucaucaacuucuacgacccccugguguucccgagcgacgaguucgacgccuccaucagccaggucaacgagaagaucaaccagucccucgccuucauccgcaagagcgacgagcugcugcacaacgugaacgcgggcaaguccaccaccaacaucaugaucaccacgaucaucaucgugaucaucgucauccuccugagccugaucgccguggggcuccugcuguacugcaaggcccggugaggacuagucccuguucccagagcccacuuuuuuuucuuuuuuugaaauaaaauagccugucuuucagaucuaaaaaaaaaaaaaaaaaaaaaaaaaaaaaaaaaaaaaaaaaaaaaaaaaaaaaaaaaaaaaaaaugcaucccccccccccccccccccccccccccccccaaaggcucuuuucagagccaccagaauu

SEQ ID NO: 3516 - RNA, 1867 nt, Artificial Sequence
  mRNA product Design a-4 comprising derived and/or modified sequence from HRSV(A2)__F-del_DSCav1_mut3 (opt2)
gggagacuccugucgggcggaaguaggaggaguagaguuuaaaaacaguacucuuuuuccgguucgggacguaguugaagcaacgacaagccggauaaccgcucuugagacaggaagcuuaccauggagcuccucauccucaaggccaacgccaucaccaccauccucaccgccgucaccuucugcuucgccuccggccagaacaucaccgaggaguucuaccaguccaccugcuccgccgucuccaagggcuaccucggcgcccuccgcaccggcugguacaccuccgucaucaccaucgagcucuccaacaucaaggagaucaagugcaacggcaccgacgccaaggucaagcucaucaagcaggagcucgacaaguacaagaacgccgucaccgaccuccagcuccucaugcaguccacccccgccaccggcuccggcuccgccaucugcuccggcgucgccgucugcaagguccuccaccucgagggcgaggucaacaagaucaaguccgcccuccucuccaccaacaaggccgucgucucccucuccaacggcgucuccguccucaccuucaagguccucgaccucaagaacuacaucgacaagcagcuccuccccauccucaacaagcaguccugcuccauccccaacaucgagaccgucaucgaguuccagcagaagaacaaccgccuccucgagaucacccgcgaguucuccgucaacgccggcgucaccacccccgucuccaccuacaugcucaccaacuccgagcuccucucccucaucaacgacaugcccaucaccaacgaccagaagaagcucauguccaacaacguccagaucguccgccagcaguccuacuccaucaugugcaucaucaaggaggagguccucgccuacgucguccagcucccccucuacggcgucaucgacacccccugcuggaagcuccacaccuccccccucugcaccaccaacaccaaggagggcuccaacaucugccucacccgcaccgaccgcggcugguacugcgacaacgccggcuccgucuccuucuucccccaggccgagaccugcaagguccaguccaaccgcgucuucugcgacaccaugaacucccucacccuccccuccgaggucaaccucugcaacgucgacaucuucaaccccaaguacgacugcaagaucaugaccuccaagaccgacgucuccuccuccgucaucaccucccucggcgccaucgucuccugcuacggcaagaccaagugcaccgccuccaacaagaaccgcggcaucaucaagaccuucuccaacggcugcgacuacgucuccaacaagggcgucgacaccgucuccgucggcaacacccucuacugcgucaacaagcaggagggccagucccucuacgucaagggcgagcccaucaucaacuucuacgacccccucgucuuccccuccgacgaguucgacgccuccaucucccaggucaacgagaagaucaaccagucccucgccuucauccgcaaguccgacgagcuccuccacaacgucaacgccggcaaguccaccaccaacaucaugaucaccaccaucaucaucgucaucaucgucauccuccucucccucaucgccgucggccuccuccucuacugcaaggcccgcugaggacuagucccuguucccagagcccacuuuuuuuucuuuuuuugaaauaaaauagccugucuuucagaucuaaaaaaaaaaaaaaaaaaaaaaaaaaaaaaaaaaaaaaaaaaaaaaaaaaaaaaaaaaaaaaaaugcaucccccccccccccccccccccccccccccccaaaggcucuuuucagagccaccagaauu

SEQ ID NO: 3517 - RNA, 1867 nt, Artificial Sequence
  mRNA product Design a-4 comprising derived and/or modified sequence from HRSV(A2)__F-del_DSCav1_mut3 (opt3)
gggagacuccugucgggcggaaguaggaggaguagaguuuaaaaacaguacucuuuuuccgguucgggacguaguugaagcaacgacaagccggauaaccgcucuugagacaggaagcuuaccauggagcugcucauccuuaaggccaacgcuauuaccacaauacugacugcagugacguucugcuuugccagcggccagaauaucaccgaagaguucuaccaauccacauguucugcggucucaaaaggguauuugggagcuuuaagaacugguugguacaccaguguuauuacaaucgaacugagcaacauuaaggagaucaaaugcaauggcaccgacgccaaggugaaacuaauaaagcaggaacucgauaaguauaaaaacgcaguaacugaccugcagcuucugaugcaguccacacccgccaccgggucuggaucggcuaucuguucaggcguggcagucugcaagguguugcaccucgagggugagguuaauaaaauuaagagcgcccugcugaguacgaacaaagcuguggucucccucucuaauggggugagcguauuaacuuuuaagguucuggaucuuaagaacuacaucgacaaacaauugcugccuauucuaaauaagcaguccuguucaaucccaaacauagaaaccgugauugaguuccagcagaaaaauaacaggcuccuggaaaucacacgggaguuuagugucaaugccggagugacuaccccggugagcacauauaugcuuaccaacucugagcuguugucccucauuaaugauaugcccaucacgaacgaccaaaagaaacugaugucaaacaauguccagaucguucgccagcagagcuacaguauuaugugcauaaucaaggaagagguguuagcguauguagugcaacugccucucuacggcgucauugauacuccauguuggaaacuucauacaucuccccugugcaccacuaacacaaaggaaggcuccaauaucuguuugacccgaacggaccgugggugguacugcgauaacgcaggaagcgugucguucuuuccucaggccgagaccuguaagguucagucuaauagaguguucugcgacacaaugaacucccuaacucugccaucagaagucaaucucugcaacguggauauauuuaaucccaaauaugacuguaagauuaugaccaguaaaacagauguaagcuccucuguuaucacuagccugggugcuaucgugucaugcuacggcaagaccaaauguacagccaguaacaagaauagggggauuaucaagaccuucuccaacggaugcgacuaugucagcaauaaaggcguggacacugucucuguggguaacacgcuuuacuguguuaauaagcaagaggggcagucacuguaugugaaaggagagccuauuauaaacuuuuacgauccauugguauucccgagugacgaauuugaugcaagcaucucccaggucaacgagaagauuaaucagucucucgcuuucauccggaaaucggacgaacuguuacacaacgugaaugccggcaagagcacaaccaacaucaugauuacuaccauaaucauuguuaucauugugauccugcuaucccucauagcggucggccugcuuuuguauugcaaggcccgcugaggacuagucccuguucccagagcccacuuuuuuuucuuuuuuugaaauaaaauagccugucuuucagaucuaaaaaaaaaaaaaaaaaaaaaaaaaaaaaaaaaaaaaaaaaaaaaaaaaaaaaaaaaaaaaaaaugcaucccccccccccccccccccccccccccccccaaaggcucuuuucagagccaccagaauu

SEQ ID NO: 3518 - RNA, 1867 nt, Artificial Sequence
  mRNA product Design a-4 comprising derived and/or modified sequence from HRSV(A2)__F-del_DSCav1_mut3 (opt4)
gggagacuccugucgggcggaaguaggaggaguagaguuuaaaaacaguacucuuuuuccgguucgggacguaguugaagcaacgacaagccggauaaccgcucuugagacaggaagcuuaccauggagcugcugauccugaaggccaacgccaucaccaccauccugaccgccgugaccuucugcuucgccagcggccagaacaucaccgaggaguucuaccagagcaccugcagcgccgugagcaagggcuaccugggcgcccugagaaccggcugguacaccagcgugaucaccaucgagcugagcaacaucaaggagaucaagugcaacggcaccgacgccaaggugaagcugaucaagcaggagcuggacaaguacaagaacgccgugaccgaccugcagcugcugaugcagagcacccccgccaccggcagcggcagcgccaucugcagcggcguggccgugugcaaggugcugcaccuggagggcgaggugaacaagaucaagagcgcccugcugagcaccaacaaggccguggugagccugagcaacggcgugagcgugcugaccuucaaggugcuggaccugaagaacuacaucgacaagcagcugcugcccauccugaacaagcagagcugcagcauccccaacaucgagaccgugaucgaguuccagcagaagaacaacagacugcuggagaucaccagagaguucagcgugaacgccggcgugaccacccccgugagcaccuacaugcugaccaacagcgagcugcugagccugaucaacgacaugcccaucaccaacgaccagaagaagcugaugagcaacaacgugcagaucgugagacagcagagcuacagcaucaugugcaucaucaaggaggaggugcuggccuacguggugcagcugccccuguacggcgugaucgacacccccugcuggaagcugcacaccagcccccugugcaccaccaacaccaaggagggcagcaacaucugccugaccagaaccgacagaggcugguacugcgacaacgccggcagcgugagcuucuucccccaggccgagaccugcaaggugcagagcaacagaguguucugcgacaccaugaacagccugacccugcccagcgaggugaaccugugcaacguggacaucuucaaccccaaguacgacugcaagaucaugaccagcaagaccgacgugagcagcagcgugaucaccagccugggcgccaucgugagcugcuacggcaagaccaagugcaccgccagcaacaagaacagaggcaucaucaagaccuucagcaacggcugcgacuacgugagcaacaagggcguggacaccgugagcgugggcaacacccuguacugcgugaacaagcaggagggccagagccuguacgugaagggcgagcccaucaucaacuucuacgacccccugguguuccccagcgacgaguucgacgccagcaucagccaggugaacgagaagaucaaccagagccuggccuucaucagaaagagcgacgagcugcugcacaacgugaacgccggcaagagcaccaccaacaucaugaucaccaccaucaucaucgugaucaucgugauccugcugagccugaucgccgugggccugcugcuguacugcaaggccagaugaggacuagucccuguucccagagcccacuuuuuuuucuuuuuuugaaauaaaauagccugucuuucagaucuaaaaaaaaaaaaaaaaaaaaaaaaaaaaaaaaaaaaaaaaaaaaaaaaaaaaaaaaaaaaaaaaugcaucccccccccccccccccccccccccccccccaaaggcucuuuucagagccaccagaauu

SEQ ID NO: 3519 - RNA, 1867 nt, Artificial Sequence
  mRNA product Design a-4 comprising derived and/or modified sequence from HRSV(A2)__F-del_DSCav1_mut3 (opt5)
gggagacuccugucgggcggaaguaggaggaguagaguuuaaaaacaguacucuuuuuccgguucgggacguaguugaagcaacgacaagccggauaaccgcucuugagacaggaagcuuaccauggagcugcucauccugaaggccaacgcuauuaccacaauccuuacggccgugaccuucugcuuugcgagcggccagaauauuacagaagaguucuaccaauccaccuguucugcugucagcaaaggguaucugggagcccucagaacaggcugguacaccuccguuaucacaauugaacugucuaacaucaaggagaucaaaugcaaugggaccgacgccaaggugaaacuuauuaagcaggaacuggauaaguauaaaaacgcugugacggaccuccagcugcugaugcagagcacccccgccacaggauccggcucugcuaucuguagcggggucgccgugugcaagguucuccaccuggagggagaggugaauaaaauuaaguccgcgcuucugagcaccaacaaagccgucgugucucucuccaauggcguuagcgugcugacauuuaagguccuugaucugaagaacuacaucgacaaacaacuccugccuauucugaauaagcagucuuguuccaucccgaacauugaaaccgugaucgaguuccagcagaaaaauaaccggcuccuggaaaucacgcgcgaguuuagcgugaaugcuggcgucacaacccccguuucuacauauaugcuuaccaacuccgagcugcucagccugauuaaugauaugccuaucaccaacgaccaaaagaaacuuauguccaacaaugugcagauugugagacagcagucuuacagcaucaugugcauuaucaaggaagagguccuggccuaugugguucaacucccccuguacggggugaucgauacaccuuguuggaaacugcauacgagcccccucugcaccacaaacaccaaggaaggauccaauauuugucugacacggaccgaccgcggcugguacugcgauaacgcugggucugucuccuucuuuccucaggccgagacguguaaggugcagagcaauagaguuuucugcgacacaaugaacucucuuacccugccgagcgaagugaaucucugcaacgucgauaucuuuaaucccaaauaugacuguaagauuaugaccuccaaaacagaugugucuagcuccgucaucaccagccugggagcgauugugucuugcuacggcaagacaaaauguacggccuccaacaagaaucgggggaucaucaagaccuucagcaacggaugcgacuauguuucuaauaaaggcguggacacagucuccgugggcaacacccuuuacuguguuaauaagcaagaggggcagagccuguaugugaaaggagagccuauuaucaacuuuuacgauccccucgucuucccuuccgacgaauuugaugcuucuauuagccaggugaacgagaagaucaaucagucccuggccuucauucgcaaaucugacgaacugcuccacaacgugaaugcuggcaagagcacaaccaacaucaugauuacgaccaucaucauuguuaucauugucauccugcuuucccugauugccguggggcuccugcuguauugcaaggccagaugaggacuagucccuguucccagagcccacuuuuuuuucuuuuuuugaaauaaaauagccugucuuucagaucuaaaaaaaaaaaaaaaaaaaaaaaaaaaaaaaaaaaaaaaaaaaaaaaaaaaaaaaaaaaaaaaaugcaucccccccccccccccccccccccccccccccaaaggcucuuuucagagccaccagaauu

SEQ ID NO: 3520 - RNA, 1867 nt, Artificial Sequence
  mRNA product Design a-4 comprising derived and/or modified sequence from HRSV(A2)__F-del_DSCav1_mut3 (opt6)
gggagacuccugucgggcggaaguaggaggaguagaguuuaaaaacaguacucuuuuuccgguucgggacguaguugaagcaacgacaagccggauaaccgcucuugagacaggaagcuuaccauggaauuacuaauccugaaagcaaacgcaauuacuacaauacuaacagcaguaaccuuuugcuuugccucaggacaaaacauaacugaagaauuuuaccaaucaacuugcucagcagucucaaaaggcuaucuaggagcacuacgaacagguugguauacuucagucauaacaauagaauuaucaaacauaaaagaaauuaaauguaacggaacugacgcaaaaguaaaacucaucaaacaagaacucgauaaauacaaaaacgcuguaaccgacuuacaacuacuaaugcaaucaacuccagcaacaggcuccggauccgcaauaugcagugguguagcaguaugcaaaguccuacaccuagaaggagaaguaaauaagauaaaaucugcucuacuaucaacaaauaaagcaguugucucccuaucaaauggagucucaguacucaccuucaaaguauuagaccucaaaaacuacauagacaaacaacuauuaccaauacucaacaaacaauccugcuccaucccuaacauagaaaccguaaucgaauuucaacaaaaaaauaacagacucuuagaaauaacuagagaauuuucaguuaaugcaggcgugacaacaccaguaucaacauauaugcuaacaaacuccgaacuccuaucccuaauaaacgacaugccaaucacaaacgaccaaaaaaaacuaauguccaacaacguacaaaucguaagacaacaaucauacucuauaaugugcauaauaaaagaagaaguacuggccuacguaguacaauuaccacucuacggaguaauagacaccccaugcuggaaacuccauacaucaccccuaugcacaacaaacacaaaagaaggauccaacauaugucucacuagaacagacagaggcugguacugcgacaacgcuggauccgucucauucuucccccaagcagaaacauguaaaguacaaucuaauagaguauuuugugacacaaugaacagccucacacuaccauccgaagucaaccuauguaacguagauauauuuaaucccaaauacgacugcaaaauaaugacauccaaaacagauguaucaucauccguuaucaccucacuaggagccauaguuucaugcuacggaaaaacaaaaugcacugcaucuaacaaaaauagagguauaauaaaaacauuuuccaacggcugcgacuacgucucaaacaaaggcguagacaccguaucaguaggaaauacauuauauugcguaaauaaacaagaaggccaaucccuauacguaaaaggagaacccaucauaaacuucuaugacccacuuguuuuccccucagacgaauuugacgccucaauaucacaaguaaaugaaaaaauaaaccaaucucuugccuucauuagaaaaucagacgaauuacuacacaacgucaacgcaggaaaaucaacaacaaacaucaugauaacaacgauaauaauagucauaauaguaauacuacuaucauuaaucgcagucggacuccuauuauauugcaaagcuagauaaggacuagucccuguucccagagcccacuuuuuuuucuuuuuuugaaauaaaauagccugucuuucagaucuaaaaaaaaaaaaaaaaaaaaaaaaaaaaaaaaaaaaaaaaaaaaaaaaaaaaaaaaaaaaaaaaugcaucccccccccccccccccccccccccccccccaaaggcucuuuucagagccaccagaauu

SEQ ID NO: 3521 - RNA, 1867 nt, Artificial Sequence
  mRNA product Design a-4 comprising derived and/or modified sequence from HRSV(A2)__F-del_DSCav1_mut3 (opt11)
gggagacuccugucgggcggaaguaggaggaguagaguuuaaaaacaguacucuuuuuccgguucgggacguaguugaagcaacgacaagccggauaaccgcucuugagacaggaagcuuaccauggaacuacucauacuaaaagccaacgccauaaccaccauccucaccgcaguaacuuucugcuucgcuuccggccaaaacaucaccgaagaauuuuaccaaaguaccugcagcgcagucucaaaaggauaccuaggcgcccuacgcacaggcugguacaccuccgucauuaccaucgaacucuccaacaucaaagaaauuaaaugcaacgguacagacgcaaaagucaaacucaucaaacaagaacucgacaaauacaaaaacgcagucaccgaccuccaacuccucaugcaauccacccccgccacaggcucuggcuccgccaucugcucaggcguagcagucugcaaaguccugcaccucgaaggcgaagucaacaaaaucaagucagcccuccucuccaccaacaaggccgucguaucccucucaaacggaguuagcguccucaccuucaaaguccuagaccucaaaaacuacaucgauaaacaacuacuccccauccuaaacaaacaaucaugcuccaucccaaacaucgaaaccguaaucgaguuccaacaaaagaacaaccgccuccucgaaaucacacgugaguucuccguuaacgccggcgucaccacccccgucucuacauacaugcucaccaacuccgaacuccuuucccucaucaacgacaugccaaucaccaacgaccaaaagaaacucaugucaaacaacguacaaaucguccgacaacaaagcuacuccaucaugugcaucaucaaagaagaaguccuugcauacgucguucaacuaccccucuacggcguaaucgacacucccugcuggaaacuccacaccuccccgcucugcacaaccaacaccaaagaaggcagcaacaucugccucacccgaaccgaccgcggcugguacugcgauaacgccggauccgucuccuucuucccacaagcagaaacuugcaaaguccaauccaaccgcgucuucugcgacaccaugaacucccucacacuccccuccgaagucaaccugugcaacgucgacaucuucaacccaaaauacgacugcaaaaucaugaccucaaaaaccgacgucucaucuucugucaucaccucucucggcgcuaucgucuccugcuauggcaaaaccaaaugcaccgccuccaacaagaaccgcggcauuaucaagaccuucuccaacggcugcgacuacgucuccaauaagggcgucgacaccgucucugucggcaacacccuuuacugcguaaacaaacaagaaggucaaucucucuacgucaaaggagaacccaucaucaacuucuacgacccccuggucuuccccuccgacgaguucgaugcaucaaucucccaagucaacgaaaagaucaaccaaucucucgcuuucauccgcaaauccgacgaacuccuacacaacguaaacgccggcaaauccaccacaaacaucaugaucaccaccauuaucauagucaucaucgucauccuccucuccuuaaucgccguuggccuccuucucuacugcaaagcccgauaaggacuagucccuguucccagagcccacuuuuuuuucuuuuuuugaaauaaaauagccugucuuucagaucuaaaaaaaaaaaaaaaaaaaaaaaaaaaaaaaaaaaaaaaaaaaaaaaaaaaaaaaaaaaaaaaaugcaucccccccccccccccccccccccccccccccaaaggcucuuuucagagccaccagaauu

SEQ ID NO: 3522 - RNA, 1813 nt, Artificial Sequence
  mRNA product Design a-5 comprising derived and/or modified sequence from HRSV(A2)__F-del_DSCav1_mut3 (opt1)
gggagacuuucccauucuguagcagaauuugguguugccuguggucuuggucccgcggagaagcuuaccauggagcugcucauccugaaggccaacgccaucaccaccauccugacggcggugaccuucugcuucgccagcggccagaacaucaccgaggaguucuaccaguccacgugcagcgccgucuccaagggguaccucggcgcccugcggaccggcugguacaccuccgugaucaccaucgagcugagcaacaucaaggagaucaagugcaacgggaccgacgccaaggugaagcucaucaagcaggagcuggacaaguacaagaacgcggucacggaccugcagcuccugaugcaguccaccccggcaaccggcuccggcuccgccaucugcagcggcgucgccgugugcaaggugcugcaccucgagggggaggucaacaagaucaagagcgcccugcuguccaccaacaaggccguggugagccucuccaacggcgucagcgugcugaccuucaaggugcuggaccucaagaacuacaucgacaagcagcugcugcccauccugaacaagcagagcugcuccauccccaacaucgagacggugaucgaguuccagcagaagaacaaccggcuccuggagaucacccgcgaguucagcgugaacgccggggucaccacccccguguccacguacaugcugaccaacagcgagcuccugucccugaucaacgacaugccgaucaccaacgaccagaagaagcucaugagcaacaacgugcagaucguccggcagcaguccuacagcaucaugugcaucaucaaggaggaggugcuggcguacgugguccagcugccccucuacggcgugaucgacacccccugcuggaagcugcacacgagcccccugugcaccaccaacaccaaggagggguccaacaucugccucacgcgcaccgaccggggcugguacugcgacaacgccggcagcgucuccuucuucccgcaggccgagaccugcaaggugcagagcaaccgcguguucugcgacaccaugaacucccugacgcugcccagcgagguaaaccucugcaacgucgacaucuucaaccccaaguacgacugcaagaucaugaccuccaagaccgacgugagcuccagcgugaucaccucccugggggccaucgucagcugcuacggcaagacgaagugcaccgccagcaacaagaaccgggggaucaucaagaccuucuccaacggcugcgacuacgugagcaacaagggcguggacaccguguccgucgggaacacccuguacugcgugaacaagcaggagggccagagccucuacgugaagggggagcccaucaucaacuucuacgacccgcuggucuuccccuccgacgaguucgacgcgagcaucucccaggugaacgagaagaucaaccagagccuggccuucauccgcaaguccgacgagcugcuccacaacgugaacgccggcaagagcacgaccaacaucaugaucaccaccaucaucaucgucaucaucgugauccugcugucccucaucgccguggggcugcugcucuacugcaaggcccggugaggacuagucccuguucccagagcccacuuuuuuuucuuuuuuugaaauaaaauagccugucuuucagaucuaaaaaaaaaaaaaaaaaaaaaaaaaaaaaaaaaaaaaaaaaaaaaaaaaaaaaaaaaaaaaaaaugcaucccccccccccccccccccccccccccccccaaaggcucuuuucagagccaccagaauu

SEQ ID NO: 3523 - RNA, 1813 nt, Artificial Sequence
  mRNA product Design a-5 comprising derived and/or modified sequence from HRSV(A2)__F-del_DSCav1_mut3 (opt1)
gggagacuuucccauucuguagcagaauuugguguugccuguggucuuggucccgcggagaagcuuaccauggagcugcucauccugaaggccaacgccaucaccaccauccugacggcggugaccuucugcuucgccagcggccagaacaucaccgaggaguucuaccaguccacgugcagcgccgucuccaagggguaccucggcgcccugcgcaccgggugguacaccagcgugaucaccaucgagcuguccaacaucaaggagaucaagugcaacggcaccgacgccaaggugaagcucaucaagcaggagcuggacaaguacaagaacgcggucacggaccugcagcuccugaugcagagcacccccgccaccggguccggcagcgccaucugcuccggcguggccgugugcaagguccugcaccucgagggggaggugaacaagaucaagagcgcgcugcuguccaccaacaaggccguggucagccucuccaacggcgugagcgugcugacguucaagguccuggaccucaagaacuacaucgacaagcagcugcugccgauccucaacaagcaguccugcagcauccccaacaucgagaccgugaucgaguuccagcagaagaacaaccggcugcuggagaucacccgcgaguucuccgugaacgccggggucaccacgcccgugagcaccuacaugcucaccaacuccgagcugcugagccucaucaacgacaugcccaucaccaacgaccagaagaagcugaugagcaacaacgugcagaucguccggcagcaguccuacagcaucaugugcaucaucaaggaggaggugcuggccuacgugguccagcucccgcuguacggcgugaucgacacgcccugcuggaagcugcacaccagcccccucugcaccaccaacacgaaggagggguccaacaucugccugacccgcaccgaccggggcugguacugcgacaacgccggcuccgugagcuucuucccccaggcggagaccugcaagguccaguccaaccgcguguucugcgacacgaugaacagccugacccucccguccgaggucaaccugugcaacguggacaucuucaaccccaaguacgacugcaagaucaugaccagcaagaccgacguguccagcuccgucaucacgagccugggggccaucguguccugcuacggcaagaccaagugcaccgccagcaacaagaaccgggggaucaucaagaccuucuccaacggcugcgacuacgugagcaacaagggcgucgacacgguguccguggggaacacccucuacugcgucaacaagcaggagggccagagccuguacgugaagggggagcccaucaucaacuucuacgacccccugguguucccgagcgacgaguucgacgccuccaucagccaggucaacgagaagaucaaccagucccucgccuucauccgcaagagcgacgagcugcugcacaacgugaacgcgggcaaguccaccaccaacaucaugaucaccacgaucaucaucgugaucaucgucauccuccugagccugaucgccguggggcuccugcuguacugcaaggcccggugaggacuagucccuguucccagagcccacuuuuuuuucuuuuuuugaaauaaaauagccugucuuucagaucuaaaaaaaaaaaaaaaaaaaaaaaaaaaaaaaaaaaaaaaaaaaaaaaaaaaaaaaaaaaaaaaaugcaucccccccccccccccccccccccccccccccaaaggcucuuuucagagccaccagaauu

SEQ ID NO: 3524 - RNA, 1813 nt, Artificial Sequence
  mRNA product Design a-5 comprising derived and/or modified sequence from HRSV(A2)__F-del_DSCav1_mut3 (opt2)
gggagacuuucccauucuguagcagaauuugguguugccuguggucuuggucccgcggagaagcuuaccauggagcuccucauccucaaggccaacgccaucaccaccauccucaccgccgucaccuucugcuucgccuccggccagaacaucaccgaggaguucuaccaguccaccugcuccgccgucuccaagggcuaccucggcgcccuccgcaccggcugguacaccuccgucaucaccaucgagcucuccaacaucaaggagaucaagugcaacggcaccgacgccaaggucaagcucaucaagcaggagcucgacaaguacaagaacgccgucaccgaccuccagcuccucaugcaguccacccccgccaccggcuccggcuccgccaucugcuccggcgucgccgucugcaagguccuccaccucgagggcgaggucaacaagaucaaguccgcccuccucuccaccaacaaggccgucgucucccucuccaacggcgucuccguccucaccuucaagguccucgaccucaagaacuacaucgacaagcagcuccuccccauccucaacaagcaguccugcuccauccccaacaucgagaccgucaucgaguuccagcagaagaacaaccgccuccucgagaucacccgcgaguucuccgucaacgccggcgucaccacccccgucuccaccuacaugcucaccaacuccgagcuccucucccucaucaacgacaugcccaucaccaacgaccagaagaagcucauguccaacaacguccagaucguccgccagcaguccuacuccaucaugugcaucaucaaggaggagguccucgccuacgucguccagcucccccucuacggcgucaucgacacccccugcuggaagcuccacaccuccccccucugcaccaccaacaccaaggagggcuccaacaucugccucacccgcaccgaccgcggcugguacugcgacaacgccggcuccgucuccuucuucccccaggccgagaccugcaagguccaguccaaccgcgucuucugcgacaccaugaacucccucacccuccccuccgaggucaaccucugcaacgucgacaucuucaaccccaaguacgacugcaagaucaugaccuccaagaccgacgucuccuccuccgucaucaccucccucggcgccaucgucuccugcuacggcaagaccaagugcaccgccuccaacaagaaccgcggcaucaucaagaccuucuccaacggcugcgacuacgucuccaacaagggcgucgacaccgucuccgucggcaacacccucuacugcgucaacaagcaggagggccagucccucuacgucaagggcgagcccaucaucaacuucuacgacccccucgucuuccccuccgacgaguucgacgccuccaucucccaggucaacgagaagaucaaccagucccucgccuucauccgcaaguccgacgagcuccuccacaacgucaacgccggcaaguccaccaccaacaucaugaucaccaccaucaucaucgucaucaucgucauccuccucucccucaucgccgucggccuccuccucuacugcaaggcccgcugaggacuagucccuguucccagagcccacuuuuuuuucuuuuuuugaaauaaaauagccugucuuucagaucuaaaaaaaaaaaaaaaaaaaaaaaaaaaaaaaaaaaaaaaaaaaaaaaaaaaaaaaaaaaaaaaaugcaucccccccccccccccccccccccccccccccaaaggcucuuuucagagccaccagaauu

SEQ ID NO: 3525 - RNA, 1813 nt, Artificial Sequence
  mRNA product Design a-5 comprising derived and/or modified sequence from HRSV(A2)__F-del_DSCav1_mut3 (opt3)
gggagacuuucccauucuguagcagaauuugguguugccuguggucuuggucccgcggagaagcuuaccauggagcugcucauccuuaaggccaacgcuauuaccacaauacugacugcagugacguucugcuuugccagcggccagaauaucaccgaagaguucuaccaauccacauguucugcggucucaaaaggguauuugggagcuuuaagaacugguugguacaccaguguuauuacaaucgaacugagcaacauuaaggagaucaaaugcaauggcaccgacgccaaggugaaacuaauaaagcaggaacucgauaaguauaaaaacgcaguaacugaccugcagcuucugaugcaguccacacccgccaccgggucuggaucggcuaucuguucaggcguggcagucugcaagguguugcaccucgagggugagguuaauaaaauuaagagcgcccugcugaguacgaacaaagcuguggucucccucucuaauggggugagcguauuaacuuuuaagguucuggaucuuaagaacuacaucgacaaacaauugcugccuauucuaaauaagcaguccuguucaaucccaaacauagaaaccgugauugaguuccagcagaaaaauaacaggcuccuggaaaucacacgggaguuuagugucaaugccggagugacuaccccggugagcacauauaugcuuaccaacucugagcuguugucccucauuaaugauaugcccaucacgaacgaccaaaagaaacugaugucaaacaauguccagaucguucgccagcagagcuacaguauuaugugcauaaucaaggaagagguguuagcguauguagugcaacugccucucuacggcgucauugauacuccauguuggaaacuucauacaucuccccugugcaccacuaacacaaaggaaggcuccaauaucuguuugacccgaacggaccgugggugguacugcgauaacgcaggaagcgugucguucuuuccucaggccgagaccuguaagguucagucuaauagaguguucugcgacacaaugaacucccuaacucugccaucagaagucaaucucugcaacguggauauauuuaaucccaaauaugacuguaagauuaugaccaguaaaacagauguaagcuccucuguuaucacuagccugggugcuaucgugucaugcuacggcaagaccaaauguacagccaguaacaagaauagggggauuaucaagaccuucuccaacggaugcgacuaugucagcaauaaaggcguggacacugucucuguggguaacacgcuuuacuguguuaauaagcaagaggggcagucacuguaugugaaaggagagccuauuauaaacuuuuacgauccauugguauucccgagugacgaauuugaugcaagcaucucccaggucaacgagaagauuaaucagucucucgcuuucauccggaaaucggacgaacuguuacacaacgugaaugccggcaagagcacaaccaacaucaugauuacuaccauaaucauuguuaucauugugauccugcuaucccucauagcggucggccugcuuuuguauugcaaggcccgcugaggacuagucccuguucccagagcccacuuuuuuuucuuuuuuugaaauaaaauagccugucuuucagaucuaaaaaaaaaaaaaaaaaaaaaaaaaaaaaaaaaaaaaaaaaaaaaaaaaaaaaaaaaaaaaaaaugcaucccccccccccccccccccccccccccccccaaaggcucuuuucagagccaccagaauu

SEQ ID NO: 3526 - RNA, 1813 nt, Artificial Sequence
  mRNA product Design a-5 comprising derived and/or modified sequence from HRSV(A2)__F-del_DSCav1_mut3 (opt4)
gggagacuuucccauucuguagcagaauuugguguugccuguggucuuggucccgcggagaagcuuaccauggagcugcugauccugaaggccaacgccaucaccaccauccugaccgccgugaccuucugcuucgccagcggccagaacaucaccgaggaguucuaccagagcaccugcagcgccgugagcaagggcuaccugggcgcccugagaaccggcugguacaccagcgugaucaccaucgagcugagcaacaucaaggagaucaagugcaacggcaccgacgccaaggugaagcugaucaagcaggagcuggacaaguacaagaacgccgugaccgaccugcagcugcugaugcagagcacccccgccaccggcagcggcagcgccaucugcagcggcguggccgugugcaaggugcugcaccuggagggcgaggugaacaagaucaagagcgcccugcugagcaccaacaaggccguggugagccugagcaacggcgugagcgugcugaccuucaaggugcuggaccugaagaacuacaucgacaagcagcugcugcccauccugaacaagcagagcugcagcauccccaacaucgagaccgugaucgaguuccagcagaagaacaacagacugcuggagaucaccagagaguucagcgugaacgccggcgugaccacccccgugagcaccuacaugcugaccaacagcgagcugcugagccugaucaacgacaugcccaucaccaacgaccagaagaagcugaugagcaacaacgugcagaucgugagacagcagagcuacagcaucaugugcaucaucaaggaggaggugcuggccuacguggugcagcugccccuguacggcgugaucgacacccccugcuggaagcugcacaccagcccccugugcaccaccaacaccaaggagggcagcaacaucugccugaccagaaccgacagaggcugguacugcgacaacgccggcagcgugagcuucuucccccaggccgagaccugcaaggugcagagcaacagaguguucugcgacaccaugaacagccugacccugcccagcgaggugaaccugugcaacguggacaucuucaaccccaaguacgacugcaagaucaugaccagcaagaccgacgugagcagcagcgugaucaccagccugggcgccaucgugagcugcuacggcaagaccaagugcaccgccagcaacaagaacagaggcaucaucaagaccuucagcaacggcugcgacuacgugagcaacaagggcguggacaccgugagcgugggcaacacccuguacugcgugaacaagcaggagggccagagccuguacgugaagggcgagcccaucaucaacuucuacgacccccugguguuccccagcgacgaguucgacgccagcaucagccaggugaacgagaagaucaaccagagccuggccuucaucagaaagagcgacgagcugcugcacaacgugaacgccggcaagagcaccaccaacaucaugaucaccaccaucaucaucgugaucaucgugauccugcugagccugaucgccgugggccugcugcuguacugcaaggccagaugaggacuagucccuguucccagagcccacuuuuuuuucuuuuuuugaaauaaaauagccugucuuucagaucuaaaaaaaaaaaaaaaaaaaaaaaaaaaaaaaaaaaaaaaaaaaaaaaaaaaaaaaaaaaaaaaaugcaucccccccccccccccccccccccccccccccaaaggcucuuuucagagccaccagaauu

SEQ ID NO: 3527 - RNA, 1813 nt, Artificial Sequence
  mRNA product Design a-5 comprising derived and/or modified sequence from HRSV(A2)__F-del_DSCav1_mut3 (opt5)
gggagacuuucccauucuguagcagaauuugguguugccuguggucuuggucccgcggagaagcuuaccauggagcugcucauccugaaggccaacgcuauuaccacaauccuuacggccgugaccuucugcuuugcgagcggccagaauauuacagaagaguucuaccaauccaccuguucugcugucagcaaaggguaucugggagcccucagaacaggcugguacaccuccguuaucacaauugaacugucuaacaucaaggagaucaaaugcaaugggaccgacgccaaggugaaacuuauuaagcaggaacuggauaaguauaaaaacgcugugacggaccuccagcugcugaugcagagcacccccgccacaggauccggcucugcuaucuguagcggggucgccgugugcaagguucuccaccuggagggagaggugaauaaaauuaaguccgcgcuucugagcaccaacaaagccgucgugucucucuccaauggcguuagcgugcugacauuuaagguccuugaucugaagaacuacaucgacaaacaacuccugccuauucugaauaagcagucuuguuccaucccgaacauugaaaccgugaucgaguuccagcagaaaaauaaccggcuccuggaaaucacgcgcgaguuuagcgugaaugcuggcgucacaacccccguuucuacauauaugcuuaccaacuccgagcugcucagccugauuaaugauaugccuaucaccaacgaccaaaagaaacuuauguccaacaaugugcagauugugagacagcagucuuacagcaucaugugcauuaucaaggaagagguccuggccuaugugguucaacucccccuguacggggugaucgauacaccuuguuggaaacugcauacgagcccccucugcaccacaaacaccaaggaaggauccaauauuugucugacacggaccgaccgcggcugguacugcgauaacgcugggucugucuccuucuuuccucaggccgagacguguaaggugcagagcaauagaguuuucugcgacacaaugaacucucuuacccugccgagcgaagugaaucucugcaacgucgauaucuuuaaucccaaauaugacuguaagauuaugaccuccaaaacagaugugucuagcuccgucaucaccagccugggagcgauugugucuugcuacggcaagacaaaauguacggccuccaacaagaaucgggggaucaucaagaccuucagcaacggaugcgacuauguuucuaauaaaggcguggacacagucuccgugggcaacacccuuuacuguguuaauaagcaagaggggcagagccuguaugugaaaggagagccuauuaucaacuuuuacgauccccucgucuucccuuccgacgaauuugaugcuucuauuagccaggugaacgagaagaucaaucagucccuggccuucauucgcaaaucugacgaacugcuccacaacgugaaugcuggcaagagcacaaccaacaucaugauuacgaccaucaucauuguuaucauugucauccugcuuucccugauugccguggggcuccugcuguauugcaaggccagaugaggacuagucccuguucccagagcccacuuuuuuuucuuuuuuugaaauaaaauagccugucuuucagaucuaaaaaaaaaaaaaaaaaaaaaaaaaaaaaaaaaaaaaaaaaaaaaaaaaaaaaaaaaaaaaaaaugcaucccccccccccccccccccccccccccccccaaaggcucuuuucagagccaccagaauu

SEQ ID NO: 3528 - RNA, 1813 nt, Artificial Sequence
  mRNA product Design a-5 comprising derived and/or modified sequence from HRSV(A2)__F-del_DSCav1_mut3 (opt6)
gggagacuuucccauucuguagcagaauuugguguugccuguggucuuggucccgcggagaagcuuaccauggaauuacuaauccugaaagcaaacgcaauuacuacaauacuaacagcaguaaccuuuugcuuugccucaggacaaaacauaacugaagaauuuuaccaaucaacuugcucagcagucucaaaaggcuaucuaggagcacuacgaacagguugguauacuucagucauaacaauagaauuaucaaacauaaaagaaauuaaauguaacggaacugacgcaaaaguaaaacucaucaaacaagaacucgauaaauacaaaaacgcuguaaccgacuuacaacuacuaaugcaaucaacuccagcaacaggcuccggauccgcaauaugcagugguguagcaguaugcaaaguccuacaccuagaaggagaaguaaauaagauaaaaucugcucuacuaucaacaaauaaagcaguugucucccuaucaaauggagucucaguacucaccuucaaaguauuagaccucaaaaacuacauagacaaacaacuauuaccaauacucaacaaacaauccugcuccaucccuaacauagaaaccguaaucgaauuucaacaaaaaaauaacagacucuuagaaauaacuagagaauuuucaguuaaugcaggcgugacaacaccaguaucaacauauaugcuaacaaacuccgaacuccuaucccuaauaaacgacaugccaaucacaaacgaccaaaaaaaacuaauguccaacaacguacaaaucguaagacaacaaucauacucuauaaugugcauaauaaaagaagaaguacuggccuacguaguacaauuaccacucuacggaguaauagacaccccaugcuggaaacuccauacaucaccccuaugcacaacaaacacaaaagaaggauccaacauaugucucacuagaacagacagaggcugguacugcgacaacgcuggauccgucucauucuucccccaagcagaaacauguaaaguacaaucuaauagaguauuuugugacacaaugaacagccucacacuaccauccgaagucaaccuauguaacguagauauauuuaaucccaaauacgacugcaaaauaaugacauccaaaacagauguaucaucauccguuaucaccucacuaggagccauaguuucaugcuacggaaaaacaaaaugcacugcaucuaacaaaaauagagguauaauaaaaacauuuuccaacggcugcgacuacgucucaaacaaaggcguagacaccguaucaguaggaaauacauuauauugcguaaauaaacaagaaggccaaucccuauacguaaaaggagaacccaucauaaacuucuaugacccacuuguuuuccccucagacgaauuugacgccucaauaucacaaguaaaugaaaaaauaaaccaaucucuugccuucauuagaaaaucagacgaauuacuacacaacgucaacgcaggaaaaucaacaacaaacaucaugauaacaacgauaauaauagucauaauaguaauacuacuaucauuaaucgcagucggacuccuauuauauugcaaagcuagauaaggacuagucccuguucccagagcccacuuuuuuuucuuuuuuugaaauaaaauagccugucuuucagaucuaaaaaaaaaaaaaaaaaaaaaaaaaaaaaaaaaaaaaaaaaaaaaaaaaaaaaaaaaaaaaaaaugcaucccccccccccccccccccccccccccccccaaaggcucuuuucagagccaccagaauu

SEQ ID NO: 3529 - RNA, 1813 nt, Artificial Sequence
  mRNA product Design a-5 comprising derived and/or modified sequence from HRSV(A2)__F-del_DSCav1_mut3 (opt11)
gggagacuuucccauucuguagcagaauuugguguugccuguggucuuggucccgcggagaagcuuaccauggaacuacucauacuaaaagccaacgccauaaccaccauccucaccgcaguaacuuucugcuucgcuuccggccaaaacaucaccgaagaauuuuaccaaaguaccugcagcgcagucucaaaaggauaccuaggcgcccuacgcacaggcugguacaccuccgucauuaccaucgaacucuccaacaucaaagaaauuaaaugcaacgguacagacgcaaaagucaaacucaucaaacaagaacucgacaaauacaaaaacgcagucaccgaccuccaacuccucaugcaauccacccccgccacaggcucuggcuccgccaucugcucaggcguagcagucugcaaaguccugcaccucgaaggcgaagucaacaaaaucaagucagcccuccucuccaccaacaaggccgucguaucccucucaaacggaguuagcguccucaccuucaaaguccuagaccucaaaaacuacaucgauaaacaacuacuccccauccuaaacaaacaaucaugcuccaucccaaacaucgaaaccguaaucgaguuccaacaaaagaacaaccgccuccucgaaaucacacgugaguucuccguuaacgccggcgucaccacccccgucucuacauacaugcucaccaacuccgaacuccuuucccucaucaacgacaugccaaucaccaacgaccaaaagaaacucaugucaaacaacguacaaaucguccgacaacaaagcuacuccaucaugugcaucaucaaagaagaaguccuugcauacgucguucaacuaccccucuacggcguaaucgacacucccugcuggaaacuccacaccuccccgcucugcacaaccaacaccaaagaaggcagcaacaucugccucacccgaaccgaccgcggcugguacugcgauaacgccggauccgucuccuucuucccacaagcagaaacuugcaaaguccaauccaaccgcgucuucugcgacaccaugaacucccucacacuccccuccgaagucaaccugugcaacgucgacaucuucaacccaaaauacgacugcaaaaucaugaccucaaaaaccgacgucucaucuucugucaucaccucucucggcgcuaucgucuccugcuauggcaaaaccaaaugcaccgccuccaacaagaaccgcggcauuaucaagaccuucuccaacggcugcgacuacgucuccaauaagggcgucgacaccgucucugucggcaacacccuuuacugcguaaacaaacaagaaggucaaucucucuacgucaaaggagaacccaucaucaacuucuacgacccccuggucuuccccuccgacgaguucgaugcaucaaucucccaagucaacgaaaagaucaaccaaucucucgcuuucauccgcaaauccgacgaacuccuacacaacguaaacgccggcaaauccaccacaaacaucaugaucaccaccauuaucauagucaucaucgucauccuccucuccuuaaucgccguuggccuccuucucuacugcaaagcccgauaaggacuagucccuguucccagagcccacuuuuuuuucuuuuuuugaaauaaaauagccugucuuucagaucuaaaaaaaaaaaaaaaaaaaaaaaaaaaaaaaaaaaaaaaaaaaaaaaaaaaaaaaaaaaaaaaaugcaucccccccccccccccccccccccccccccccaaaggcucuuuucagagccaccagaauu

SEQ ID NO: 3530 - RNA, 1994 nt, Artificial Sequence
  mRNA product Design b-1 comprising derived and/or modified sequence from HRSV(A2)__F-del_DSCav1_mut3 (opt1)
gggagacggagacggccugcaggaccugcucucucagcccucagccgaggccuacgccgagccgagugcgcagccgacgaccgggaggagccgcagccuucaacucugagguacugugauccgcgcugcccgccgggccgccccaguccgcugcugcggcaccuccuucccucgcgcccucuucgcucgccagcgccuucccugugagccugcgucaccgcggccgccaagcuuaccauggagcugcucauccugaaggccaacgccaucaccaccauccugacggcggugaccuucugcuucgccagcggccagaacaucaccgaggaguucuaccaguccacgugcagcgccgucuccaagggguaccucggcgcccugcggaccggcugguacaccuccgugaucaccaucgagcugagcaacaucaaggagaucaagugcaacgggaccgacgccaaggugaagcucaucaagcaggagcuggacaaguacaagaacgcggucacggaccugcagcuccugaugcaguccaccccggcaaccggcuccggcuccgccaucugcagcggcgucgccgugugcaaggugcugcaccucgagggggaggucaacaagaucaagagcgcccugcuguccaccaacaaggccguggugagccucuccaacggcgucagcgugcugaccuucaaggugcuggaccucaagaacuacaucgacaagcagcugcugcccauccugaacaagcagagcugcuccauccccaacaucgagacggugaucgaguuccagcagaagaacaaccggcuccuggagaucacccgcgaguucagcgugaacgccggggucaccacccccguguccacguacaugcugaccaacagcgagcuccugucccugaucaacgacaugccgaucaccaacgaccagaagaagcucaugagcaacaacgugcagaucguccggcagcaguccuacagcaucaugugcaucaucaaggaggaggugcuggcguacgugguccagcugccccucuacggcgugaucgacacccccugcuggaagcugcacacgagcccccugugcaccaccaacaccaaggagggguccaacaucugccucacgcgcaccgaccggggcugguacugcgacaacgccggcagcgucuccuucuucccgcaggccgagaccugcaaggugcagagcaaccgcguguucugcgacaccaugaacucccugacgcugcccagcgagguaaaccucugcaacgucgacaucuucaaccccaaguacgacugcaagaucaugaccuccaagaccgacgugagcuccagcgugaucaccucccugggggccaucgucagcugcuacggcaagacgaagugcaccgccagcaacaagaaccgggggaucaucaagaccuucuccaacggcugcgacuacgugagcaacaagggcguggacaccguguccgucgggaacacccuguacugcgugaacaagcaggagggccagagccucuacgugaagggggagcccaucaucaacuucuacgacccgcuggucuuccccuccgacgaguucgacgcgagcaucucccaggugaacgagaagaucaaccagagccuggccuucauccgcaaguccgacgagcugcuccacaacgugaacgccggcaagagcacgaccaacaucaugaucaccaccaucaucaucgucaucaucgugauccugcugucccucaucgccguggggcugcugcucuacugcaaggcccggugaggacuaguguccaccugucccuccugggcugcuggauugucucguuuuccugccaaauaaacaggaucagcgcuuuacagaucuaaaaaaaaaaaaaaaaaaaaaaaaaaaaaaaaaaaaaaaaaaaaaaaaaaaaaaaaaaaaaaaaugcaucccccccccccccccccccccccccccccccaaaggcucuuuucagagccaccagaauu

SEQ ID NO: 3531 - RNA, 1994 nt, Artificial Sequence
  mRNA product Design b-1 comprising derived and/or modified sequence from HRSV(A2)__F-del_DSCav1_mut3 (opt1)
gggagacggagacggccugcaggaccugcucucucagcccucagccgaggccuacgccgagccgagugcgcagccgacgaccgggaggagccgcagccuucaacucugagguacugugauccgcgcugcccgccgggccgccccaguccgcugcugcggcaccuccuucccucgcgcccucuucgcucgccagcgccuucccugugagccugcgucaccgcggccgccaagcuuaccauggagcugcucauccugaaggccaacgccaucaccaccauccugacggcggugaccuucugcuucgccagcggccagaacaucaccgaggaguucuaccaguccacgugcagcgccgucuccaagggguaccucggcgcccugcgcaccgggugguacaccagcgugaucaccaucgagcuguccaacaucaaggagaucaagugcaacggcaccgacgccaaggugaagcucaucaagcaggagcuggacaaguacaagaacgcggucacggaccugcagcuccugaugcagagcacccccgccaccggguccggcagcgccaucugcuccggcguggccgugugcaagguccugcaccucgagggggaggugaacaagaucaagagcgcgcugcuguccaccaacaaggccguggucagccucuccaacggcgugagcgugcugacguucaagguccuggaccucaagaacuacaucgacaagcagcugcugccgauccucaacaagcaguccugcagcauccccaacaucgagaccgugaucgaguuccagcagaagaacaaccggcugcuggagaucacccgcgaguucuccgugaacgccggggucaccacgcccgugagcaccuacaugcucaccaacuccgagcugcugagccucaucaacgacaugcccaucaccaacgaccagaagaagcugaugagcaacaacgugcagaucguccggcagcaguccuacagcaucaugugcaucaucaaggaggaggugcuggccuacgugguccagcucccgcuguacggcgugaucgacacgcccugcuggaagcugcacaccagcccccucugcaccaccaacacgaaggagggguccaacaucugccugacccgcaccgaccggggcugguacugcgacaacgccggcuccgugagcuucuucccccaggcggagaccugcaagguccaguccaaccgcguguucugcgacacgaugaacagccugacccucccguccgaggucaaccugugcaacguggacaucuucaaccccaaguacgacugcaagaucaugaccagcaagaccgacguguccagcuccgucaucacgagccugggggccaucguguccugcuacggcaagaccaagugcaccgccagcaacaagaaccgggggaucaucaagaccuucuccaacggcugcgacuacgugagcaacaagggcgucgacacgguguccguggggaacacccucuacugcgucaacaagcaggagggccagagccuguacgugaagggggagcccaucaucaacuucuacgacccccugguguucccgagcgacgaguucgacgccuccaucagccaggucaacgagaagaucaaccagucccucgccuucauccgcaagagcgacgagcugcugcacaacgugaacgcgggcaaguccaccaccaacaucaugaucaccacgaucaucaucgugaucaucgucauccuccugagccugaucgccguggggcuccugcuguacugcaaggcccggugaggacuaguguccaccugucccuccugggcugcuggauugucucguuuuccugccaaauaaacaggaucagcgcuuuacagaucuaaaaaaaaaaaaaaaaaaaaaaaaaaaaaaaaaaaaaaaaaaaaaaaaaaaaaaaaaaaaaaaaugcaucccccccccccccccccccccccccccccccaaaggcucuuuucagagccaccagaauu

SEQ ID NO: 3532 - RNA, 1994 nt, Artificial Sequence
  mRNA product Design b-1 comprising derived and/or modified sequence from HRSV(A2)__F-del_DSCav1_mut3 (opt2)
gggagacggagacggccugcaggaccugcucucucagcccucagccgaggccuacgccgagccgagugcgcagccgacgaccgggaggagccgcagccuucaacucugagguacugugauccgcgcugcccgccgggccgccccaguccgcugcugcggcaccuccuucccucgcgcccucuucgcucgccagcgccuucccugugagccugcgucaccgcggccgccaagcuuaccauggagcuccucauccucaaggccaacgccaucaccaccauccucaccgccgucaccuucugcuucgccuccggccagaacaucaccgaggaguucuaccaguccaccugcuccgccgucuccaagggcuaccucggcgcccuccgcaccggcugguacaccuccgucaucaccaucgagcucuccaacaucaaggagaucaagugcaacggcaccgacgccaaggucaagcucaucaagcaggagcucgacaaguacaagaacgccgucaccgaccuccagcuccucaugcaguccacccccgccaccggcuccggcuccgccaucugcuccggcgucgccgucugcaagguccuccaccucgagggcgaggucaacaagaucaaguccgcccuccucuccaccaacaaggccgucgucucccucuccaacggcgucuccguccucaccuucaagguccucgaccucaagaacuacaucgacaagcagcuccuccccauccucaacaagcaguccugcuccauccccaacaucgagaccgucaucgaguuccagcagaagaacaaccgccuccucgagaucacccgcgaguucuccgucaacgccggcgucaccacccccgucuccaccuacaugcucaccaacuccgagcuccucucccucaucaacgacaugcccaucaccaacgaccagaagaagcucauguccaacaacguccagaucguccgccagcaguccuacuccaucaugugcaucaucaaggaggagguccucgccuacgucguccagcucccccucuacggcgucaucgacacccccugcuggaagcuccacaccuccccccucugcaccaccaacaccaaggagggcuccaacaucugccucacccgcaccgaccgcggcugguacugcgacaacgccggcuccgucuccuucuucccccaggccgagaccugcaagguccaguccaaccgcgucuucugcgacaccaugaacucccucacccuccccuccgaggucaaccucugcaacgucgacaucuucaaccccaaguacgacugcaagaucaugaccuccaagaccgacgucuccuccuccgucaucaccucccucggcgccaucgucuccugcuacggcaagaccaagugcaccgccuccaacaagaaccgcggcaucaucaagaccuucuccaacggcugcgacuacgucuccaacaagggcgucgacaccgucuccgucggcaacacccucuacugcgucaacaagcaggagggccagucccucuacgucaagggcgagcccaucaucaacuucuacgacccccucgucuuccccuccgacgaguucgacgccuccaucucccaggucaacgagaagaucaaccagucccucgccuucauccgcaaguccgacgagcuccuccacaacgucaacgccggcaaguccaccaccaacaucaugaucaccaccaucaucaucgucaucaucgucauccuccucucccucaucgccgucggccuccuccucuacugcaaggcccgcugaggacuaguguccaccugucccuccugggcugcuggauugucucguuuuccugccaaauaaacaggaucagcgcuuuacagaucuaaaaaaaaaaaaaaaaaaaaaaaaaaaaaaaaaaaaaaaaaaaaaaaaaaaaaaaaaaaaaaaaugcaucccccccccccccccccccccccccccccccaaaggcucuuuucagagccaccagaauu

SEQ ID NO: 3533 - RNA, 1994 nt, Artificial Sequence
  mRNA product Design b-1 comprising derived and/or modified sequence from HRSV(A2)__F-del_DSCav1_mut3 (opt3)
gggagacggagacggccugcaggaccugcucucucagcccucagccgaggccuacgccgagccgagugcgcagccgacgaccgggaggagccgcagccuucaacucugagguacugugauccgcgcugcccgccgggccgccccaguccgcugcugcggcaccuccuucccucgcgcccucuucgcucgccagcgccuucccugugagccugcgucaccgcggccgccaagcuuaccauggagcugcucauccuuaaggccaacgcuauuaccacaauacugacugcagugacguucugcuuugccagcggccagaauaucaccgaagaguucuaccaauccacauguucugcggucucaaaaggguauuugggagcuuuaagaacugguugguacaccaguguuauuacaaucgaacugagcaacauuaaggagaucaaaugcaauggcaccgacgccaaggugaaacuaauaaagcaggaacucgauaaguauaaaaacgcaguaacugaccugcagcuucugaugcaguccacacccgccaccgggucuggaucggcuaucuguucaggcguggcagucugcaagguguugcaccucgagggugagguuaauaaaauuaagagcgcccugcugaguacgaacaaagcuguggucucccucucuaauggggugagcguauuaacuuuuaagguucuggaucuuaagaacuacaucgacaaacaauugcugccuauucuaaauaagcaguccuguucaaucccaaacauagaaaccgugauugaguuccagcagaaaaauaacaggcuccuggaaaucacacgggaguuuagugucaaugccggagugacuaccccggugagcacauauaugcuuaccaacucugagcuguugucccucauuaaugauaugcccaucacgaacgaccaaaagaaacugaugucaaacaauguccagaucguucgccagcagagcuacaguauuaugugcauaaucaaggaagagguguuagcguauguagugcaacugccucucuacggcgucauugauacuccauguuggaaacuucauacaucuccccugugcaccacuaacacaaaggaaggcuccaauaucuguuugacccgaacggaccgugggugguacugcgauaacgcaggaagcgugucguucuuuccucaggccgagaccuguaagguucagucuaauagaguguucugcgacacaaugaacucccuaacucugccaucagaagucaaucucugcaacguggauauauuuaaucccaaauaugacuguaagauuaugaccaguaaaacagauguaagcuccucuguuaucacuagccugggugcuaucgugucaugcuacggcaagaccaaauguacagccaguaacaagaauagggggauuaucaagaccuucuccaacggaugcgacuaugucagcaauaaaggcguggacacugucucuguggguaacacgcuuuacuguguuaauaagcaagaggggcagucacuguaugugaaaggagagccuauuauaaacuuuuacgauccauugguauucccgagugacgaauuugaugcaagcaucucccaggucaacgagaagauuaaucagucucucgcuuucauccggaaaucggacgaacuguuacacaacgugaaugccggcaagagcacaaccaacaucaugauuacuaccauaaucauuguuaucauugugauccugcuaucccucauagcggucggccugcuuuuguauugcaaggcccgcugaggacuaguguccaccugucccuccugggcugcuggauugucucguuuuccugccaaauaaacaggaucagcgcuuuacagaucuaaaaaaaaaaaaaaaaaaaaaaaaaaaaaaaaaaaaaaaaaaaaaaaaaaaaaaaaaaaaaaaaugcaucccccccccccccccccccccccccccccccaaaggcucuuuucagagccaccagaauu

SEQ ID NO: 3534 - RNA, 1994 nt, Artificial Sequence
  mRNA product Design b-1 comprising derived and/or modified sequence from HRSV(A2)__F-del_DSCav1_mut3 (opt4)
gggagacggagacggccugcaggaccugcucucucagcccucagccgaggccuacgccgagccgagugcgcagccgacgaccgggaggagccgcagccuucaacucugagguacugugauccgcgcugcccgccgggccgccccaguccgcugcugcggcaccuccuucccucgcgcccucuucgcucgccagcgccuucccugugagccugcgucaccgcggccgccaagcuuaccauggagcugcugauccugaaggccaacgccaucaccaccauccugaccgccgugaccuucugcuucgccagcggccagaacaucaccgaggaguucuaccagagcaccugcagcgccgugagcaagggcuaccugggcgcccugagaaccggcugguacaccagcgugaucaccaucgagcugagcaacaucaaggagaucaagugcaacggcaccgacgccaaggugaagcugaucaagcaggagcuggacaaguacaagaacgccgugaccgaccugcagcugcugaugcagagcacccccgccaccggcagcggcagcgccaucugcagcggcguggccgugugcaaggugcugcaccuggagggcgaggugaacaagaucaagagcgcccugcugagcaccaacaaggccguggugagccugagcaacggcgugagcgugcugaccuucaaggugcuggaccugaagaacuacaucgacaagcagcugcugcccauccugaacaagcagagcugcagcauccccaacaucgagaccgugaucgaguuccagcagaagaacaacagacugcuggagaucaccagagaguucagcgugaacgccggcgugaccacccccgugagcaccuacaugcugaccaacagcgagcugcugagccugaucaacgacaugcccaucaccaacgaccagaagaagcugaugagcaacaacgugcagaucgugagacagcagagcuacagcaucaugugcaucaucaaggaggaggugcuggccuacguggugcagcugccccuguacggcgugaucgacacccccugcuggaagcugcacaccagcccccugugcaccaccaacaccaaggagggcagcaacaucugccugaccagaaccgacagaggcugguacugcgacaacgccggcagcgugagcuucuucccccaggccgagaccugcaaggugcagagcaacagaguguucugcgacaccaugaacagccugacccugcccagcgaggugaaccugugcaacguggacaucuucaaccccaaguacgacugcaagaucaugaccagcaagaccgacgugagcagcagcgugaucaccagccugggcgccaucgugagcugcuacggcaagaccaagugcaccgccagcaacaagaacagaggcaucaucaagaccuucagcaacggcugcgacuacgugagcaacaagggcguggacaccgugagcgugggcaacacccuguacugcgugaacaagcaggagggccagagccuguacgugaagggcgagcccaucaucaacuucuacgacccccugguguuccccagcgacgaguucgacgccagcaucagccaggugaacgagaagaucaaccagagccuggccuucaucagaaagagcgacgagcugcugcacaacgugaacgccggcaagagcaccaccaacaucaugaucaccaccaucaucaucgugaucaucgugauccugcugagccugaucgccgugggccugcugcuguacugcaaggccagaugaggacuaguguccaccugucccuccugggcugcuggauugucucguuuuccugccaaauaaacaggaucagcgcuuuacagaucuaaaaaaaaaaaaaaaaaaaaaaaaaaaaaaaaaaaaaaaaaaaaaaaaaaaaaaaaaaaaaaaaugcaucccccccccccccccccccccccccccccccaaaggcucuuuucagagccaccagaauu

SEQ ID NO: 3535 - RNA, 1994 nt, Artificial Sequence
  mRNA product Design b-1 comprising derived and/or modified sequence from HRSV(A2)__F-del_DSCav1_mut3 (opt5)
gggagacggagacggccugcaggaccugcucucucagcccucagccgaggccuacgccgagccgagugcgcagccgacgaccgggaggagccgcagccuucaacucugagguacugugauccgcgcugcccgccgggccgccccaguccgcugcugcggcaccuccuucccucgcgcccucuucgcucgccagcgccuucccugugagccugcgucaccgcggccgccaagcuuaccauggagcugcucauccugaaggccaacgcuauuaccacaauccuuacggccgugaccuucugcuuugcgagcggccagaauauuacagaagaguucuaccaauccaccuguucugcugucagcaaaggguaucugggagcccucagaacaggcugguacaccuccguuaucacaauugaacugucuaacaucaaggagaucaaaugcaaugggaccgacgccaaggugaaacuuauuaagcaggaacuggauaaguauaaaaacgcugugacggaccuccagcugcugaugcagagcacccccgccacaggauccggcucugcuaucuguagcggggucgccgugugcaagguucuccaccuggagggagaggugaauaaaauuaaguccgcgcuucugagcaccaacaaagccgucgugucucucuccaauggcguuagcgugcugacauuuaagguccuugaucugaagaacuacaucgacaaacaacuccugccuauucugaauaagcagucuuguuccaucccgaacauugaaaccgugaucgaguuccagcagaaaaauaaccggcuccuggaaaucacgcgcgaguuuagcgugaaugcuggcgucacaacccccguuucuacauauaugcuuaccaacuccgagcugcucagccugauuaaugauaugccuaucaccaacgaccaaaagaaacuuauguccaacaaugugcagauugugagacagcagucuuacagcaucaugugcauuaucaaggaagagguccuggccuaugugguucaacucccccuguacggggugaucgauacaccuuguuggaaacugcauacgagcccccucugcaccacaaacaccaaggaaggauccaauauuugucugacacggaccgaccgcggcugguacugcgauaacgcugggucugucuccuucuuuccucaggccgagacguguaaggugcagagcaauagaguuuucugcgacacaaugaacucucuuacccugccgagcgaagugaaucucugcaacgucgauaucuuuaaucccaaauaugacuguaagauuaugaccuccaaaacagaugugucuagcuccgucaucaccagccugggagcgauugugucuugcuacggcaagacaaaauguacggccuccaacaagaaucgggggaucaucaagaccuucagcaacggaugcgacuauguuucuaauaaaggcguggacacagucuccgugggcaacacccuuuacuguguuaauaagcaagaggggcagagccuguaugugaaaggagagccuauuaucaacuuuuacgauccccucgucuucccuuccgacgaauuugaugcuucuauuagccaggugaacgagaagaucaaucagucccuggccuucauucgcaaaucugacgaacugcuccacaacgugaaugcuggcaagagcacaaccaacaucaugauuacgaccaucaucauuguuaucauugucauccugcuuucccugauugccguggggcuccugcuguauugcaaggccagaugaggacuaguguccaccugucccuccugggcugcuggauugucucguuuuccugccaaauaaacaggaucagcgcuuuacagaucuaaaaaaaaaaaaaaaaaaaaaaaaaaaaaaaaaaaaaaaaaaaaaaaaaaaaaaaaaaaaaaaaugcaucccccccccccccccccccccccccccccccaaaggcucuuuucagagccaccagaauu

SEQ ID NO: 3536 - RNA, 1994 nt, Artificial Sequence
  mRNA product Design b-1 comprising derived and/or modified sequence from HRSV(A2)__F-del_DSCav1_mut3 (opt6)
gggagacggagacggccugcaggaccugcucucucagcccucagccgaggccuacgccgagccgagugcgcagccgacgaccgggaggagccgcagccuucaacucugagguacugugauccgcgcugcccgccgggccgccccaguccgcugcugcggcaccuccuucccucgcgcccucuucgcucgccagcgccuucccugugagccugcgucaccgcggccgccaagcuuaccauggaauuacuaauccugaaagcaaacgcaauuacuacaauacuaacagcaguaaccuuuugcuuugccucaggacaaaacauaacugaagaauuuuaccaaucaacuugcucagcagucucaaaaggcuaucuaggagcacuacgaacagguugguauacuucagucauaacaauagaauuaucaaacauaaaagaaauuaaauguaacggaacugacgcaaaaguaaaacucaucaaacaagaacucgauaaauacaaaaacgcuguaaccgacuuacaacuacuaaugcaaucaacuccagcaacaggcuccggauccgcaauaugcagugguguagcaguaugcaaaguccuacaccuagaaggagaaguaaauaagauaaaaucugcucuacuaucaacaaauaaagcaguugucucccuaucaaauggagucucaguacucaccuucaaaguauuagaccucaaaaacuacauagacaaacaacuauuaccaauacucaacaaacaauccugcuccaucccuaacauagaaaccguaaucgaauuucaacaaaaaaauaacagacucuuagaaauaacuagagaauuuucaguuaaugcaggcgugacaacaccaguaucaacauauaugcuaacaaacuccgaacuccuaucccuaauaaacgacaugccaaucacaaacgaccaaaaaaaacuaauguccaacaacguacaaaucguaagacaacaaucauacucuauaaugugcauaauaaaagaagaaguacuggccuacguaguacaauuaccacucuacggaguaauagacaccccaugcuggaaacuccauacaucaccccuaugcacaacaaacacaaaagaaggauccaacauaugucucacuagaacagacagaggcugguacugcgacaacgcuggauccgucucauucuucccccaagcagaaacauguaaaguacaaucuaauagaguauuuugugacacaaugaacagccucacacuaccauccgaagucaaccuauguaacguagauauauuuaaucccaaauacgacugcaaaauaaugacauccaaaacagauguaucaucauccguuaucaccucacuaggagccauaguuucaugcuacggaaaaacaaaaugcacugcaucuaacaaaaauagagguauaauaaaaacauuuuccaacggcugcgacuacgucucaaacaaaggcguagacaccguaucaguaggaaauacauuauauugcguaaauaaacaagaaggccaaucccuauacguaaaaggagaacccaucauaaacuucuaugacccacuuguuuuccccucagacgaauuugacgccucaauaucacaaguaaaugaaaaaauaaaccaaucucuugccuucauuagaaaaucagacgaauuacuacacaacgucaacgcaggaaaaucaacaacaaacaucaugauaacaacgauaauaauagucauaauaguaauacuacuaucauuaaucgcagucggacuccuauuauauugcaaagcuagauaaggacuaguguccaccugucccuccugggcugcuggauugucucguuuuccugccaaauaaacaggaucagcgcuuuacagaucuaaaaaaaaaaaaaaaaaaaaaaaaaaaaaaaaaaaaaaaaaaaaaaaaaaaaaaaaaaaaaaaaugcaucccccccccccccccccccccccccccccccaaaggcucuuuucagagccaccagaauu

SEQ ID NO: 3537 - RNA, 1994 nt, Artificial Sequence
  mRNA product Design b-1 comprising derived and/or modified sequence from HRSV(A2)__F-del_DSCav1_mut3 (opt11)
gggagacggagacggccugcaggaccugcucucucagcccucagccgaggccuacgccgagccgagugcgcagccgacgaccgggaggagccgcagccuucaacucugagguacugugauccgcgcugcccgccgggccgccccaguccgcugcugcggcaccuccuucccucgcgcccucuucgcucgccagcgccuucccugugagccugcgucaccgcggccgccaagcuuaccauggaacuacucauacuaaaagccaacgccauaaccaccauccucaccgcaguaacuuucugcuucgcuuccggccaaaacaucaccgaagaauuuuaccaaaguaccugcagcgcagucucaaaaggauaccuaggcgcccuacgcacaggcugguacaccuccgucauuaccaucgaacucuccaacaucaaagaaauuaaaugcaacgguacagacgcaaaagucaaacucaucaaacaagaacucgacaaauacaaaaacgcagucaccgaccuccaacuccucaugcaauccacccccgccacaggcucuggcuccgccaucugcucaggcguagcagucugcaaaguccugcaccucgaaggcgaagucaacaaaaucaagucagcccuccucuccaccaacaaggccgucguaucccucucaaacggaguuagcguccucaccuucaaaguccuagaccucaaaaacuacaucgauaaacaacuacuccccauccuaaacaaacaaucaugcuccaucccaaacaucgaaaccguaaucgaguuccaacaaaagaacaaccgccuccucgaaaucacacgugaguucuccguuaacgccggcgucaccacccccgucucuacauacaugcucaccaacuccgaacuccuuucccucaucaacgacaugccaaucaccaacgaccaaaagaaacucaugucaaacaacguacaaaucguccgacaacaaagcuacuccaucaugugcaucaucaaagaagaaguccuugcauacgucguucaacuaccccucuacggcguaaucgacacucccugcuggaaacuccacaccuccccgcucugcacaaccaacaccaaagaaggcagcaacaucugccucacccgaaccgaccgcggcugguacugcgauaacgccggauccgucuccuucuucccacaagcagaaacuugcaaaguccaauccaaccgcgucuucugcgacaccaugaacucccucacacuccccuccgaagucaaccugugcaacgucgacaucuucaacccaaaauacgacugcaaaaucaugaccucaaaaaccgacgucucaucuucugucaucaccucucucggcgcuaucgucuccugcuauggcaaaaccaaaugcaccgccuccaacaagaaccgcggcauuaucaagaccuucuccaacggcugcgacuacgucuccaauaagggcgucgacaccgucucugucggcaacacccuuuacugcguaaacaaacaagaaggucaaucucucuacgucaaaggagaacccaucaucaacuucuacgacccccuggucuuccccuccgacgaguucgaugcaucaaucucccaagucaacgaaaagaucaaccaaucucucgcuuucauccgcaaauccgacgaacuccuacacaacguaaacgccggcaaauccaccacaaacaucaugaucaccaccauuaucauagucaucaucgucauccuccucuccuuaaucgccguuggccuccuucucuacugcaaagcccgauaaggacuaguguccaccugucccuccugggcugcuggauugucucguuuuccugccaaauaaacaggaucagcgcuuuacagaucuaaaaaaaaaaaaaaaaaaaaaaaaaaaaaaaaaaaaaaaaaaaaaaaaaaaaaaaaaaaaaaaaugcaucccccccccccccccccccccccccccccccaaaggcucuuuucagagccaccagaauu

SEQ ID NO: 3538 - RNA, 1814 nt, Artificial Sequence
  mRNA product Design b-2 comprising derived and/or modified sequence from HRSV(A2)__F-del_DSCav1_mut3 (opt1)
gggagagccucugcuggaguccggggaguggcguuggcugcuagagcgaagcuuaccauggagcugcucauccugaaggccaacgccaucaccaccauccugacggcggugaccuucugcuucgccagcggccagaacaucaccgaggaguucuaccaguccacgugcagcgccgucuccaagggguaccucggcgcccugcggaccggcugguacaccuccgugaucaccaucgagcugagcaacaucaaggagaucaagugcaacgggaccgacgccaaggugaagcucaucaagcaggagcuggacaaguacaagaacgcggucacggaccugcagcuccugaugcaguccaccccggcaaccggcuccggcuccgccaucugcagcggcgucgccgugugcaaggugcugcaccucgagggggaggucaacaagaucaagagcgcccugcuguccaccaacaaggccguggugagccucuccaacggcgucagcgugcugaccuucaaggugcuggaccucaagaacuacaucgacaagcagcugcugcccauccugaacaagcagagcugcuccauccccaacaucgagacggugaucgaguuccagcagaagaacaaccggcuccuggagaucacccgcgaguucagcgugaacgccggggucaccacccccguguccacguacaugcugaccaacagcgagcuccugucccugaucaacgacaugccgaucaccaacgaccagaagaagcucaugagcaacaacgugcagaucguccggcagcaguccuacagcaucaugugcaucaucaaggaggaggugcuggcguacgugguccagcugccccucuacggcgugaucgacacccccugcuggaagcugcacacgagcccccugugcaccaccaacaccaaggagggguccaacaucugccucacgcgcaccgaccggggcugguacugcgacaacgccggcagcgucuccuucuucccgcaggccgagaccugcaaggugcagagcaaccgcguguucugcgacaccaugaacucccugacgcugcccagcgagguaaaccucugcaacgucgacaucuucaaccccaaguacgacugcaagaucaugaccuccaagaccgacgugagcuccagcgugaucaccucccugggggccaucgucagcugcuacggcaagacgaagugcaccgccagcaacaagaaccgggggaucaucaagaccuucuccaacggcugcgacuacgugagcaacaagggcguggacaccguguccgucgggaacacccuguacugcgugaacaagcaggagggccagagccucuacgugaagggggagcccaucaucaacuucuacgacccgcuggucuuccccuccgacgaguucgacgcgagcaucucccaggugaacgagaagaucaaccagagccuggccuucauccgcaaguccgacgagcugcuccacaacgugaacgccggcaagagcacgaccaacaucaugaucaccaccaucaucaucgucaucaucgugauccugcugucccucaucgccguggggcugcugcucuacugcaaggcccggugaggacuaguguccaccugucccuccugggcugcuggauugucucguuuuccugccaaauaaacaggaucagcgcuuuacagaucuaaaaaaaaaaaaaaaaaaaaaaaaaaaaaaaaaaaaaaaaaaaaaaaaaaaaaaaaaaaaaaaaugcaucccccccccccccccccccccccccccccccaaaggcucuuuucagagccaccagaauu

SEQ ID NO: 3539 - RNA, 1814 nt, Artificial Sequence
  mRNA product Design b-2 comprising derived and/or modified sequence from HRSV(A2)__F-del_DSCav1_mut3 (opt1)
gggagagccucugcuggaguccggggaguggcguuggcugcuagagcgaagcuuaccauggagcugcucauccugaaggccaacgccaucaccaccauccugacggcggugaccuucugcuucgccagcggccagaacaucaccgaggaguucuaccaguccacgugcagcgccgucuccaagggguaccucggcgcccugcgcaccgggugguacaccagcgugaucaccaucgagcuguccaacaucaaggagaucaagugcaacggcaccgacgccaaggugaagcucaucaagcaggagcuggacaaguacaagaacgcggucacggaccugcagcuccugaugcagagcacccccgccaccggguccggcagcgccaucugcuccggcguggccgugugcaagguccugcaccucgagggggaggugaacaagaucaagagcgcgcugcuguccaccaacaaggccguggucagccucuccaacggcgugagcgugcugacguucaagguccuggaccucaagaacuacaucgacaagcagcugcugccgauccucaacaagcaguccugcagcauccccaacaucgagaccgugaucgaguuccagcagaagaacaaccggcugcuggagaucacccgcgaguucuccgugaacgccggggucaccacgcccgugagcaccuacaugcucaccaacuccgagcugcugagccucaucaacgacaugcccaucaccaacgaccagaagaagcugaugagcaacaacgugcagaucguccggcagcaguccuacagcaucaugugcaucaucaaggaggaggugcuggccuacgugguccagcucccgcuguacggcgugaucgacacgcccugcuggaagcugcacaccagcccccucugcaccaccaacacgaaggagggguccaacaucugccugacccgcaccgaccggggcugguacugcgacaacgccggcuccgugagcuucuucccccaggcggagaccugcaagguccaguccaaccgcguguucugcgacacgaugaacagccugacccucccguccgaggucaaccugugcaacguggacaucuucaaccccaaguacgacugcaagaucaugaccagcaagaccgacguguccagcuccgucaucacgagccugggggccaucguguccugcuacggcaagaccaagugcaccgccagcaacaagaaccgggggaucaucaagaccuucuccaacggcugcgacuacgugagcaacaagggcgucgacacgguguccguggggaacacccucuacugcgucaacaagcaggagggccagagccuguacgugaagggggagcccaucaucaacuucuacgacccccugguguucccgagcgacgaguucgacgccuccaucagccaggucaacgagaagaucaaccagucccucgccuucauccgcaagagcgacgagcugcugcacaacgugaacgcgggcaaguccaccaccaacaucaugaucaccacgaucaucaucgugaucaucgucauccuccugagccugaucgccguggggcuccugcuguacugcaaggcccggugaggacuaguguccaccugucccuccugggcugcuggauugucucguuuuccugccaaauaaacaggaucagcgcuuuacagaucuaaaaaaaaaaaaaaaaaaaaaaaaaaaaaaaaaaaaaaaaaaaaaaaaaaaaaaaaaaaaaaaaugcaucccccccccccccccccccccccccccccccaaaggcucuuuucagagccaccagaauu

SEQ ID NO: 3540 - RNA, 1814 nt, Artificial Sequence
  mRNA product Design b-2 comprising derived and/or modified sequence from HRSV(A2)__F-del_DSCav1_mut3 (opt2)
gggagagccucugcuggaguccggggaguggcguuggcugcuagagcgaagcuuaccauggagcuccucauccucaaggccaacgccaucaccaccauccucaccgccgucaccuucugcuucgccuccggccagaacaucaccgaggaguucuaccaguccaccugcuccgccgucuccaagggcuaccucggcgcccuccgcaccggcugguacaccuccgucaucaccaucgagcucuccaacaucaaggagaucaagugcaacggcaccgacgccaaggucaagcucaucaagcaggagcucgacaaguacaagaacgccgucaccgaccuccagcuccucaugcaguccacccccgccaccggcuccggcuccgccaucugcuccggcgucgccgucugcaagguccuccaccucgagggcgaggucaacaagaucaaguccgcccuccucuccaccaacaaggccgucgucucccucuccaacggcgucuccguccucaccuucaagguccucgaccucaagaacuacaucgacaagcagcuccuccccauccucaacaagcaguccugcuccauccccaacaucgagaccgucaucgaguuccagcagaagaacaaccgccuccucgagaucacccgcgaguucuccgucaacgccggcgucaccacccccgucuccaccuacaugcucaccaacuccgagcuccucucccucaucaacgacaugcccaucaccaacgaccagaagaagcucauguccaacaacguccagaucguccgccagcaguccuacuccaucaugugcaucaucaaggaggagguccucgccuacgucguccagcucccccucuacggcgucaucgacacccccugcuggaagcuccacaccuccccccucugcaccaccaacaccaaggagggcuccaacaucugccucacccgcaccgaccgcggcugguacugcgacaacgccggcuccgucuccuucuucccccaggccgagaccugcaagguccaguccaaccgcgucuucugcgacaccaugaacucccucacccuccccuccgaggucaaccucugcaacgucgacaucuucaaccccaaguacgacugcaagaucaugaccuccaagaccgacgucuccuccuccgucaucaccucccucggcgccaucgucuccugcuacggcaagaccaagugcaccgccuccaacaagaaccgcggcaucaucaagaccuucuccaacggcugcgacuacgucuccaacaagggcgucgacaccgucuccgucggcaacacccucuacugcgucaacaagcaggagggccagucccucuacgucaagggcgagcccaucaucaacuucuacgacccccucgucuuccccuccgacgaguucgacgccuccaucucccaggucaacgagaagaucaaccagucccucgccuucauccgcaaguccgacgagcuccuccacaacgucaacgccggcaaguccaccaccaacaucaugaucaccaccaucaucaucgucaucaucgucauccuccucucccucaucgccgucggccuccuccucuacugcaaggcccgcugaggacuaguguccaccugucccuccugggcugcuggauugucucguuuuccugccaaauaaacaggaucagcgcuuuacagaucuaaaaaaaaaaaaaaaaaaaaaaaaaaaaaaaaaaaaaaaaaaaaaaaaaaaaaaaaaaaaaaaaugcaucccccccccccccccccccccccccccccccaaaggcucuuuucagagccaccagaauu

SEQ ID NO: 3541 - RNA, 1814 nt, Artificial Sequence
  mRNA product Design b-2 comprising derived and/or modified sequence from HRSV(A2)__F-del_DSCav1_mut3 (opt3)
gggagagccucugcuggaguccggggaguggcguuggcugcuagagcgaagcuuaccauggagcugcucauccuuaaggccaacgcuauuaccacaauacugacugcagugacguucugcuuugccagcggccagaauaucaccgaagaguucuaccaauccacauguucugcggucucaaaaggguauuugggagcuuuaagaacugguugguacaccaguguuauuacaaucgaacugagcaacauuaaggagaucaaaugcaauggcaccgacgccaaggugaaacuaauaaagcaggaacucgauaaguauaaaaacgcaguaacugaccugcagcuucugaugcaguccacacccgccaccgggucuggaucggcuaucuguucaggcguggcagucugcaagguguugcaccucgagggugagguuaauaaaauuaagagcgcccugcugaguacgaacaaagcuguggucucccucucuaauggggugagcguauuaacuuuuaagguucuggaucuuaagaacuacaucgacaaacaauugcugccuauucuaaauaagcaguccuguucaaucccaaacauagaaaccgugauugaguuccagcagaaaaauaacaggcuccuggaaaucacacgggaguuuagugucaaugccggagugacuaccccggugagcacauauaugcuuaccaacucugagcuguugucccucauuaaugauaugcccaucacgaacgaccaaaagaaacugaugucaaacaauguccagaucguucgccagcagagcuacaguauuaugugcauaaucaaggaagagguguuagcguauguagugcaacugccucucuacggcgucauugauacuccauguuggaaacuucauacaucuccccugugcaccacuaacacaaaggaaggcuccaauaucuguuugacccgaacggaccgugggugguacugcgauaacgcaggaagcgugucguucuuuccucaggccgagaccuguaagguucagucuaauagaguguucugcgacacaaugaacucccuaacucugccaucagaagucaaucucugcaacguggauauauuuaaucccaaauaugacuguaagauuaugaccaguaaaacagauguaagcuccucuguuaucacuagccugggugcuaucgugucaugcuacggcaagaccaaauguacagccaguaacaagaauagggggauuaucaagaccuucuccaacggaugcgacuaugucagcaauaaaggcguggacacugucucuguggguaacacgcuuuacuguguuaauaagcaagaggggcagucacuguaugugaaaggagagccuauuauaaacuuuuacgauccauugguauucccgagugacgaauuugaugcaagcaucucccaggucaacgagaagauuaaucagucucucgcuuucauccggaaaucggacgaacuguuacacaacgugaaugccggcaagagcacaaccaacaucaugauuacuaccauaaucauuguuaucauugugauccugcuaucccucauagcggucggccugcuuuuguauugcaaggcccgcugaggacuaguguccaccugucccuccugggcugcuggauugucucguuuuccugccaaauaaacaggaucagcgcuuuacagaucuaaaaaaaaaaaaaaaaaaaaaaaaaaaaaaaaaaaaaaaaaaaaaaaaaaaaaaaaaaaaaaaaugcaucccccccccccccccccccccccccccccccaaaggcucuuuucagagccaccagaauu

SEQ ID NO: 3542 - RNA, 1814 nt, Artificial Sequence
  mRNA product Design b-2 comprising derived and/or modified sequence from HRSV(A2)__F-del_DSCav1_mut3 (opt4)
gggagagccucugcuggaguccggggaguggcguuggcugcuagagcgaagcuuaccauggagcugcugauccugaaggccaacgccaucaccaccauccugaccgccgugaccuucugcuucgccagcggccagaacaucaccgaggaguucuaccagagcaccugcagcgccgugagcaagggcuaccugggcgcccugagaaccggcugguacaccagcgugaucaccaucgagcugagcaacaucaaggagaucaagugcaacggcaccgacgccaaggugaagcugaucaagcaggagcuggacaaguacaagaacgccgugaccgaccugcagcugcugaugcagagcacccccgccaccggcagcggcagcgccaucugcagcggcguggccgugugcaaggugcugcaccuggagggcgaggugaacaagaucaagagcgcccugcugagcaccaacaaggccguggugagccugagcaacggcgugagcgugcugaccuucaaggugcuggaccugaagaacuacaucgacaagcagcugcugcccauccugaacaagcagagcugcagcauccccaacaucgagaccgugaucgaguuccagcagaagaacaacagacugcuggagaucaccagagaguucagcgugaacgccggcgugaccacccccgugagcaccuacaugcugaccaacagcgagcugcugagccugaucaacgacaugcccaucaccaacgaccagaagaagcugaugagcaacaacgugcagaucgugagacagcagagcuacagcaucaugugcaucaucaaggaggaggugcuggccuacguggugcagcugccccuguacggcgugaucgacacccccugcuggaagcugcacaccagcccccugugcaccaccaacaccaaggagggcagcaacaucugccugaccagaaccgacagaggcugguacugcgacaacgccggcagcgugagcuucuucccccaggccgagaccugcaaggugcagagcaacagaguguucugcgacaccaugaacagccugacccugcccagcgaggugaaccugugcaacguggacaucuucaaccccaaguacgacugcaagaucaugaccagcaagaccgacgugagcagcagcgugaucaccagccugggcgccaucgugagcugcuacggcaagaccaagugcaccgccagcaacaagaacagaggcaucaucaagaccuucagcaacggcugcgacuacgugagcaacaagggcguggacaccgugagcgugggcaacacccuguacugcgugaacaagcaggagggccagagccuguacgugaagggcgagcccaucaucaacuucuacgacccccugguguuccccagcgacgaguucgacgccagcaucagccaggugaacgagaagaucaaccagagccuggccuucaucagaaagagcgacgagcugcugcacaacgugaacgccggcaagagcaccaccaacaucaugaucaccaccaucaucaucgugaucaucgugauccugcugagccugaucgccgugggccugcugcuguacugcaaggccagaugaggacuaguguccaccugucccuccugggcugcuggauugucucguuuuccugccaaauaaacaggaucagcgcuuuacagaucuaaaaaaaaaaaaaaaaaaaaaaaaaaaaaaaaaaaaaaaaaaaaaaaaaaaaaaaaaaaaaaaaugcaucccccccccccccccccccccccccccccccaaaggcucuuuucagagccaccagaauu

SEQ ID NO: 3543 - RNA, 1814 nt, Artificial Sequence
  mRNA product Design b-2 comprising derived and/or modified sequence from HRSV(A2)__F-del_DSCav1_mut3 (opt5)
gggagagccucugcuggaguccggggaguggcguuggcugcuagagcgaagcuuaccauggagcugcucauccugaaggccaacgcuauuaccacaauccuuacggccgugaccuucugcuuugcgagcggccagaauauuacagaagaguucuaccaauccaccuguucugcugucagcaaaggguaucugggagcccucagaacaggcugguacaccuccguuaucacaauugaacugucuaacaucaaggagaucaaaugcaaugggaccgacgccaaggugaaacuuauuaagcaggaacuggauaaguauaaaaacgcugugacggaccuccagcugcugaugcagagcacccccgccacaggauccggcucugcuaucuguagcggggucgccgugugcaagguucuccaccuggagggagaggugaauaaaauuaaguccgcgcuucugagcaccaacaaagccgucgugucucucuccaauggcguuagcgugcugacauuuaagguccuugaucugaagaacuacaucgacaaacaacuccugccuauucugaauaagcagucuuguuccaucccgaacauugaaaccgugaucgaguuccagcagaaaaauaaccggcuccuggaaaucacgcgcgaguuuagcgugaaugcuggcgucacaacccccguuucuacauauaugcuuaccaacuccgagcugcucagccugauuaaugauaugccuaucaccaacgaccaaaagaaacuuauguccaacaaugugcagauugugagacagcagucuuacagcaucaugugcauuaucaaggaagagguccuggccuaugugguucaacucccccuguacggggugaucgauacaccuuguuggaaacugcauacgagcccccucugcaccacaaacaccaaggaaggauccaauauuugucugacacggaccgaccgcggcugguacugcgauaacgcugggucugucuccuucuuuccucaggccgagacguguaaggugcagagcaauagaguuuucugcgacacaaugaacucucuuacccugccgagcgaagugaaucucugcaacgucgauaucuuuaaucccaaauaugacuguaagauuaugaccuccaaaacagaugugucuagcuccgucaucaccagccugggagcgauugugucuugcuacggcaagacaaaauguacggccuccaacaagaaucgggggaucaucaagaccuucagcaacggaugcgacuauguuucuaauaaaggcguggacacagucuccgugggcaacacccuuuacuguguuaauaagcaagaggggcagagccuguaugugaaaggagagccuauuaucaacuuuuacgauccccucgucuucccuuccgacgaauuugaugcuucuauuagccaggugaacgagaagaucaaucagucccuggccuucauucgcaaaucugacgaacugcuccacaacgugaaugcuggcaagagcacaaccaacaucaugauuacgaccaucaucauuguuaucauugucauccugcuuucccugauugccguggggcuccugcuguauugcaaggccagaugaggacuaguguccaccugucccuccugggcugcuggauugucucguuuuccugccaaauaaacaggaucagcgcuuuacagaucuaaaaaaaaaaaaaaaaaaaaaaaaaaaaaaaaaaaaaaaaaaaaaaaaaaaaaaaaaaaaaaaaugcaucccccccccccccccccccccccccccccccaaaggcucuuuucagagccaccagaauu

SEQ ID NO: 3544 - RNA, 1814 nt, Artificial Sequence
  mRNA product Design b-2 comprising derived and/or modified sequence from HRSV(A2)__F-del_DSCav1_mut3 (opt6)
gggagagccucugcuggaguccggggaguggcguuggcugcuagagcgaagcuuaccauggaauuacuaauccugaaagcaaacgcaauuacuacaauacuaacagcaguaaccuuuugcuuugccucaggacaaaacauaacugaagaauuuuaccaaucaacuugcucagcagucucaaaaggcuaucuaggagcacuacgaacagguugguauacuucagucauaacaauagaauuaucaaacauaaaagaaauuaaauguaacggaacugacgcaaaaguaaaacucaucaaacaagaacucgauaaauacaaaaacgcuguaaccgacuuacaacuacuaaugcaaucaacuccagcaacaggcuccggauccgcaauaugcagugguguagcaguaugcaaaguccuacaccuagaaggagaaguaaauaagauaaaaucugcucuacuaucaacaaauaaagcaguugucucccuaucaaauggagucucaguacucaccuucaaaguauuagaccucaaaaacuacauagacaaacaacuauuaccaauacucaacaaacaauccugcuccaucccuaacauagaaaccguaaucgaauuucaacaaaaaaauaacagacucuuagaaauaacuagagaauuuucaguuaaugcaggcgugacaacaccaguaucaacauauaugcuaacaaacuccgaacuccuaucccuaauaaacgacaugccaaucacaaacgaccaaaaaaaacuaauguccaacaacguacaaaucguaagacaacaaucauacucuauaaugugcauaauaaaagaagaaguacuggccuacguaguacaauuaccacucuacggaguaauagacaccccaugcuggaaacuccauacaucaccccuaugcacaacaaacacaaaagaaggauccaacauaugucucacuagaacagacagaggcugguacugcgacaacgcuggauccgucucauucuucccccaagcagaaacauguaaaguacaaucuaauagaguauuuugugacacaaugaacagccucacacuaccauccgaagucaaccuauguaacguagauauauuuaaucccaaauacgacugcaaaauaaugacauccaaaacagauguaucaucauccguuaucaccucacuaggagccauaguuucaugcuacggaaaaacaaaaugcacugcaucuaacaaaaauagagguauaauaaaaacauuuuccaacggcugcgacuacgucucaaacaaaggcguagacaccguaucaguaggaaauacauuauauugcguaaauaaacaagaaggccaaucccuauacguaaaaggagaacccaucauaaacuucuaugacccacuuguuuuccccucagacgaauuugacgccucaauaucacaaguaaaugaaaaaauaaaccaaucucuugccuucauuagaaaaucagacgaauuacuacacaacgucaacgcaggaaaaucaacaacaaacaucaugauaacaacgauaauaauagucauaauaguaauacuacuaucauuaaucgcagucggacuccuauuauauugcaaagcuagauaaggacuaguguccaccugucccuccugggcugcuggauugucucguuuuccugccaaauaaacaggaucagcgcuuuacagaucuaaaaaaaaaaaaaaaaaaaaaaaaaaaaaaaaaaaaaaaaaaaaaaaaaaaaaaaaaaaaaaaaugcaucccccccccccccccccccccccccccccccaaaggcucuuuucagagccaccagaauu

SEQ ID NO: 3545 - RNA, 1814 nt, Artificial Sequence
  mRNA product Design b-2 comprising derived and/or modified sequence from HRSV(A2)__F-del_DSCav1_mut3 (opt11)
gggagagccucugcuggaguccggggaguggcguuggcugcuagagcgaagcuuaccauggaacuacucauacuaaaagccaacgccauaaccaccauccucaccgcaguaacuuucugcuucgcuuccggccaaaacaucaccgaagaauuuuaccaaaguaccugcagcgcagucucaaaaggauaccuaggcgcccuacgcacaggcugguacaccuccgucauuaccaucgaacucuccaacaucaaagaaauuaaaugcaacgguacagacgcaaaagucaaacucaucaaacaagaacucgacaaauacaaaaacgcagucaccgaccuccaacuccucaugcaauccacccccgccacaggcucuggcuccgccaucugcucaggcguagcagucugcaaaguccugcaccucgaaggcgaagucaacaaaaucaagucagcccuccucuccaccaacaaggccgucguaucccucucaaacggaguuagcguccucaccuucaaaguccuagaccucaaaaacuacaucgauaaacaacuacuccccauccuaaacaaacaaucaugcuccaucccaaacaucgaaaccguaaucgaguuccaacaaaagaacaaccgccuccucgaaaucacacgugaguucuccguuaacgccggcgucaccacccccgucucuacauacaugcucaccaacuccgaacuccuuucccucaucaacgacaugccaaucaccaacgaccaaaagaaacucaugucaaacaacguacaaaucguccgacaacaaagcuacuccaucaugugcaucaucaaagaagaaguccuugcauacgucguucaacuaccccucuacggcguaaucgacacucccugcuggaaacuccacaccuccccgcucugcacaaccaacaccaaagaaggcagcaacaucugccucacccgaaccgaccgcggcugguacugcgauaacgccggauccgucuccuucuucccacaagcagaaacuugcaaaguccaauccaaccgcgucuucugcgacaccaugaacucccucacacuccccuccgaagucaaccugugcaacgucgacaucuucaacccaaaauacgacugcaaaaucaugaccucaaaaaccgacgucucaucuucugucaucaccucucucggcgcuaucgucuccugcuauggcaaaaccaaaugcaccgccuccaacaagaaccgcggcauuaucaagaccuucuccaacggcugcgacuacgucuccaauaagggcgucgacaccgucucugucggcaacacccuuuacugcguaaacaaacaagaaggucaaucucucuacgucaaaggagaacccaucaucaacuucuacgacccccuggucuuccccuccgacgaguucgaugcaucaaucucccaagucaacgaaaagaucaaccaaucucucgcuuucauccgcaaauccgacgaacuccuacacaacguaaacgccggcaaauccaccacaaacaucaugaucaccaccauuaucauagucaucaucgucauccuccucuccuuaaucgccguuggccuccuucucuacugcaaagcccgauaaggacuaguguccaccugucccuccugggcugcuggauugucucguuuuccugccaaauaaacaggaucagcgcuuuacagaucuaaaaaaaaaaaaaaaaaaaaaaaaaaaaaaaaaaaaaaaaaaaaaaaaaaaaaaaaaaaaaaaaugcaucccccccccccccccccccccccccccccccaaaggcucuuuucagagccaccagaauu

SEQ ID NO: 3546 - RNA, 1834 nt, Artificial Sequence
  mRNA product Design b-3 comprising derived and/or modified sequence from HRSV(A2)__F-del_DSCav1_mut3 (opt1)
gggagagucccgcagucggcguccagcggcucugcuuguucgugugugugucguugcaggccuuauucaagcuuaccauggagcugcucauccugaaggccaacgccaucaccaccauccugacggcggugaccuucugcuucgccagcggccagaacaucaccgaggaguucuaccaguccacgugcagcgccgucuccaagggguaccucggcgcccugcggaccggcugguacaccuccgugaucaccaucgagcugagcaacaucaaggagaucaagugcaacgggaccgacgccaaggugaagcucaucaagcaggagcuggacaaguacaagaacgcggucacggaccugcagcuccugaugcaguccaccccggcaaccggcuccggcuccgccaucugcagcggcgucgccgugugcaaggugcugcaccucgagggggaggucaacaagaucaagagcgcccugcuguccaccaacaaggccguggugagccucuccaacggcgucagcgugcugaccuucaaggugcuggaccucaagaacuacaucgacaagcagcugcugcccauccugaacaagcagagcugcuccauccccaacaucgagacggugaucgaguuccagcagaagaacaaccggcuccuggagaucacccgcgaguucagcgugaacgccggggucaccacccccguguccacguacaugcugaccaacagcgagcuccugucccugaucaacgacaugccgaucaccaacgaccagaagaagcucaugagcaacaacgugcagaucguccggcagcaguccuacagcaucaugugcaucaucaaggaggaggugcuggcguacgugguccagcugccccucuacggcgugaucgacacccccugcuggaagcugcacacgagcccccugugcaccaccaacaccaaggagggguccaacaucugccucacgcgcaccgaccggggcugguacugcgacaacgccggcagcgucuccuucuucccgcaggccgagaccugcaaggugcagagcaaccgcguguucugcgacaccaugaacucccugacgcugcccagcgagguaaaccucugcaacgucgacaucuucaaccccaaguacgacugcaagaucaugaccuccaagaccgacgugagcuccagcgugaucaccucccugggggccaucgucagcugcuacggcaagacgaagugcaccgccagcaacaagaaccgggggaucaucaagaccuucuccaacggcugcgacuacgugagcaacaagggcguggacaccguguccgucgggaacacccuguacugcgugaacaagcaggagggccagagccucuacgugaagggggagcccaucaucaacuucuacgacccgcuggucuuccccuccgacgaguucgacgcgagcaucucccaggugaacgagaagaucaaccagagccuggccuucauccgcaaguccgacgagcugcuccacaacgugaacgccggcaagagcacgaccaacaucaugaucaccaccaucaucaucgucaucaucgugauccugcugucccucaucgccguggggcugcugcucuacugcaaggcccggugaggacuaguguccaccugucccuccugggcugcuggauugucucguuuuccugccaaauaaacaggaucagcgcuuuacagaucuaaaaaaaaaaaaaaaaaaaaaaaaaaaaaaaaaaaaaaaaaaaaaaaaaaaaaaaaaaaaaaaaugcaucccccccccccccccccccccccccccccccaaaggcucuuuucagagccaccagaauu

SEQ ID NO: 3547 - RNA, 1834 nt, Artificial Sequence
  mRNA product Design b-3 comprising derived and/or modified sequence from HRSV(A2)__F-del_DSCav1_mut3 (opt1)
gggagagucccgcagucggcguccagcggcucugcuuguucgugugugugucguugcaggccuuauucaagcuuaccauggagcugcucauccugaaggccaacgccaucaccaccauccugacggcggugaccuucugcuucgccagcggccagaacaucaccgaggaguucuaccaguccacgugcagcgccgucuccaagggguaccucggcgcccugcgcaccgggugguacaccagcgugaucaccaucgagcuguccaacaucaaggagaucaagugcaacggcaccgacgccaaggugaagcucaucaagcaggagcuggacaaguacaagaacgcggucacggaccugcagcuccugaugcagagcacccccgccaccggguccggcagcgccaucugcuccggcguggccgugugcaagguccugcaccucgagggggaggugaacaagaucaagagcgcgcugcuguccaccaacaaggccguggucagccucuccaacggcgugagcgugcugacguucaagguccuggaccucaagaacuacaucgacaagcagcugcugccgauccucaacaagcaguccugcagcauccccaacaucgagaccgugaucgaguuccagcagaagaacaaccggcugcuggagaucacccgcgaguucuccgugaacgccggggucaccacgcccgugagcaccuacaugcucaccaacuccgagcugcugagccucaucaacgacaugcccaucaccaacgaccagaagaagcugaugagcaacaacgugcagaucguccggcagcaguccuacagcaucaugugcaucaucaaggaggaggugcuggccuacgugguccagcucccgcuguacggcgugaucgacacgcccugcuggaagcugcacaccagcccccucugcaccaccaacacgaaggagggguccaacaucugccugacccgcaccgaccggggcugguacugcgacaacgccggcuccgugagcuucuucccccaggcggagaccugcaagguccaguccaaccgcguguucugcgacacgaugaacagccugacccucccguccgaggucaaccugugcaacguggacaucuucaaccccaaguacgacugcaagaucaugaccagcaagaccgacguguccagcuccgucaucacgagccugggggccaucguguccugcuacggcaagaccaagugcaccgccagcaacaagaaccgggggaucaucaagaccuucuccaacggcugcgacuacgugagcaacaagggcgucgacacgguguccguggggaacacccucuacugcgucaacaagcaggagggccagagccuguacgugaagggggagcccaucaucaacuucuacgacccccugguguucccgagcgacgaguucgacgccuccaucagccaggucaacgagaagaucaaccagucccucgccuucauccgcaagagcgacgagcugcugcacaacgugaacgcgggcaaguccaccaccaacaucaugaucaccacgaucaucaucgugaucaucgucauccuccugagccugaucgccguggggcuccugcuguacugcaaggcccggugaggacuaguguccaccugucccuccugggcugcuggauugucucguuuuccugccaaauaaacaggaucagcgcuuuacagaucuaaaaaaaaaaaaaaaaaaaaaaaaaaaaaaaaaaaaaaaaaaaaaaaaaaaaaaaaaaaaaaaaugcaucccccccccccccccccccccccccccccccaaaggcucuuuucagagccaccagaauu

SEQ ID NO: 3548 - RNA, 1834 nt, Artificial Sequence
  mRNA product Design b-3 comprising derived and/or modified sequence from HRSV(A2)__F-del_DSCav1_mut3 (opt2)
gggagagucccgcagucggcguccagcggcucugcuuguucgugugugugucguugcaggccuuauucaagcuuaccauggagcuccucauccucaaggccaacgccaucaccaccauccucaccgccgucaccuucugcuucgccuccggccagaacaucaccgaggaguucuaccaguccaccugcuccgccgucuccaagggcuaccucggcgcccuccgcaccggcugguacaccuccgucaucaccaucgagcucuccaacaucaaggagaucaagugcaacggcaccgacgccaaggucaagcucaucaagcaggagcucgacaaguacaagaacgccgucaccgaccuccagcuccucaugcaguccacccccgccaccggcuccggcuccgccaucugcuccggcgucgccgucugcaagguccuccaccucgagggcgaggucaacaagaucaaguccgcccuccucuccaccaacaaggccgucgucucccucuccaacggcgucuccguccucaccuucaagguccucgaccucaagaacuacaucgacaagcagcuccuccccauccucaacaagcaguccugcuccauccccaacaucgagaccgucaucgaguuccagcagaagaacaaccgccuccucgagaucacccgcgaguucuccgucaacgccggcgucaccacccccgucuccaccuacaugcucaccaacuccgagcuccucucccucaucaacgacaugcccaucaccaacgaccagaagaagcucauguccaacaacguccagaucguccgccagcaguccuacuccaucaugugcaucaucaaggaggagguccucgccuacgucguccagcucccccucuacggcgucaucgacacccccugcuggaagcuccacaccuccccccucugcaccaccaacaccaaggagggcuccaacaucugccucacccgcaccgaccgcggcugguacugcgacaacgccggcuccgucuccuucuucccccaggccgagaccugcaagguccaguccaaccgcgucuucugcgacaccaugaacucccucacccuccccuccgaggucaaccucugcaacgucgacaucuucaaccccaaguacgacugcaagaucaugaccuccaagaccgacgucuccuccuccgucaucaccucccucggcgccaucgucuccugcuacggcaagaccaagugcaccgccuccaacaagaaccgcggcaucaucaagaccuucuccaacggcugcgacuacgucuccaacaagggcgucgacaccgucuccgucggcaacacccucuacugcgucaacaagcaggagggccagucccucuacgucaagggcgagcccaucaucaacuucuacgacccccucgucuuccccuccgacgaguucgacgccuccaucucccaggucaacgagaagaucaaccagucccucgccuucauccgcaaguccgacgagcuccuccacaacgucaacgccggcaaguccaccaccaacaucaugaucaccaccaucaucaucgucaucaucgucauccuccucucccucaucgccgucggccuccuccucuacugcaaggcccgcugaggacuaguguccaccugucccuccugggcugcuggauugucucguuuuccugccaaauaaacaggaucagcgcuuuacagaucuaaaaaaaaaaaaaaaaaaaaaaaaaaaaaaaaaaaaaaaaaaaaaaaaaaaaaaaaaaaaaaaaugcaucccccccccccccccccccccccccccccccaaaggcucuuuucagagccaccagaauu

SEQ ID NO: 3549 - RNA, 1834 nt, Artificial Sequence
  mRNA product Design b-3 comprising derived and/or modified sequence from HRSV(A2)__F-del_DSCav1_mut3 (opt3)
gggagagucccgcagucggcguccagcggcucugcuuguucgugugugugucguugcaggccuuauucaagcuuaccauggagcugcucauccuuaaggccaacgcuauuaccacaauacugacugcagugacguucugcuuugccagcggccagaauaucaccgaagaguucuaccaauccacauguucugcggucucaaaaggguauuugggagcuuuaagaacugguugguacaccaguguuauuacaaucgaacugagcaacauuaaggagaucaaaugcaauggcaccgacgccaaggugaaacuaauaaagcaggaacucgauaaguauaaaaacgcaguaacugaccugcagcuucugaugcaguccacacccgccaccgggucuggaucggcuaucuguucaggcguggcagucugcaagguguugcaccucgagggugagguuaauaaaauuaagagcgcccugcugaguacgaacaaagcuguggucucccucucuaauggggugagcguauuaacuuuuaagguucuggaucuuaagaacuacaucgacaaacaauugcugccuauucuaaauaagcaguccuguucaaucccaaacauagaaaccgugauugaguuccagcagaaaaauaacaggcuccuggaaaucacacgggaguuuagugucaaugccggagugacuaccccggugagcacauauaugcuuaccaacucugagcuguugucccucauuaaugauaugcccaucacgaacgaccaaaagaaacugaugucaaacaauguccagaucguucgccagcagagcuacaguauuaugugcauaaucaaggaagagguguuagcguauguagugcaacugccucucuacggcgucauugauacuccauguuggaaacuucauacaucuccccugugcaccacuaacacaaaggaaggcuccaauaucuguuugacccgaacggaccgugggugguacugcgauaacgcaggaagcgugucguucuuuccucaggccgagaccuguaagguucagucuaauagaguguucugcgacacaaugaacucccuaacucugccaucagaagucaaucucugcaacguggauauauuuaaucccaaauaugacuguaagauuaugaccaguaaaacagauguaagcuccucuguuaucacuagccugggugcuaucgugucaugcuacggcaagaccaaauguacagccaguaacaagaauagggggauuaucaagaccuucuccaacggaugcgacuaugucagcaauaaaggcguggacacugucucuguggguaacacgcuuuacuguguuaauaagcaagaggggcagucacuguaugugaaaggagagccuauuauaaacuuuuacgauccauugguauucccgagugacgaauuugaugcaagcaucucccaggucaacgagaagauuaaucagucucucgcuuucauccggaaaucggacgaacuguuacacaacgugaaugccggcaagagcacaaccaacaucaugauuacuaccauaaucauuguuaucauugugauccugcuaucccucauagcggucggccugcuuuuguauugcaaggcccgcugaggacuaguguccaccugucccuccugggcugcuggauugucucguuuuccugccaaauaaacaggaucagcgcuuuacagaucuaaaaaaaaaaaaaaaaaaaaaaaaaaaaaaaaaaaaaaaaaaaaaaaaaaaaaaaaaaaaaaaaugcaucccccccccccccccccccccccccccccccaaaggcucuuuucagagccaccagaauu

SEQ ID NO: 3550 - RNA, 1834 nt, Artificial Sequence
  mRNA product Design b-3 comprising derived and/or modified sequence from HRSV(A2)__F-del_DSCav1_mut3 (opt4)
gggagagucccgcagucggcguccagcggcucugcuuguucgugugugugucguugcaggccuuauucaagcuuaccauggagcugcugauccugaaggccaacgccaucaccaccauccugaccgccgugaccuucugcuucgccagcggccagaacaucaccgaggaguucuaccagagcaccugcagcgccgugagcaagggcuaccugggcgcccugagaaccggcugguacaccagcgugaucaccaucgagcugagcaacaucaaggagaucaagugcaacggcaccgacgccaaggugaagcugaucaagcaggagcuggacaaguacaagaacgccgugaccgaccugcagcugcugaugcagagcacccccgccaccggcagcggcagcgccaucugcagcggcguggccgugugcaaggugcugcaccuggagggcgaggugaacaagaucaagagcgcccugcugagcaccaacaaggccguggugagccugagcaacggcgugagcgugcugaccuucaaggugcuggaccugaagaacuacaucgacaagcagcugcugcccauccugaacaagcagagcugcagcauccccaacaucgagaccgugaucgaguuccagcagaagaacaacagacugcuggagaucaccagagaguucagcgugaacgccggcgugaccacccccgugagcaccuacaugcugaccaacagcgagcugcugagccugaucaacgacaugcccaucaccaacgaccagaagaagcugaugagcaacaacgugcagaucgugagacagcagagcuacagcaucaugugcaucaucaaggaggaggugcuggccuacguggugcagcugccccuguacggcgugaucgacacccccugcuggaagcugcacaccagcccccugugcaccaccaacaccaaggagggcagcaacaucugccugaccagaaccgacagaggcugguacugcgacaacgccggcagcgugagcuucuucccccaggccgagaccugcaaggugcagagcaacagaguguucugcgacaccaugaacagccugacccugcccagcgaggugaaccugugcaacguggacaucuucaaccccaaguacgacugcaagaucaugaccagcaagaccgacgugagcagcagcgugaucaccagccugggcgccaucgugagcugcuacggcaagaccaagugcaccgccagcaacaagaacagaggcaucaucaagaccuucagcaacggcugcgacuacgugagcaacaagggcguggacaccgugagcgugggcaacacccuguacugcgugaacaagcaggagggccagagccuguacgugaagggcgagcccaucaucaacuucuacgacccccugguguuccccagcgacgaguucgacgccagcaucagccaggugaacgagaagaucaaccagagccuggccuucaucagaaagagcgacgagcugcugcacaacgugaacgccggcaagagcaccaccaacaucaugaucaccaccaucaucaucgugaucaucgugauccugcugagccugaucgccgugggccugcugcuguacugcaaggccagaugaggacuaguguccaccugucccuccugggcugcuggauugucucguuuuccugccaaauaaacaggaucagcgcuuuacagaucuaaaaaaaaaaaaaaaaaaaaaaaaaaaaaaaaaaaaaaaaaaaaaaaaaaaaaaaaaaaaaaaaugcaucccccccccccccccccccccccccccccccaaaggcucuuuucagagccaccagaauu

SEQ ID NO: 3551 - RNA, 1834 nt, Artificial Sequence
  mRNA product Design b-3 comprising derived and/or modified sequence from HRSV(A2)__F-del_DSCav1_mut3 (opt5)
gggagagucccgcagucggcguccagcggcucugcuuguucgugugugugucguugcaggccuuauucaagcuuaccauggagcugcucauccugaaggccaacgcuauuaccacaauccuuacggccgugaccuucugcuuugcgagcggccagaauauuacagaagaguucuaccaauccaccuguucugcugucagcaaaggguaucugggagcccucagaacaggcugguacaccuccguuaucacaauugaacugucuaacaucaaggagaucaaaugcaaugggaccgacgccaaggugaaacuuauuaagcaggaacuggauaaguauaaaaacgcugugacggaccuccagcugcugaugcagagcacccccgccacaggauccggcucugcuaucuguagcggggucgccgugugcaagguucuccaccuggagggagaggugaauaaaauuaaguccgcgcuucugagcaccaacaaagccgucgugucucucuccaauggcguuagcgugcugacauuuaagguccuugaucugaagaacuacaucgacaaacaacuccugccuauucugaauaagcagucuuguuccaucccgaacauugaaaccgugaucgaguuccagcagaaaaauaaccggcuccuggaaaucacgcgcgaguuuagcgugaaugcuggcgucacaacccccguuucuacauauaugcuuaccaacuccgagcugcucagccugauuaaugauaugccuaucaccaacgaccaaaagaaacuuauguccaacaaugugcagauugugagacagcagucuuacagcaucaugugcauuaucaaggaagagguccuggccuaugugguucaacucccccuguacggggugaucgauacaccuuguuggaaacugcauacgagcccccucugcaccacaaacaccaaggaaggauccaauauuugucugacacggaccgaccgcggcugguacugcgauaacgcugggucugucuccuucuuuccucaggccgagacguguaaggugcagagcaauagaguuuucugcgacacaaugaacucucuuacccugccgagcgaagugaaucucugcaacgucgauaucuuuaaucccaaauaugacuguaagauuaugaccuccaaaacagaugugucuagcuccgucaucaccagccugggagcgauugugucuugcuacggcaagacaaaauguacggccuccaacaagaaucgggggaucaucaagaccuucagcaacggaugcgacuauguuucuaauaaaggcguggacacagucuccgugggcaacacccuuuacuguguuaauaagcaagaggggcagagccuguaugugaaaggagagccuauuaucaacuuuuacgauccccucgucuucccuuccgacgaauuugaugcuucuauuagccaggugaacgagaagaucaaucagucccuggccuucauucgcaaaucugacgaacugcuccacaacgugaaugcuggcaagagcacaaccaacaucaugauuacgaccaucaucauuguuaucauugucauccugcuuucccugauugccguggggcuccugcuguauugcaaggccagaugaggacuaguguccaccugucccuccugggcugcuggauugucucguuuuccugccaaauaaacaggaucagcgcuuuacagaucuaaaaaaaaaaaaaaaaaaaaaaaaaaaaaaaaaaaaaaaaaaaaaaaaaaaaaaaaaaaaaaaaugcaucccccccccccccccccccccccccccccccaaaggcucuuuucagagccaccagaauu

SEQ ID NO: 3552 - RNA, 1834 nt, Artificial Sequence
  mRNA product Design b-3 comprising derived and/or modified sequence from HRSV(A2)__F-del_DSCav1_mut3 (opt6)
gggagagucccgcagucggcguccagcggcucugcuuguucgugugugugucguugcaggccuuauucaagcuuaccauggaauuacuaauccugaaagcaaacgcaauuacuacaauacuaacagcaguaaccuuuugcuuugccucaggacaaaacauaacugaagaauuuuaccaaucaacuugcucagcagucucaaaaggcuaucuaggagcacuacgaacagguugguauacuucagucauaacaauagaauuaucaaacauaaaagaaauuaaauguaacggaacugacgcaaaaguaaaacucaucaaacaagaacucgauaaauacaaaaacgcuguaaccgacuuacaacuacuaaugcaaucaacuccagcaacaggcuccggauccgcaauaugcagugguguagcaguaugcaaaguccuacaccuagaaggagaaguaaauaagauaaaaucugcucuacuaucaacaaauaaagcaguugucucccuaucaaauggagucucaguacucaccuucaaaguauuagaccucaaaaacuacauagacaaacaacuauuaccaauacucaacaaacaauccugcuccaucccuaacauagaaaccguaaucgaauuucaacaaaaaaauaacagacucuuagaaauaacuagagaauuuucaguuaaugcaggcgugacaacaccaguaucaacauauaugcuaacaaacuccgaacuccuaucccuaauaaacgacaugccaaucacaaacgaccaaaaaaaacuaauguccaacaacguacaaaucguaagacaacaaucauacucuauaaugugcauaauaaaagaagaaguacuggccuacguaguacaauuaccacucuacggaguaauagacaccccaugcuggaaacuccauacaucaccccuaugcacaacaaacacaaaagaaggauccaacauaugucucacuagaacagacagaggcugguacugcgacaacgcuggauccgucucauucuucccccaagcagaaacauguaaaguacaaucuaauagaguauuuugugacacaaugaacagccucacacuaccauccgaagucaaccuauguaacguagauauauuuaaucccaaauacgacugcaaaauaaugacauccaaaacagauguaucaucauccguuaucaccucacuaggagccauaguuucaugcuacggaaaaacaaaaugcacugcaucuaacaaaaauagagguauaauaaaaacauuuuccaacggcugcgacuacgucucaaacaaaggcguagacaccguaucaguaggaaauacauuauauugcguaaauaaacaagaaggccaaucccuauacguaaaaggagaacccaucauaaacuucuaugacccacuuguuuuccccucagacgaauuugacgccucaauaucacaaguaaaugaaaaaauaaaccaaucucuugccuucauuagaaaaucagacgaauuacuacacaacgucaacgcaggaaaaucaacaacaaacaucaugauaacaacgauaauaauagucauaauaguaauacuacuaucauuaaucgcagucggacuccuauuauauugcaaagcuagauaaggacuaguguccaccugucccuccugggcugcuggauugucucguuuuccugccaaauaaacaggaucagcgcuuuacagaucuaaaaaaaaaaaaaaaaaaaaaaaaaaaaaaaaaaaaaaaaaaaaaaaaaaaaaaaaaaaaaaaaugcaucccccccccccccccccccccccccccccccaaaggcucuuuucagagccaccagaauu

SEQ ID NO: 3553 - RNA, 1834 nt, Artificial Sequence
  mRNA product Design b-3 comprising derived and/or modified sequence from HRSV(A2)__F-del_DSCav1_mut3 (opt11)
gggagagucccgcagucggcguccagcggcucugcuuguucgugugugugucguugcaggccuuauucaagcuuaccauggaacuacucauacuaaaagccaacgccauaaccaccauccucaccgcaguaacuuucugcuucgcuuccggccaaaacaucaccgaagaauuuuaccaaaguaccugcagcgcagucucaaaaggauaccuaggcgcccuacgcacaggcugguacaccuccgucauuaccaucgaacucuccaacaucaaagaaauuaaaugcaacgguacagacgcaaaagucaaacucaucaaacaagaacucgacaaauacaaaaacgcagucaccgaccuccaacuccucaugcaauccacccccgccacaggcucuggcuccgccaucugcucaggcguagcagucugcaaaguccugcaccucgaaggcgaagucaacaaaaucaagucagcccuccucuccaccaacaaggccgucguaucccucucaaacggaguuagcguccucaccuucaaaguccuagaccucaaaaacuacaucgauaaacaacuacuccccauccuaaacaaacaaucaugcuccaucccaaacaucgaaaccguaaucgaguuccaacaaaagaacaaccgccuccucgaaaucacacgugaguucuccguuaacgccggcgucaccacccccgucucuacauacaugcucaccaacuccgaacuccuuucccucaucaacgacaugccaaucaccaacgaccaaaagaaacucaugucaaacaacguacaaaucguccgacaacaaagcuacuccaucaugugcaucaucaaagaagaaguccuugcauacgucguucaacuaccccucuacggcguaaucgacacucccugcuggaaacuccacaccuccccgcucugcacaaccaacaccaaagaaggcagcaacaucugccucacccgaaccgaccgcggcugguacugcgauaacgccggauccgucuccuucuucccacaagcagaaacuugcaaaguccaauccaaccgcgucuucugcgacaccaugaacucccucacacuccccuccgaagucaaccugugcaacgucgacaucuucaacccaaaauacgacugcaaaaucaugaccucaaaaaccgacgucucaucuucugucaucaccucucucggcgcuaucgucuccugcuauggcaaaaccaaaugcaccgccuccaacaagaaccgcggcauuaucaagaccuucuccaacggcugcgacuacgucuccaauaagggcgucgacaccgucucugucggcaacacccuuuacugcguaaacaaacaagaaggucaaucucucuacgucaaaggagaacccaucaucaacuucuacgacccccuggucuuccccuccgacgaguucgaugcaucaaucucccaagucaacgaaaagaucaaccaaucucucgcuuucauccgcaaauccgacgaacuccuacacaacguaaacgccggcaaauccaccacaaacaucaugaucaccaccauuaucauagucaucaucgucauccuccucuccuuaaucgccguuggccuccuucucuacugcaaagcccgauaaggacuaguguccaccugucccuccugggcugcuggauugucucguuuuccugccaaauaaacaggaucagcgcuuuacagaucuaaaaaaaaaaaaaaaaaaaaaaaaaaaaaaaaaaaaaaaaaaaaaaaaaaaaaaaaaaaaaaaaugcaucccccccccccccccccccccccccccccccaaaggcucuuuucagagccaccagaauu

SEQ ID NO: 3554 - RNA, 1885 nt, Artificial Sequence
  mRNA product Design b-4 comprising derived and/or modified sequence from HRSV(A2)__F-del_DSCav1_mut3 (opt1)
gggagagucccgcagucggcguccagcggcucugcuuguucgugugugugucguugcaggccuuauucaagcuuaccauggagcugcucauccugaaggccaacgccaucaccaccauccugacggcggugaccuucugcuucgccagcggccagaacaucaccgaggaguucuaccaguccacgugcagcgccgucuccaagggguaccucggcgcccugcggaccggcugguacaccuccgugaucaccaucgagcugagcaacaucaaggagaucaagugcaacgggaccgacgccaaggugaagcucaucaagcaggagcuggacaaguacaagaacgcggucacggaccugcagcuccugaugcaguccaccccggcaaccggcuccggcuccgccaucugcagcggcgucgccgugugcaaggugcugcaccucgagggggaggucaacaagaucaagagcgcccugcuguccaccaacaaggccguggugagccucuccaacggcgucagcgugcugaccuucaaggugcuggaccucaagaacuacaucgacaagcagcugcugcccauccugaacaagcagagcugcuccauccccaacaucgagacggugaucgaguuccagcagaagaacaaccggcuccuggagaucacccgcgaguucagcgugaacgccggggucaccacccccguguccacguacaugcugaccaacagcgagcuccugucccugaucaacgacaugccgaucaccaacgaccagaagaagcucaugagcaacaacgugcagaucguccggcagcaguccuacagcaucaugugcaucaucaaggaggaggugcuggcguacgugguccagcugccccucuacggcgugaucgacacccccugcuggaagcugcacacgagcccccugugcaccaccaacaccaaggagggguccaacaucugccucacgcgcaccgaccggggcugguacugcgacaacgccggcagcgucuccuucuucccgcaggccgagaccugcaaggugcagagcaaccgcguguucugcgacaccaugaacucccugacgcugcccagcgagguaaaccucugcaacgucgacaucuucaaccccaaguacgacugcaagaucaugaccuccaagaccgacgugagcuccagcgugaucaccucccugggggccaucgucagcugcuacggcaagacgaagugcaccgccagcaacaagaaccgggggaucaucaagaccuucuccaacggcugcgacuacgugagcaacaagggcguggacaccguguccgucgggaacacccuguacugcgugaacaagcaggagggccagagccucuacgugaagggggagcccaucaucaacuucuacgacccgcuggucuuccccuccgacgaguucgacgcgagcaucucccaggugaacgagaagaucaaccagagccuggccuucauccgcaaguccgacgagcugcuccacaacgugaacgccggcaagagcacgaccaacaucaugaucaccaccaucaucaucgucaucaucgugauccugcugucccucaucgccguggggcugcugcucuacugcaaggcccggugaggacuaguaauaaggaaacuguaugaaugucugugggcaggaagugaagagauccuucuguaaagguuuuuggaauuaugucugcugaauaauaaacuuuuuugaaauaauaaaucugguagaaaaaugagaucuaaaaaaaaaaaaaaaaaaaaaaaaaaaaaaaaaaaaaaaaaaaaaaaaaaaaaaaaaaaaaaaaugcaucccccccccccccccccccccccccccccccaaaggcucuuuucagagccaccagaauu

SEQ ID NO: 3555 - RNA, 1885 nt, Artificial Sequence
  mRNA product Design b-4 comprising derived and/or modified sequence from HRSV(A2)__F-del_DSCav1_mut3 (opt1)
gggagagucccgcagucggcguccagcggcucugcuuguucgugugugugucguugcaggccuuauucaagcuuaccauggagcugcucauccugaaggccaacgccaucaccaccauccugacggcggugaccuucugcuucgccagcggccagaacaucaccgaggaguucuaccaguccacgugcagcgccgucuccaagggguaccucggcgcccugcgcaccgggugguacaccagcgugaucaccaucgagcuguccaacaucaaggagaucaagugcaacggcaccgacgccaaggugaagcucaucaagcaggagcuggacaaguacaagaacgcggucacggaccugcagcuccugaugcagagcacccccgccaccggguccggcagcgccaucugcuccggcguggccgugugcaagguccugcaccucgagggggaggugaacaagaucaagagcgcgcugcuguccaccaacaaggccguggucagccucuccaacggcgugagcgugcugacguucaagguccuggaccucaagaacuacaucgacaagcagcugcugccgauccucaacaagcaguccugcagcauccccaacaucgagaccgugaucgaguuccagcagaagaacaaccggcugcuggagaucacccgcgaguucuccgugaacgccggggucaccacgcccgugagcaccuacaugcucaccaacuccgagcugcugagccucaucaacgacaugcccaucaccaacgaccagaagaagcugaugagcaacaacgugcagaucguccggcagcaguccuacagcaucaugugcaucaucaaggaggaggugcuggccuacgugguccagcucccgcuguacggcgugaucgacacgcccugcuggaagcugcacaccagcccccucugcaccaccaacacgaaggagggguccaacaucugccugacccgcaccgaccggggcugguacugcgacaacgccggcuccgugagcuucuucccccaggcggagaccugcaagguccaguccaaccgcguguucugcgacacgaugaacagccugacccucccguccgaggucaaccugugcaacguggacaucuucaaccccaaguacgacugcaagaucaugaccagcaagaccgacguguccagcuccgucaucacgagccugggggccaucguguccugcuacggcaagaccaagugcaccgccagcaacaagaaccgggggaucaucaagaccuucuccaacggcugcgacuacgugagcaacaagggcgucgacacgguguccguggggaacacccucuacugcgucaacaagcaggagggccagagccuguacgugaagggggagcccaucaucaacuucuacgacccccugguguucccgagcgacgaguucgacgccuccaucagccaggucaacgagaagaucaaccagucccucgccuucauccgcaagagcgacgagcugcugcacaacgugaacgcgggcaaguccaccaccaacaucaugaucaccacgaucaucaucgugaucaucgucauccuccugagccugaucgccguggggcuccugcuguacugcaaggcccggugaggacuaguaauaaggaaacuguaugaaugucugugggcaggaagugaagagauccuucuguaaagguuuuuggaauuaugucugcugaauaauaaacuuuuuugaaauaauaaaucugguagaaaaaugagaucuaaaaaaaaaaaaaaaaaaaaaaaaaaaaaaaaaaaaaaaaaaaaaaaaaaaaaaaaaaaaaaaaugcaucccccccccccccccccccccccccccccccaaaggcucuuuucagagccaccagaauu

SEQ ID NO: 3556 - RNA, 1885 nt, Artificial Sequence
  mRNA product Design b-4 comprising derived and/or modified sequence from HRSV(A2)__F-del_DSCav1_mut3 (opt2)
gggagagucccgcagucggcguccagcggcucugcuuguucgugugugugucguugcaggccuuauucaagcuuaccauggagcuccucauccucaaggccaacgccaucaccaccauccucaccgccgucaccuucugcuucgccuccggccagaacaucaccgaggaguucuaccaguccaccugcuccgccgucuccaagggcuaccucggcgcccuccgcaccggcugguacaccuccgucaucaccaucgagcucuccaacaucaaggagaucaagugcaacggcaccgacgccaaggucaagcucaucaagcaggagcucgacaaguacaagaacgccgucaccgaccuccagcuccucaugcaguccacccccgccaccggcuccggcuccgccaucugcuccggcgucgccgucugcaagguccuccaccucgagggcgaggucaacaagaucaaguccgcccuccucuccaccaacaaggccgucgucucccucuccaacggcgucuccguccucaccuucaagguccucgaccucaagaacuacaucgacaagcagcuccuccccauccucaacaagcaguccugcuccauccccaacaucgagaccgucaucgaguuccagcagaagaacaaccgccuccucgagaucacccgcgaguucuccgucaacgccggcgucaccacccccgucuccaccuacaugcucaccaacuccgagcuccucucccucaucaacgacaugcccaucaccaacgaccagaagaagcucauguccaacaacguccagaucguccgccagcaguccuacuccaucaugugcaucaucaaggaggagguccucgccuacgucguccagcucccccucuacggcgucaucgacacccccugcuggaagcuccacaccuccccccucugcaccaccaacaccaaggagggcuccaacaucugccucacccgcaccgaccgcggcugguacugcgacaacgccggcuccgucuccuucuucccccaggccgagaccugcaagguccaguccaaccgcgucuucugcgacaccaugaacucccucacccuccccuccgaggucaaccucugcaacgucgacaucuucaaccccaaguacgacugcaagaucaugaccuccaagaccgacgucuccuccuccgucaucaccucccucggcgccaucgucuccugcuacggcaagaccaagugcaccgccuccaacaagaaccgcggcaucaucaagaccuucuccaacggcugcgacuacgucuccaacaagggcgucgacaccgucuccgucggcaacacccucuacugcgucaacaagcaggagggccagucccucuacgucaagggcgagcccaucaucaacuucuacgacccccucgucuuccccuccgacgaguucgacgccuccaucucccaggucaacgagaagaucaaccagucccucgccuucauccgcaaguccgacgagcuccuccacaacgucaacgccggcaaguccaccaccaacaucaugaucaccaccaucaucaucgucaucaucgucauccuccucucccucaucgccgucggccuccuccucuacugcaaggcccgcugaggacuaguaauaaggaaacuguaugaaugucugugggcaggaagugaagagauccuucuguaaagguuuuuggaauuaugucugcugaauaauaaacuuuuuugaaauaauaaaucugguagaaaaaugagaucuaaaaaaaaaaaaaaaaaaaaaaaaaaaaaaaaaaaaaaaaaaaaaaaaaaaaaaaaaaaaaaaaugcaucccccccccccccccccccccccccccccccaaaggcucuuuucagagccaccagaauu

SEQ ID NO: 3557 - RNA, 1885 nt, Artificial Sequence
  mRNA product Design b-4 comprising derived and/or modified sequence from HRSV(A2)__F-del_DSCav1_mut3 (opt3)
gggagagucccgcagucggcguccagcggcucugcuuguucgugugugugucguugcaggccuuauucaagcuuaccauggagcugcucauccuuaaggccaacgcuauuaccacaauacugacugcagugacguucugcuuugccagcggccagaauaucaccgaagaguucuaccaauccacauguucugcggucucaaaaggguauuugggagcuuuaagaacugguugguacaccaguguuauuacaaucgaacugagcaacauuaaggagaucaaaugcaauggcaccgacgccaaggugaaacuaauaaagcaggaacucgauaaguauaaaaacgcaguaacugaccugcagcuucugaugcaguccacacccgccaccgggucuggaucggcuaucuguucaggcguggcagucugcaagguguugcaccucgagggugagguuaauaaaauuaagagcgcccugcugaguacgaacaaagcuguggucucccucucuaauggggugagcguauuaacuuuuaagguucuggaucuuaagaacuacaucgacaaacaauugcugccuauucuaaauaagcaguccuguucaaucccaaacauagaaaccgugauugaguuccagcagaaaaauaacaggcuccuggaaaucacacgggaguuuagugucaaugccggagugacuaccccggugagcacauauaugcuuaccaacucugagcuguugucccucauuaaugauaugcccaucacgaacgaccaaaagaaacugaugucaaacaauguccagaucguucgccagcagagcuacaguauuaugugcauaaucaaggaagagguguuagcguauguagugcaacugccucucuacggcgucauugauacuccauguuggaaacuucauacaucuccccugugcaccacuaacacaaaggaaggcuccaauaucuguuugacccgaacggaccgugggugguacugcgauaacgcaggaagcgugucguucuuuccucaggccgagaccuguaagguucagucuaauagaguguucugcgacacaaugaacucccuaacucugccaucagaagucaaucucugcaacguggauauauuuaaucccaaauaugacuguaagauuaugaccaguaaaacagauguaagcuccucuguuaucacuagccugggugcuaucgugucaugcuacggcaagaccaaauguacagccaguaacaagaauagggggauuaucaagaccuucuccaacggaugcgacuaugucagcaauaaaggcguggacacugucucuguggguaacacgcuuuacuguguuaauaagcaagaggggcagucacuguaugugaaaggagagccuauuauaaacuuuuacgauccauugguauucccgagugacgaauuugaugcaagcaucucccaggucaacgagaagauuaaucagucucucgcuuucauccggaaaucggacgaacuguuacacaacgugaaugccggcaagagcacaaccaacaucaugauuacuaccauaaucauuguuaucauugugauccugcuaucccucauagcggucggccugcuuuuguauugcaaggcccgcugaggacuaguaauaaggaaacuguaugaaugucugugggcaggaagugaagagauccuucuguaaagguuuuuggaauuaugucugcugaauaauaaacuuuuuugaaauaauaaaucugguagaaaaaugagaucuaaaaaaaaaaaaaaaaaaaaaaaaaaaaaaaaaaaaaaaaaaaaaaaaaaaaaaaaaaaaaaaaugcaucccccccccccccccccccccccccccccccaaaggcucuuuucagagccaccagaauu

SEQ ID NO: 3558 - RNA, 1885 nt, Artificial Sequence
  mRNA product Design b-4 comprising derived and/or modified sequence from HRSV(A2)__F-del_DSCav1_mut3 (opt4)
gggagagucccgcagucggcguccagcggcucugcuuguucgugugugugucguugcaggccuuauucaagcuuaccauggagcugcugauccugaaggccaacgccaucaccaccauccugaccgccgugaccuucugcuucgccagcggccagaacaucaccgaggaguucuaccagagcaccugcagcgccgugagcaagggcuaccugggcgcccugagaaccggcugguacaccagcgugaucaccaucgagcugagcaacaucaaggagaucaagugcaacggcaccgacgccaaggugaagcugaucaagcaggagcuggacaaguacaagaacgccgugaccgaccugcagcugcugaugcagagcacccccgccaccggcagcggcagcgccaucugcagcggcguggccgugugcaaggugcugcaccuggagggcgaggugaacaagaucaagagcgcccugcugagcaccaacaaggccguggugagccugagcaacggcgugagcgugcugaccuucaaggugcuggaccugaagaacuacaucgacaagcagcugcugcccauccugaacaagcagagcugcagcauccccaacaucgagaccgugaucgaguuccagcagaagaacaacagacugcuggagaucaccagagaguucagcgugaacgccggcgugaccacccccgugagcaccuacaugcugaccaacagcgagcugcugagccugaucaacgacaugcccaucaccaacgaccagaagaagcugaugagcaacaacgugcagaucgugagacagcagagcuacagcaucaugugcaucaucaaggaggaggugcuggccuacguggugcagcugccccuguacggcgugaucgacacccccugcuggaagcugcacaccagcccccugugcaccaccaacaccaaggagggcagcaacaucugccugaccagaaccgacagaggcugguacugcgacaacgccggcagcgugagcuucuucccccaggccgagaccugcaaggugcagagcaacagaguguucugcgacaccaugaacagccugacccugcccagcgaggugaaccugugcaacguggacaucuucaaccccaaguacgacugcaagaucaugaccagcaagaccgacgugagcagcagcgugaucaccagccugggcgccaucgugagcugcuacggcaagaccaagugcaccgccagcaacaagaacagaggcaucaucaagaccuucagcaacggcugcgacuacgugagcaacaagggcguggacaccgugagcgugggcaacacccuguacugcgugaacaagcaggagggccagagccuguacgugaagggcgagcccaucaucaacuucuacgacccccugguguuccccagcgacgaguucgacgccagcaucagccaggugaacgagaagaucaaccagagccuggccuucaucagaaagagcgacgagcugcugcacaacgugaacgccggcaagagcaccaccaacaucaugaucaccaccaucaucaucgugaucaucgugauccugcugagccugaucgccgugggccugcugcuguacugcaaggccagaugaggacuaguaauaaggaaacuguaugaaugucugugggcaggaagugaagagauccuucuguaaagguuuuuggaauuaugucugcugaauaauaaacuuuuuugaaauaauaaaucugguagaaaaaugagaucuaaaaaaaaaaaaaaaaaaaaaaaaaaaaaaaaaaaaaaaaaaaaaaaaaaaaaaaaaaaaaaaaugcaucccccccccccccccccccccccccccccccaaaggcucuuuucagagccaccagaauu

SEQ ID NO: 3559 - RNA, 1885 nt, Artificial Sequence
  mRNA product Design b-4 comprising derived and/or modified sequence from HRSV(A2)__F-del_DSCav1_mut3 (opt5)
gggagagucccgcagucggcguccagcggcucugcuuguucgugugugugucguugcaggccuuauucaagcuuaccauggagcugcucauccugaaggccaacgcuauuaccacaauccuuacggccgugaccuucugcuuugcgagcggccagaauauuacagaagaguucuaccaauccaccuguucugcugucagcaaaggguaucugggagcccucagaacaggcugguacaccuccguuaucacaauugaacugucuaacaucaaggagaucaaaugcaaugggaccgacgccaaggugaaacuuauuaagcaggaacuggauaaguauaaaaacgcugugacggaccuccagcugcugaugcagagcacccccgccacaggauccggcucugcuaucuguagcggggucgccgugugcaagguucuccaccuggagggagaggugaauaaaauuaaguccgcgcuucugagcaccaacaaagccgucgugucucucuccaauggcguuagcgugcugacauuuaagguccuugaucugaagaacuacaucgacaaacaacuccugccuauucugaauaagcagucuuguuccaucccgaacauugaaaccgugaucgaguuccagcagaaaaauaaccggcuccuggaaaucacgcgcgaguuuagcgugaaugcuggcgucacaacccccguuucuacauauaugcuuaccaacuccgagcugcucagccugauuaaugauaugccuaucaccaacgaccaaaagaaacuuauguccaacaaugugcagauugugagacagcagucuuacagcaucaugugcauuaucaaggaagagguccuggccuaugugguucaacucccccuguacggggugaucgauacaccuuguuggaaacugcauacgagcccccucugcaccacaaacaccaaggaaggauccaauauuugucugacacggaccgaccgcggcugguacugcgauaacgcugggucugucuccuucuuuccucaggccgagacguguaaggugcagagcaauagaguuuucugcgacacaaugaacucucuuacccugccgagcgaagugaaucucugcaacgucgauaucuuuaaucccaaauaugacuguaagauuaugaccuccaaaacagaugugucuagcuccgucaucaccagccugggagcgauugugucuugcuacggcaagacaaaauguacggccuccaacaagaaucgggggaucaucaagaccuucagcaacggaugcgacuauguuucuaauaaaggcguggacacagucuccgugggcaacacccuuuacuguguuaauaagcaagaggggcagagccuguaugugaaaggagagccuauuaucaacuuuuacgauccccucgucuucccuuccgacgaauuugaugcuucuauuagccaggugaacgagaagaucaaucagucccuggccuucauucgcaaaucugacgaacugcuccacaacgugaaugcuggcaagagcacaaccaacaucaugauuacgaccaucaucauuguuaucauugucauccugcuuucccugauugccguggggcuccugcuguauugcaaggccagaugaggacuaguaauaaggaaacuguaugaaugucugugggcaggaagugaagagauccuucuguaaagguuuuuggaauuaugucugcugaauaauaaacuuuuuugaaauaauaaaucugguagaaaaaugagaucuaaaaaaaaaaaaaaaaaaaaaaaaaaaaaaaaaaaaaaaaaaaaaaaaaaaaaaaaaaaaaaaaugcaucccccccccccccccccccccccccccccccaaaggcucuuuucagagccaccagaauu

SEQ ID NO: 3560 - RNA, 1885 nt, Artificial Sequence
  mRNA product Design b-4 comprising derived and/or modified sequence from HRSV(A2)__F-del_DSCav1_mut3 (opt6)
gggagagucccgcagucggcguccagcggcucugcuuguucgugugugugucguugcaggccuuauucaagcuuaccauggaauuacuaauccugaaagcaaacgcaauuacuacaauacuaacagcaguaaccuuuugcuuugccucaggacaaaacauaacugaagaauuuuaccaaucaacuugcucagcagucucaaaaggcuaucuaggagcacuacgaacagguugguauacuucagucauaacaauagaauuaucaaacauaaaagaaauuaaauguaacggaacugacgcaaaaguaaaacucaucaaacaagaacucgauaaauacaaaaacgcuguaaccgacuuacaacuacuaaugcaaucaacuccagcaacaggcuccggauccgcaauaugcagugguguagcaguaugcaaaguccuacaccuagaaggagaaguaaauaagauaaaaucugcucuacuaucaacaaauaaagcaguugucucccuaucaaauggagucucaguacucaccuucaaaguauuagaccucaaaaacuacauagacaaacaacuauuaccaauacucaacaaacaauccugcuccaucccuaacauagaaaccguaaucgaauuucaacaaaaaaauaacagacucuuagaaauaacuagagaauuuucaguuaaugcaggcgugacaacaccaguaucaacauauaugcuaacaaacuccgaacuccuaucccuaauaaacgacaugccaaucacaaacgaccaaaaaaaacuaauguccaacaacguacaaaucguaagacaacaaucauacucuauaaugugcauaauaaaagaagaaguacuggccuacguaguacaauuaccacucuacggaguaauagacaccccaugcuggaaacuccauacaucaccccuaugcacaacaaacacaaaagaaggauccaacauaugucucacuagaacagacagaggcugguacugcgacaacgcuggauccgucucauucuucccccaagcagaaacauguaaaguacaaucuaauagaguauuuugugacacaaugaacagccucacacuaccauccgaagucaaccuauguaacguagauauauuuaaucccaaauacgacugcaaaauaaugacauccaaaacagauguaucaucauccguuaucaccucacuaggagccauaguuucaugcuacggaaaaacaaaaugcacugcaucuaacaaaaauagagguauaauaaaaacauuuuccaacggcugcgacuacgucucaaacaaaggcguagacaccguaucaguaggaaauacauuauauugcguaaauaaacaagaaggccaaucccuauacguaaaaggagaacccaucauaaacuucuaugacccacuuguuuuccccucagacgaauuugacgccucaauaucacaaguaaaugaaaaaauaaaccaaucucuugccuucauuagaaaaucagacgaauuacuacacaacgucaacgcaggaaaaucaacaacaaacaucaugauaacaacgauaauaauagucauaauaguaauacuacuaucauuaaucgcagucggacuccuauuauauugcaaagcuagauaaggacuaguaauaaggaaacuguaugaaugucugugggcaggaagugaagagauccuucuguaaagguuuuuggaauuaugucugcugaauaauaaacuuuuuugaaauaauaaaucugguagaaaaaugagaucuaaaaaaaaaaaaaaaaaaaaaaaaaaaaaaaaaaaaaaaaaaaaaaaaaaaaaaaaaaaaaaaaugcaucccccccccccccccccccccccccccccccaaaggcucuuuucagagccaccagaauu

SEQ ID NO: 3561 - RNA, 1885 nt, Artificial Sequence
  mRNA product Design b-4 comprising derived and/or modified sequence from HRSV(A2)__F-del_DSCav1_mut3 (opt11)
gggagagucccgcagucggcguccagcggcucugcuuguucgugugugugucguugcaggccuuauucaagcuuaccauggaacuacucauacuaaaagccaacgccauaaccaccauccucaccgcaguaacuuucugcuucgcuuccggccaaaacaucaccgaagaauuuuaccaaaguaccugcagcgcagucucaaaaggauaccuaggcgcccuacgcacaggcugguacaccuccgucauuaccaucgaacucuccaacaucaaagaaauuaaaugcaacgguacagacgcaaaagucaaacucaucaaacaagaacucgacaaauacaaaaacgcagucaccgaccuccaacuccucaugcaauccacccccgccacaggcucuggcuccgccaucugcucaggcguagcagucugcaaaguccugcaccucgaaggcgaagucaacaaaaucaagucagcccuccucuccaccaacaaggccgucguaucccucucaaacggaguuagcguccucaccuucaaaguccuagaccucaaaaacuacaucgauaaacaacuacuccccauccuaaacaaacaaucaugcuccaucccaaacaucgaaaccguaaucgaguuccaacaaaagaacaaccgccuccucgaaaucacacgugaguucuccguuaacgccggcgucaccacccccgucucuacauacaugcucaccaacuccgaacuccuuucccucaucaacgacaugccaaucaccaacgaccaaaagaaacucaugucaaacaacguacaaaucguccgacaacaaagcuacuccaucaugugcaucaucaaagaagaaguccuugcauacgucguucaacuaccccucuacggcguaaucgacacucccugcuggaaacuccacaccuccccgcucugcacaaccaacaccaaagaaggcagcaacaucugccucacccgaaccgaccgcggcugguacugcgauaacgccggauccgucuccuucuucccacaagcagaaacuugcaaaguccaauccaaccgcgucuucugcgacaccaugaacucccucacacuccccuccgaagucaaccugugcaacgucgacaucuucaacccaaaauacgacugcaaaaucaugaccucaaaaaccgacgucucaucuucugucaucaccucucucggcgcuaucgucuccugcuauggcaaaaccaaaugcaccgccuccaacaagaaccgcggcauuaucaagaccuucuccaacggcugcgacuacgucuccaauaagggcgucgacaccgucucugucggcaacacccuuuacugcguaaacaaacaagaaggucaaucucucuacgucaaaggagaacccaucaucaacuucuacgacccccuggucuuccccuccgacgaguucgaugcaucaaucucccaagucaacgaaaagaucaaccaaucucucgcuuucauccgcaaauccgacgaacuccuacacaacguaaacgccggcaaauccaccacaaacaucaugaucaccaccauuaucauagucaucaucgucauccuccucuccuuaaucgccguuggccuccuucucuacugcaaagcccgauaaggacuaguaauaaggaaacuguaugaaugucugugggcaggaagugaagagauccuucuguaaagguuuuuggaauuaugucugcugaauaauaaacuuuuuugaaauaauaaaucugguagaaaaaugagaucuaaaaaaaaaaaaaaaaaaaaaaaaaaaaaaaaaaaaaaaaaaaaaaaaaaaaaaaaaaaaaaaaugcaucccccccccccccccccccccccccccccccaaaggcucuuuucagagccaccagaauu

SEQ ID NO: 3562 - RNA, 1947 nt, Artificial Sequence
  mRNA product Design b-5 comprising derived and/or modified sequence from HRSV(A2)__F-del_DSCav1_mut3 (opt1)
gggagacuccugucgggcggaaguaggaggaguagaguuuaaaaacaguacucuuuuuccgguucgggacguaguugaagcaacgacaagccggauaaccgcucuugagacaggaagcuuaccauggagcugcucauccugaaggccaacgccaucaccaccauccugacggcggugaccuucugcuucgccagcggccagaacaucaccgaggaguucuaccaguccacgugcagcgccgucuccaagggguaccucggcgcccugcggaccggcugguacaccuccgugaucaccaucgagcugagcaacaucaaggagaucaagugcaacgggaccgacgccaaggugaagcucaucaagcaggagcuggacaaguacaagaacgcggucacggaccugcagcuccugaugcaguccaccccggcaaccggcuccggcuccgccaucugcagcggcgucgccgugugcaaggugcugcaccucgagggggaggucaacaagaucaagagcgcccugcuguccaccaacaaggccguggugagccucuccaacggcgucagcgugcugaccuucaaggugcuggaccucaagaacuacaucgacaagcagcugcugcccauccugaacaagcagagcugcuccauccccaacaucgagacggugaucgaguuccagcagaagaacaaccggcuccuggagaucacccgcgaguucagcgugaacgccggggucaccacccccguguccacguacaugcugaccaacagcgagcuccugucccugaucaacgacaugccgaucaccaacgaccagaagaagcucaugagcaacaacgugcagaucguccggcagcaguccuacagcaucaugugcaucaucaaggaggaggugcuggcguacgugguccagcugccccucuacggcgugaucgacacccccugcuggaagcugcacacgagcccccugugcaccaccaacaccaaggagggguccaacaucugccucacgcgcaccgaccggggcugguacugcgacaacgccggcagcgucuccuucuucccgcaggccgagaccugcaaggugcagagcaaccgcguguucugcgacaccaugaacucccugacgcugcccagcgagguaaaccucugcaacgucgacaucuucaaccccaaguacgacugcaagaucaugaccuccaagaccgacgugagcuccagcgugaucaccucccugggggccaucgucagcugcuacggcaagacgaagugcaccgccagcaacaagaaccgggggaucaucaagaccuucuccaacggcugcgacuacgugagcaacaagggcguggacaccguguccgucgggaacacccuguacugcgugaacaagcaggagggccagagccucuacgugaagggggagcccaucaucaacuucuacgacccgcuggucuuccccuccgacgaguucgacgcgagcaucucccaggugaacgagaagaucaaccagagccuggccuucauccgcaaguccgacgagcugcuccacaacgugaacgccggcaagagcacgaccaacaucaugaucaccaccaucaucaucgucaucaucgugauccugcugucccucaucgccguggggcugcugcucuacugcaaggcccggugaggacuaguacuggcugcaucucccuuuccucuguccuccauccuucucccaggauggugaagggggaccugguacccagugauccccaccccaggauccuaaaucaugacuuaccugcuaauaaaaacucauuggaaaagugagaagaucuaaaaaaaaaaaaaaaaaaaaaaaaaaaaaaaaaaaaaaaaaaaaaaaaaaaaaaaaaaaaaaaaugcaucccccccccccccccccccccccccccccccaaaggcucuuuucagagccaccagaauu

SEQ ID NO: 3563 - RNA, 1947 nt, Artificial Sequence
  mRNA product Design b-5 comprising derived and/or modified sequence from HRSV(A2)__F-del_DSCav1_mut3 (opt1)
gggagacuccugucgggcggaaguaggaggaguagaguuuaaaaacaguacucuuuuuccgguucgggacguaguugaagcaacgacaagccggauaaccgcucuugagacaggaagcuuaccauggagcugcucauccugaaggccaacgccaucaccaccauccugacggcggugaccuucugcuucgccagcggccagaacaucaccgaggaguucuaccaguccacgugcagcgccgucuccaagggguaccucggcgcccugcgcaccgggugguacaccagcgugaucaccaucgagcuguccaacaucaaggagaucaagugcaacggcaccgacgccaaggugaagcucaucaagcaggagcuggacaaguacaagaacgcggucacggaccugcagcuccugaugcagagcacccccgccaccggguccggcagcgccaucugcuccggcguggccgugugcaagguccugcaccucgagggggaggugaacaagaucaagagcgcgcugcuguccaccaacaaggccguggucagccucuccaacggcgugagcgugcugacguucaagguccuggaccucaagaacuacaucgacaagcagcugcugccgauccucaacaagcaguccugcagcauccccaacaucgagaccgugaucgaguuccagcagaagaacaaccggcugcuggagaucacccgcgaguucuccgugaacgccggggucaccacgcccgugagcaccuacaugcucaccaacuccgagcugcugagccucaucaacgacaugcccaucaccaacgaccagaagaagcugaugagcaacaacgugcagaucguccggcagcaguccuacagcaucaugugcaucaucaaggaggaggugcuggccuacgugguccagcucccgcuguacggcgugaucgacacgcccugcuggaagcugcacaccagcccccucugcaccaccaacacgaaggagggguccaacaucugccugacccgcaccgaccggggcugguacugcgacaacgccggcuccgugagcuucuucccccaggcggagaccugcaagguccaguccaaccgcguguucugcgacacgaugaacagccugacccucccguccgaggucaaccugugcaacguggacaucuucaaccccaaguacgacugcaagaucaugaccagcaagaccgacguguccagcuccgucaucacgagccugggggccaucguguccugcuacggcaagaccaagugcaccgccagcaacaagaaccgggggaucaucaagaccuucuccaacggcugcgacuacgugagcaacaagggcgucgacacgguguccguggggaacacccucuacugcgucaacaagcaggagggccagagccuguacgugaagggggagcccaucaucaacuucuacgacccccugguguucccgagcgacgaguucgacgccuccaucagccaggucaacgagaagaucaaccagucccucgccuucauccgcaagagcgacgagcugcugcacaacgugaacgcgggcaaguccaccaccaacaucaugaucaccacgaucaucaucgugaucaucgucauccuccugagccugaucgccguggggcuccugcuguacugcaaggcccggugaggacuaguacuggcugcaucucccuuuccucuguccuccauccuucucccaggauggugaagggggaccugguacccagugauccccaccccaggauccuaaaucaugacuuaccugcuaauaaaaacucauuggaaaagugagaagaucuaaaaaaaaaaaaaaaaaaaaaaaaaaaaaaaaaaaaaaaaaaaaaaaaaaaaaaaaaaaaaaaaugcaucccccccccccccccccccccccccccccccaaaggcucuuuucagagccaccagaauu

SEQ ID NO: 3564 - RNA, 1947 nt, Artificial Sequence
  mRNA product Design b-5 comprising derived and/or modified sequence from HRSV(A2)__F-del_DSCav1_mut3 (opt2)
gggagacuccugucgggcggaaguaggaggaguagaguuuaaaaacaguacucuuuuuccgguucgggacguaguugaagcaacgacaagccggauaaccgcucuugagacaggaagcuuaccauggagcuccucauccucaaggccaacgccaucaccaccauccucaccgccgucaccuucugcuucgccuccggccagaacaucaccgaggaguucuaccaguccaccugcuccgccgucuccaagggcuaccucggcgcccuccgcaccggcugguacaccuccgucaucaccaucgagcucuccaacaucaaggagaucaagugcaacggcaccgacgccaaggucaagcucaucaagcaggagcucgacaaguacaagaacgccgucaccgaccuccagcuccucaugcaguccacccccgccaccggcuccggcuccgccaucugcuccggcgucgccgucugcaagguccuccaccucgagggcgaggucaacaagaucaaguccgcccuccucuccaccaacaaggccgucgucucccucuccaacggcgucuccguccucaccuucaagguccucgaccucaagaacuacaucgacaagcagcuccuccccauccucaacaagcaguccugcuccauccccaacaucgagaccgucaucgaguuccagcagaagaacaaccgccuccucgagaucacccgcgaguucuccgucaacgccggcgucaccacccccgucuccaccuacaugcucaccaacuccgagcuccucucccucaucaacgacaugcccaucaccaacgaccagaagaagcucauguccaacaacguccagaucguccgccagcaguccuacuccaucaugugcaucaucaaggaggagguccucgccuacgucguccagcucccccucuacggcgucaucgacacccccugcuggaagcuccacaccuccccccucugcaccaccaacaccaaggagggcuccaacaucugccucacccgcaccgaccgcggcugguacugcgacaacgccggcuccgucuccuucuucccccaggccgagaccugcaagguccaguccaaccgcgucuucugcgacaccaugaacucccucacccuccccuccgaggucaaccucugcaacgucgacaucuucaaccccaaguacgacugcaagaucaugaccuccaagaccgacgucuccuccuccgucaucaccucccucggcgccaucgucuccugcuacggcaagaccaagugcaccgccuccaacaagaaccgcggcaucaucaagaccuucuccaacggcugcgacuacgucuccaacaagggcgucgacaccgucuccgucggcaacacccucuacugcgucaacaagcaggagggccagucccucuacgucaagggcgagcccaucaucaacuucuacgacccccucgucuuccccuccgacgaguucgacgccuccaucucccaggucaacgagaagaucaaccagucccucgccuucauccgcaaguccgacgagcuccuccacaacgucaacgccggcaaguccaccaccaacaucaugaucaccaccaucaucaucgucaucaucgucauccuccucucccucaucgccgucggccuccuccucuacugcaaggcccgcugaggacuaguacuggcugcaucucccuuuccucuguccuccauccuucucccaggauggugaagggggaccugguacccagugauccccaccccaggauccuaaaucaugacuuaccugcuaauaaaaacucauuggaaaagugagaagaucuaaaaaaaaaaaaaaaaaaaaaaaaaaaaaaaaaaaaaaaaaaaaaaaaaaaaaaaaaaaaaaaaugcaucccccccccccccccccccccccccccccccaaaggcucuuuucagagccaccagaauu

SEQ ID NO: 3565 - RNA, 1947 nt, Artificial Sequence
  mRNA product Design b-5 comprising derived and/or modified sequence from HRSV(A2)__F-del_DSCav1_mut3 (opt3)
gggagacuccugucgggcggaaguaggaggaguagaguuuaaaaacaguacucuuuuuccgguucgggacguaguugaagcaacgacaagccggauaaccgcucuugagacaggaagcuuaccauggagcugcucauccuuaaggccaacgcuauuaccacaauacugacugcagugacguucugcuuugccagcggccagaauaucaccgaagaguucuaccaauccacauguucugcggucucaaaaggguauuugggagcuuuaagaacugguugguacaccaguguuauuacaaucgaacugagcaacauuaaggagaucaaaugcaauggcaccgacgccaaggugaaacuaauaaagcaggaacucgauaaguauaaaaacgcaguaacugaccugcagcuucugaugcaguccacacccgccaccgggucuggaucggcuaucuguucaggcguggcagucugcaagguguugcaccucgagggugagguuaauaaaauuaagagcgcccugcugaguacgaacaaagcuguggucucccucucuaauggggugagcguauuaacuuuuaagguucuggaucuuaagaacuacaucgacaaacaauugcugccuauucuaaauaagcaguccuguucaaucccaaacauagaaaccgugauugaguuccagcagaaaaauaacaggcuccuggaaaucacacgggaguuuagugucaaugccggagugacuaccccggugagcacauauaugcuuaccaacucugagcuguugucccucauuaaugauaugcccaucacgaacgaccaaaagaaacugaugucaaacaauguccagaucguucgccagcagagcuacaguauuaugugcauaaucaaggaagagguguuagcguauguagugcaacugccucucuacggcgucauugauacuccauguuggaaacuucauacaucuccccugugcaccacuaacacaaaggaaggcuccaauaucuguuugacccgaacggaccgugggugguacugcgauaacgcaggaagcgugucguucuuuccucaggccgagaccuguaagguucagucuaauagaguguucugcgacacaaugaacucccuaacucugccaucagaagucaaucucugcaacguggauauauuuaaucccaaauaugacuguaagauuaugaccaguaaaacagauguaagcuccucuguuaucacuagccugggugcuaucgugucaugcuacggcaagaccaaauguacagccaguaacaagaauagggggauuaucaagaccuucuccaacggaugcgacuaugucagcaauaaaggcguggacacugucucuguggguaacacgcuuuacuguguuaauaagcaagaggggcagucacuguaugugaaaggagagccuauuauaaacuuuuacgauccauugguauucccgagugacgaauuugaugcaagcaucucccaggucaacgagaagauuaaucagucucucgcuuucauccggaaaucggacgaacuguuacacaacgugaaugccggcaagagcacaaccaacaucaugauuacuaccauaaucauuguuaucauugugauccugcuaucccucauagcggucggccugcuuuuguauugcaaggcccgcugaggacuaguacuggcugcaucucccuuuccucuguccuccauccuucucccaggauggugaagggggaccugguacccagugauccccaccccaggauccuaaaucaugacuuaccugcuaauaaaaacucauuggaaaagugagaagaucuaaaaaaaaaaaaaaaaaaaaaaaaaaaaaaaaaaaaaaaaaaaaaaaaaaaaaaaaaaaaaaaaugcaucccccccccccccccccccccccccccccccaaaggcucuuuucagagccaccagaauu

SEQ ID NO: 3566 - RNA, 1947 nt, Artificial Sequence
  mRNA product Design b-5 comprising derived and/or modified sequence from HRSV(A2)__F-del_DSCav1_mut3 (opt4)
gggagacuccugucgggcggaaguaggaggaguagaguuuaaaaacaguacucuuuuuccgguucgggacguaguugaagcaacgacaagccggauaaccgcucuugagacaggaagcuuaccauggagcugcugauccugaaggccaacgccaucaccaccauccugaccgccgugaccuucugcuucgccagcggccagaacaucaccgaggaguucuaccagagcaccugcagcgccgugagcaagggcuaccugggcgcccugagaaccggcugguacaccagcgugaucaccaucgagcugagcaacaucaaggagaucaagugcaacggcaccgacgccaaggugaagcugaucaagcaggagcuggacaaguacaagaacgccgugaccgaccugcagcugcugaugcagagcacccccgccaccggcagcggcagcgccaucugcagcggcguggccgugugcaaggugcugcaccuggagggcgaggugaacaagaucaagagcgcccugcugagcaccaacaaggccguggugagccugagcaacggcgugagcgugcugaccuucaaggugcuggaccugaagaacuacaucgacaagcagcugcugcccauccugaacaagcagagcugcagcauccccaacaucgagaccgugaucgaguuccagcagaagaacaacagacugcuggagaucaccagagaguucagcgugaacgccggcgugaccacccccgugagcaccuacaugcugaccaacagcgagcugcugagccugaucaacgacaugcccaucaccaacgaccagaagaagcugaugagcaacaacgugcagaucgugagacagcagagcuacagcaucaugugcaucaucaaggaggaggugcuggccuacguggugcagcugccccuguacggcgugaucgacacccccugcuggaagcugcacaccagcccccugugcaccaccaacaccaaggagggcagcaacaucugccugaccagaaccgacagaggcugguacugcgacaacgccggcagcgugagcuucuucccccaggccgagaccugcaaggugcagagcaacagaguguucugcgacaccaugaacagccugacccugcccagcgaggugaaccugugcaacguggacaucuucaaccccaaguacgacugcaagaucaugaccagcaagaccgacgugagcagcagcgugaucaccagccugggcgccaucgugagcugcuacggcaagaccaagugcaccgccagcaacaagaacagaggcaucaucaagaccuucagcaacggcugcgacuacgugagcaacaagggcguggacaccgugagcgugggcaacacccuguacugcgugaacaagcaggagggccagagccuguacgugaagggcgagcccaucaucaacuucuacgacccccugguguuccccagcgacgaguucgacgccagcaucagccaggugaacgagaagaucaaccagagccuggccuucaucagaaagagcgacgagcugcugcacaacgugaacgccggcaagagcaccaccaacaucaugaucaccaccaucaucaucgugaucaucgugauccugcugagccugaucgccgugggccugcugcuguacugcaaggccagaugaggacuaguacuggcugcaucucccuuuccucuguccuccauccuucucccaggauggugaagggggaccugguacccagugauccccaccccaggauccuaaaucaugacuuaccugcuaauaaaaacucauuggaaaagugagaagaucuaaaaaaaaaaaaaaaaaaaaaaaaaaaaaaaaaaaaaaaaaaaaaaaaaaaaaaaaaaaaaaaaugcaucccccccccccccccccccccccccccccccaaaggcucuuuucagagccaccagaauu

SEQ ID NO: 3567 - RNA, 1947 nt, Artificial Sequence
  mRNA product Design b-5 comprising derived and/or modified sequence from HRSV(A2)__F-del_DSCav1_mut3 (opt5)
gggagacuccugucgggcggaaguaggaggaguagaguuuaaaaacaguacucuuuuuccgguucgggacguaguugaagcaacgacaagccggauaaccgcucuugagacaggaagcuuaccauggagcugcucauccugaaggccaacgcuauuaccacaauccuuacggccgugaccuucugcuuugcgagcggccagaauauuacagaagaguucuaccaauccaccuguucugcugucagcaaaggguaucugggagcccucagaacaggcugguacaccuccguuaucacaauugaacugucuaacaucaaggagaucaaaugcaaugggaccgacgccaaggugaaacuuauuaagcaggaacuggauaaguauaaaaacgcugugacggaccuccagcugcugaugcagagcacccccgccacaggauccggcucugcuaucuguagcggggucgccgugugcaagguucuccaccuggagggagaggugaauaaaauuaaguccgcgcuucugagcaccaacaaagccgucgugucucucuccaauggcguuagcgugcugacauuuaagguccuugaucugaagaacuacaucgacaaacaacuccugccuauucugaauaagcagucuuguuccaucccgaacauugaaaccgugaucgaguuccagcagaaaaauaaccggcuccuggaaaucacgcgcgaguuuagcgugaaugcuggcgucacaacccccguuucuacauauaugcuuaccaacuccgagcugcucagccugauuaaugauaugccuaucaccaacgaccaaaagaaacuuauguccaacaaugugcagauugugagacagcagucuuacagcaucaugugcauuaucaaggaagagguccuggccuaugugguucaacucccccuguacggggugaucgauacaccuuguuggaaacugcauacgagcccccucugcaccacaaacaccaaggaaggauccaauauuugucugacacggaccgaccgcggcugguacugcgauaacgcugggucugucuccuucuuuccucaggccgagacguguaaggugcagagcaauagaguuuucugcgacacaaugaacucucuuacccugccgagcgaagugaaucucugcaacgucgauaucuuuaaucccaaauaugacuguaagauuaugaccuccaaaacagaugugucuagcuccgucaucaccagccugggagcgauugugucuugcuacggcaagacaaaauguacggccuccaacaagaaucgggggaucaucaagaccuucagcaacggaugcgacuauguuucuaauaaaggcguggacacagucuccgugggcaacacccuuuacuguguuaauaagcaagaggggcagagccuguaugugaaaggagagccuauuaucaacuuuuacgauccccucgucuucccuuccgacgaauuugaugcuucuauuagccaggugaacgagaagaucaaucagucccuggccuucauucgcaaaucugacgaacugcuccacaacgugaaugcuggcaagagcacaaccaacaucaugauuacgaccaucaucauuguuaucauugucauccugcuuucccugauugccguggggcuccugcuguauugcaaggccagaugaggacuaguacuggcugcaucucccuuuccucuguccuccauccuucucccaggauggugaagggggaccugguacccagugauccccaccccaggauccuaaaucaugacuuaccugcuaauaaaaacucauuggaaaagugagaagaucuaaaaaaaaaaaaaaaaaaaaaaaaaaaaaaaaaaaaaaaaaaaaaaaaaaaaaaaaaaaaaaaaugcaucccccccccccccccccccccccccccccccaaaggcucuuuucagagccaccagaauu

SEQ ID NO: 3568 - RNA, 1947 nt, Artificial Sequence
  mRNA product Design b-5 comprising derived and/or modified sequence from HRSV(A2)__F-del_DSCav1_mut3 (opt6)
gggagacuccugucgggcggaaguaggaggaguagaguuuaaaaacaguacucuuuuuccgguucgggacguaguugaagcaacgacaagccggauaaccgcucuugagacaggaagcuuaccauggaauuacuaauccugaaagcaaacgcaauuacuacaauacuaacagcaguaaccuuuugcuuugccucaggacaaaacauaacugaagaauuuuaccaaucaacuugcucagcagucucaaaaggcuaucuaggagcacuacgaacagguugguauacuucagucauaacaauagaauuaucaaacauaaaagaaauuaaauguaacggaacugacgcaaaaguaaaacucaucaaacaagaacucgauaaauacaaaaacgcuguaaccgacuuacaacuacuaaugcaaucaacuccagcaacaggcuccggauccgcaauaugcagugguguagcaguaugcaaaguccuacaccuagaaggagaaguaaauaagauaaaaucugcucuacuaucaacaaauaaagcaguugucucccuaucaaauggagucucaguacucaccuucaaaguauuagaccucaaaaacuacauagacaaacaacuauuaccaauacucaacaaacaauccugcuccaucccuaacauagaaaccguaaucgaauuucaacaaaaaaauaacagacucuuagaaauaacuagagaauuuucaguuaaugcaggcgugacaacaccaguaucaacauauaugcuaacaaacuccgaacuccuaucccuaauaaacgacaugccaaucacaaacgaccaaaaaaaacuaauguccaacaacguacaaaucguaagacaacaaucauacucuauaaugugcauaauaaaagaagaaguacuggccuacguaguacaauuaccacucuacggaguaauagacaccccaugcuggaaacuccauacaucaccccuaugcacaacaaacacaaaagaaggauccaacauaugucucacuagaacagacagaggcugguacugcgacaacgcuggauccgucucauucuucccccaagcagaaacauguaaaguacaaucuaauagaguauuuugugacacaaugaacagccucacacuaccauccgaagucaaccuauguaacguagauauauuuaaucccaaauacgacugcaaaauaaugacauccaaaacagauguaucaucauccguuaucaccucacuaggagccauaguuucaugcuacggaaaaacaaaaugcacugcaucuaacaaaaauagagguauaauaaaaacauuuuccaacggcugcgacuacgucucaaacaaaggcguagacaccguaucaguaggaaauacauuauauugcguaaauaaacaagaaggccaaucccuauacguaaaaggagaacccaucauaaacuucuaugacccacuuguuuuccccucagacgaauuugacgccucaauaucacaaguaaaugaaaaaauaaaccaaucucuugccuucauuagaaaaucagacgaauuacuacacaacgucaacgcaggaaaaucaacaacaaacaucaugauaacaacgauaauaauagucauaauaguaauacuacuaucauuaaucgcagucggacuccuauuauauugcaaagcuagauaaggacuaguacuggcugcaucucccuuuccucuguccuccauccuucucccaggauggugaagggggaccugguacccagugauccccaccccaggauccuaaaucaugacuuaccugcuaauaaaaacucauuggaaaagugagaagaucuaaaaaaaaaaaaaaaaaaaaaaaaaaaaaaaaaaaaaaaaaaaaaaaaaaaaaaaaaaaaaaaaugcaucccccccccccccccccccccccccccccccaaaggcucuuuucagagccaccagaauu

SEQ ID NO: 3569 - RNA, 1947 nt, Artificial Sequence
  mRNA product Design b-5 comprising derived and/or modified sequence from HRSV(A2)__F-del_DSCav1_mut3 (opt11)
gggagacuccugucgggcggaaguaggaggaguagaguuuaaaaacaguacucuuuuuccgguucgggacguaguugaagcaacgacaagccggauaaccgcucuugagacaggaagcuuaccauggaacuacucauacuaaaagccaacgccauaaccaccauccucaccgcaguaacuuucugcuucgcuuccggccaaaacaucaccgaagaauuuuaccaaaguaccugcagcgcagucucaaaaggauaccuaggcgcccuacgcacaggcugguacaccuccgucauuaccaucgaacucuccaacaucaaagaaauuaaaugcaacgguacagacgcaaaagucaaacucaucaaacaagaacucgacaaauacaaaaacgcagucaccgaccuccaacuccucaugcaauccacccccgccacaggcucuggcuccgccaucugcucaggcguagcagucugcaaaguccugcaccucgaaggcgaagucaacaaaaucaagucagcccuccucuccaccaacaaggccgucguaucccucucaaacggaguuagcguccucaccuucaaaguccuagaccucaaaaacuacaucgauaaacaacuacuccccauccuaaacaaacaaucaugcuccaucccaaacaucgaaaccguaaucgaguuccaacaaaagaacaaccgccuccucgaaaucacacgugaguucuccguuaacgccggcgucaccacccccgucucuacauacaugcucaccaacuccgaacuccuuucccucaucaacgacaugccaaucaccaacgaccaaaagaaacucaugucaaacaacguacaaaucguccgacaacaaagcuacuccaucaugugcaucaucaaagaagaaguccuugcauacgucguucaacuaccccucuacggcguaaucgacacucccugcuggaaacuccacaccuccccgcucugcacaaccaacaccaaagaaggcagcaacaucugccucacccgaaccgaccgcggcugguacugcgauaacgccggauccgucuccuucuucccacaagcagaaacuugcaaaguccaauccaaccgcgucuucugcgacaccaugaacucccucacacuccccuccgaagucaaccugugcaacgucgacaucuucaacccaaaauacgacugcaaaaucaugaccucaaaaaccgacgucucaucuucugucaucaccucucucggcgcuaucgucuccugcuauggcaaaaccaaaugcaccgccuccaacaagaaccgcggcauuaucaagaccuucuccaacggcugcgacuacgucuccaauaagggcgucgacaccgucucugucggcaacacccuuuacugcguaaacaaacaagaaggucaaucucucuacgucaaaggagaacccaucaucaacuucuacgacccccuggucuuccccuccgacgaguucgaugcaucaaucucccaagucaacgaaaagaucaaccaaucucucgcuuucauccgcaaauccgacgaacuccuacacaacguaaacgccggcaaauccaccacaaacaucaugaucaccaccauuaucauagucaucaucgucauccuccucuccuuaaucgccguuggccuccuucucuacugcaaagcccgauaaggacuaguacuggcugcaucucccuuuccucuguccuccauccuucucccaggauggugaagggggaccugguacccagugauccccaccccaggauccuaaaucaugacuuaccugcuaauaaaaacucauuggaaaagugagaagaucuaaaaaaaaaaaaaaaaaaaaaaaaaaaaaaaaaaaaaaaaaaaaaaaaaaaaaaaaaaaaaaaaugcaucccccccccccccccccccccccccccccccaaaggcucuuuucagagccaccagaauu

SEQ ID NO: 3570 - RNA, 1853 nt, Artificial Sequence
  mRNA product Design c-1 comprising derived and/or modified sequence from HRSV(A2)__F-del_DSCav1_mut3 (opt1)
gggagaguccgcucagccagguugcagaagcggcuuagcguguguccuaaucuucucucugcguguagguaggccugugccgcaaacaagcuuaccauggagcugcucauccugaaggccaacgccaucaccaccauccugacggcggugaccuucugcuucgccagcggccagaacaucaccgaggaguucuaccaguccacgugcagcgccgucuccaagggguaccucggcgcccugcggaccggcugguacaccuccgugaucaccaucgagcugagcaacaucaaggagaucaagugcaacgggaccgacgccaaggugaagcucaucaagcaggagcuggacaaguacaagaacgcggucacggaccugcagcuccugaugcaguccaccccggcaaccggcuccggcuccgccaucugcagcggcgucgccgugugcaaggugcugcaccucgagggggaggucaacaagaucaagagcgcccugcuguccaccaacaaggccguggugagccucuccaacggcgucagcgugcugaccuucaaggugcuggaccucaagaacuacaucgacaagcagcugcugcccauccugaacaagcagagcugcuccauccccaacaucgagacggugaucgaguuccagcagaagaacaaccggcuccuggagaucacccgcgaguucagcgugaacgccggggucaccacccccguguccacguacaugcugaccaacagcgagcuccugucccugaucaacgacaugccgaucaccaacgaccagaagaagcucaugagcaacaacgugcagaucguccggcagcaguccuacagcaucaugugcaucaucaaggaggaggugcuggcguacgugguccagcugccccucuacggcgugaucgacacccccugcuggaagcugcacacgagcccccugugcaccaccaacaccaaggagggguccaacaucugccucacgcgcaccgaccggggcugguacugcgacaacgccggcagcgucuccuucuucccgcaggccgagaccugcaaggugcagagcaaccgcguguucugcgacaccaugaacucccugacgcugcccagcgagguaaaccucugcaacgucgacaucuucaaccccaaguacgacugcaagaucaugaccuccaagaccgacgugagcuccagcgugaucaccucccugggggccaucgucagcugcuacggcaagacgaagugcaccgccagcaacaagaaccgggggaucaucaagaccuucuccaacggcugcgacuacgugagcaacaagggcguggacaccguguccgucgggaacacccuguacugcgugaacaagcaggagggccagagccucuacgugaagggggagcccaucaucaacuucuacgacccgcuggucuuccccuccgacgaguucgacgcgagcaucucccaggugaacgagaagaucaaccagagccuggccuucauccgcaaguccgacgagcugcuccacaacgugaacgccggcaagagcacgaccaacaucaugaucaccaccaucaucaucgucaucaucgugauccugcugucccucaucgccguggggcugcugcucuacugcaaggcccggugaggacuaguguccaccugucccuccugggcugcuggauugucucguuuuccugccaaauaaacaggaucagcgcuuuacagaucuaaaaaaaaaaaaaaaaaaaaaaaaaaaaaaaaaaaaaaaaaaaaaaaaaaaaaaaaaaaaaaaaugcaucccccccccccccccccccccccccccccccaaaggcucuuuucagagccaccagaauu

SEQ ID NO: 3571 - RNA, 1853 nt, Artificial Sequence
  mRNA product Design c-1 comprising derived and/or modified sequence from HRSV(A2)__F-del_DSCav1_mut3 (opt1)
gggagaguccgcucagccagguugcagaagcggcuuagcguguguccuaaucuucucucugcguguagguaggccugugccgcaaacaagcuuaccauggagcugcucauccugaaggccaacgccaucaccaccauccugacggcggugaccuucugcuucgccagcggccagaacaucaccgaggaguucuaccaguccacgugcagcgccgucuccaagggguaccucggcgcccugcgcaccgggugguacaccagcgugaucaccaucgagcuguccaacaucaaggagaucaagugcaacggcaccgacgccaaggugaagcucaucaagcaggagcuggacaaguacaagaacgcggucacggaccugcagcuccugaugcagagcacccccgccaccggguccggcagcgccaucugcuccggcguggccgugugcaagguccugcaccucgagggggaggugaacaagaucaagagcgcgcugcuguccaccaacaaggccguggucagccucuccaacggcgugagcgugcugacguucaagguccuggaccucaagaacuacaucgacaagcagcugcugccgauccucaacaagcaguccugcagcauccccaacaucgagaccgugaucgaguuccagcagaagaacaaccggcugcuggagaucacccgcgaguucuccgugaacgccggggucaccacgcccgugagcaccuacaugcucaccaacuccgagcugcugagccucaucaacgacaugcccaucaccaacgaccagaagaagcugaugagcaacaacgugcagaucguccggcagcaguccuacagcaucaugugcaucaucaaggaggaggugcuggccuacgugguccagcucccgcuguacggcgugaucgacacgcccugcuggaagcugcacaccagcccccucugcaccaccaacacgaaggagggguccaacaucugccugacccgcaccgaccggggcugguacugcgacaacgccggcuccgugagcuucuucccccaggcggagaccugcaagguccaguccaaccgcguguucugcgacacgaugaacagccugacccucccguccgaggucaaccugugcaacguggacaucuucaaccccaaguacgacugcaagaucaugaccagcaagaccgacguguccagcuccgucaucacgagccugggggccaucguguccugcuacggcaagaccaagugcaccgccagcaacaagaaccgggggaucaucaagaccuucuccaacggcugcgacuacgugagcaacaagggcgucgacacgguguccguggggaacacccucuacugcgucaacaagcaggagggccagagccuguacgugaagggggagcccaucaucaacuucuacgacccccugguguucccgagcgacgaguucgacgccuccaucagccaggucaacgagaagaucaaccagucccucgccuucauccgcaagagcgacgagcugcugcacaacgugaacgcgggcaaguccaccaccaacaucaugaucaccacgaucaucaucgugaucaucgucauccuccugagccugaucgccguggggcuccugcuguacugcaaggcccggugaggacuaguguccaccugucccuccugggcugcuggauugucucguuuuccugccaaauaaacaggaucagcgcuuuacagaucuaaaaaaaaaaaaaaaaaaaaaaaaaaaaaaaaaaaaaaaaaaaaaaaaaaaaaaaaaaaaaaaaugcaucccccccccccccccccccccccccccccccaaaggcucuuuucagagccaccagaauu

SEQ ID NO: 3572 - RNA, 1853 nt, Artificial Sequence
  mRNA product Design c-1 comprising derived and/or modified sequence from HRSV(A2)__F-del_DSCav1_mut3 (opt2)
gggagaguccgcucagccagguugcagaagcggcuuagcguguguccuaaucuucucucugcguguagguaggccugugccgcaaacaagcuuaccauggagcuccucauccucaaggccaacgccaucaccaccauccucaccgccgucaccuucugcuucgccuccggccagaacaucaccgaggaguucuaccaguccaccugcuccgccgucuccaagggcuaccucggcgcccuccgcaccggcugguacaccuccgucaucaccaucgagcucuccaacaucaaggagaucaagugcaacggcaccgacgccaaggucaagcucaucaagcaggagcucgacaaguacaagaacgccgucaccgaccuccagcuccucaugcaguccacccccgccaccggcuccggcuccgccaucugcuccggcgucgccgucugcaagguccuccaccucgagggcgaggucaacaagaucaaguccgcccuccucuccaccaacaaggccgucgucucccucuccaacggcgucuccguccucaccuucaagguccucgaccucaagaacuacaucgacaagcagcuccuccccauccucaacaagcaguccugcuccauccccaacaucgagaccgucaucgaguuccagcagaagaacaaccgccuccucgagaucacccgcgaguucuccgucaacgccggcgucaccacccccgucuccaccuacaugcucaccaacuccgagcuccucucccucaucaacgacaugcccaucaccaacgaccagaagaagcucauguccaacaacguccagaucguccgccagcaguccuacuccaucaugugcaucaucaaggaggagguccucgccuacgucguccagcucccccucuacggcgucaucgacacccccugcuggaagcuccacaccuccccccucugcaccaccaacaccaaggagggcuccaacaucugccucacccgcaccgaccgcggcugguacugcgacaacgccggcuccgucuccuucuucccccaggccgagaccugcaagguccaguccaaccgcgucuucugcgacaccaugaacucccucacccuccccuccgaggucaaccucugcaacgucgacaucuucaaccccaaguacgacugcaagaucaugaccuccaagaccgacgucuccuccuccgucaucaccucccucggcgccaucgucuccugcuacggcaagaccaagugcaccgccuccaacaagaaccgcggcaucaucaagaccuucuccaacggcugcgacuacgucuccaacaagggcgucgacaccgucuccgucggcaacacccucuacugcgucaacaagcaggagggccagucccucuacgucaagggcgagcccaucaucaacuucuacgacccccucgucuuccccuccgacgaguucgacgccuccaucucccaggucaacgagaagaucaaccagucccucgccuucauccgcaaguccgacgagcuccuccacaacgucaacgccggcaaguccaccaccaacaucaugaucaccaccaucaucaucgucaucaucgucauccuccucucccucaucgccgucggccuccuccucuacugcaaggcccgcugaggacuaguguccaccugucccuccugggcugcuggauugucucguuuuccugccaaauaaacaggaucagcgcuuuacagaucuaaaaaaaaaaaaaaaaaaaaaaaaaaaaaaaaaaaaaaaaaaaaaaaaaaaaaaaaaaaaaaaaugcaucccccccccccccccccccccccccccccccaaaggcucuuuucagagccaccagaauu

SEQ ID NO: 3573 - RNA, 1853 nt, Artificial Sequence
  mRNA product Design c-1 comprising derived and/or modified sequence from HRSV(A2)__F-del_DSCav1_mut3 (opt3)
gggagaguccgcucagccagguugcagaagcggcuuagcguguguccuaaucuucucucugcguguagguaggccugugccgcaaacaagcuuaccauggagcugcucauccuuaaggccaacgcuauuaccacaauacugacugcagugacguucugcuuugccagcggccagaauaucaccgaagaguucuaccaauccacauguucugcggucucaaaaggguauuugggagcuuuaagaacugguugguacaccaguguuauuacaaucgaacugagcaacauuaaggagaucaaaugcaauggcaccgacgccaaggugaaacuaauaaagcaggaacucgauaaguauaaaaacgcaguaacugaccugcagcuucugaugcaguccacacccgccaccgggucuggaucggcuaucuguucaggcguggcagucugcaagguguugcaccucgagggugagguuaauaaaauuaagagcgcccugcugaguacgaacaaagcuguggucucccucucuaauggggugagcguauuaacuuuuaagguucuggaucuuaagaacuacaucgacaaacaauugcugccuauucuaaauaagcaguccuguucaaucccaaacauagaaaccgugauugaguuccagcagaaaaauaacaggcuccuggaaaucacacgggaguuuagugucaaugccggagugacuaccccggugagcacauauaugcuuaccaacucugagcuguugucccucauuaaugauaugcccaucacgaacgaccaaaagaaacugaugucaaacaauguccagaucguucgccagcagagcuacaguauuaugugcauaaucaaggaagagguguuagcguauguagugcaacugccucucuacggcgucauugauacuccauguuggaaacuucauacaucuccccugugcaccacuaacacaaaggaaggcuccaauaucuguuugacccgaacggaccgugggugguacugcgauaacgcaggaagcgugucguucuuuccucaggccgagaccuguaagguucagucuaauagaguguucugcgacacaaugaacucccuaacucugccaucagaagucaaucucugcaacguggauauauuuaaucccaaauaugacuguaagauuaugaccaguaaaacagauguaagcuccucuguuaucacuagccugggugcuaucgugucaugcuacggcaagaccaaauguacagccaguaacaagaauagggggauuaucaagaccuucuccaacggaugcgacuaugucagcaauaaaggcguggacacugucucuguggguaacacgcuuuacuguguuaauaagcaagaggggcagucacuguaugugaaaggagagccuauuauaaacuuuuacgauccauugguauucccgagugacgaauuugaugcaagcaucucccaggucaacgagaagauuaaucagucucucgcuuucauccggaaaucggacgaacuguuacacaacgugaaugccggcaagagcacaaccaacaucaugauuacuaccauaaucauuguuaucauugugauccugcuaucccucauagcggucggccugcuuuuguauugcaaggcccgcugaggacuaguguccaccugucccuccugggcugcuggauugucucguuuuccugccaaauaaacaggaucagcgcuuuacagaucuaaaaaaaaaaaaaaaaaaaaaaaaaaaaaaaaaaaaaaaaaaaaaaaaaaaaaaaaaaaaaaaaugcaucccccccccccccccccccccccccccccccaaaggcucuuuucagagccaccagaauu

SEQ ID NO: 3574 - RNA, 1853 nt, Artificial Sequence
  mRNA product Design c-1 comprising derived and/or modified sequence from HRSV(A2)__F-del_DSCav1_mut3 (opt4)
gggagaguccgcucagccagguugcagaagcggcuuagcguguguccuaaucuucucucugcguguagguaggccugugccgcaaacaagcuuaccauggagcugcugauccugaaggccaacgccaucaccaccauccugaccgccgugaccuucugcuucgccagcggccagaacaucaccgaggaguucuaccagagcaccugcagcgccgugagcaagggcuaccugggcgcccugagaaccggcugguacaccagcgugaucaccaucgagcugagcaacaucaaggagaucaagugcaacggcaccgacgccaaggugaagcugaucaagcaggagcuggacaaguacaagaacgccgugaccgaccugcagcugcugaugcagagcacccccgccaccggcagcggcagcgccaucugcagcggcguggccgugugcaaggugcugcaccuggagggcgaggugaacaagaucaagagcgcccugcugagcaccaacaaggccguggugagccugagcaacggcgugagcgugcugaccuucaaggugcuggaccugaagaacuacaucgacaagcagcugcugcccauccugaacaagcagagcugcagcauccccaacaucgagaccgugaucgaguuccagcagaagaacaacagacugcuggagaucaccagagaguucagcgugaacgccggcgugaccacccccgugagcaccuacaugcugaccaacagcgagcugcugagccugaucaacgacaugcccaucaccaacgaccagaagaagcugaugagcaacaacgugcagaucgugagacagcagagcuacagcaucaugugcaucaucaaggaggaggugcuggccuacguggugcagcugccccuguacggcgugaucgacacccccugcuggaagcugcacaccagcccccugugcaccaccaacaccaaggagggcagcaacaucugccugaccagaaccgacagaggcugguacugcgacaacgccggcagcgugagcuucuucccccaggccgagaccugcaaggugcagagcaacagaguguucugcgacaccaugaacagccugacccugcccagcgaggugaaccugugcaacguggacaucuucaaccccaaguacgacugcaagaucaugaccagcaagaccgacgugagcagcagcgugaucaccagccugggcgccaucgugagcugcuacggcaagaccaagugcaccgccagcaacaagaacagaggcaucaucaagaccuucagcaacggcugcgacuacgugagcaacaagggcguggacaccgugagcgugggcaacacccuguacugcgugaacaagcaggagggccagagccuguacgugaagggcgagcccaucaucaacuucuacgacccccugguguuccccagcgacgaguucgacgccagcaucagccaggugaacgagaagaucaaccagagccuggccuucaucagaaagagcgacgagcugcugcacaacgugaacgccggcaagagcaccaccaacaucaugaucaccaccaucaucaucgugaucaucgugauccugcugagccugaucgccgugggccugcugcuguacugcaaggccagaugaggacuaguguccaccugucccuccugggcugcuggauugucucguuuuccugccaaauaaacaggaucagcgcuuuacagaucuaaaaaaaaaaaaaaaaaaaaaaaaaaaaaaaaaaaaaaaaaaaaaaaaaaaaaaaaaaaaaaaaugcaucccccccccccccccccccccccccccccccaaaggcucuuuucagagccaccagaauu

SEQ ID NO: 3575 - RNA, 1853 nt, Artificial Sequence
  mRNA product Design c-1 comprising derived and/or modified sequence from HRSV(A2)__F-del_DSCav1_mut3 (opt5)
gggagaguccgcucagccagguugcagaagcggcuuagcguguguccuaaucuucucucugcguguagguaggccugugccgcaaacaagcuuaccauggagcugcucauccugaaggccaacgcuauuaccacaauccuuacggccgugaccuucugcuuugcgagcggccagaauauuacagaagaguucuaccaauccaccuguucugcugucagcaaaggguaucugggagcccucagaacaggcugguacaccuccguuaucacaauugaacugucuaacaucaaggagaucaaaugcaaugggaccgacgccaaggugaaacuuauuaagcaggaacuggauaaguauaaaaacgcugugacggaccuccagcugcugaugcagagcacccccgccacaggauccggcucugcuaucuguagcggggucgccgugugcaagguucuccaccuggagggagaggugaauaaaauuaaguccgcgcuucugagcaccaacaaagccgucgugucucucuccaauggcguuagcgugcugacauuuaagguccuugaucugaagaacuacaucgacaaacaacuccugccuauucugaauaagcagucuuguuccaucccgaacauugaaaccgugaucgaguuccagcagaaaaauaaccggcuccuggaaaucacgcgcgaguuuagcgugaaugcuggcgucacaacccccguuucuacauauaugcuuaccaacuccgagcugcucagccugauuaaugauaugccuaucaccaacgaccaaaagaaacuuauguccaacaaugugcagauugugagacagcagucuuacagcaucaugugcauuaucaaggaagagguccuggccuaugugguucaacucccccuguacggggugaucgauacaccuuguuggaaacugcauacgagcccccucugcaccacaaacaccaaggaaggauccaauauuugucugacacggaccgaccgcggcugguacugcgauaacgcugggucugucuccuucuuuccucaggccgagacguguaaggugcagagcaauagaguuuucugcgacacaaugaacucucuuacccugccgagcgaagugaaucucugcaacgucgauaucuuuaaucccaaauaugacuguaagauuaugaccuccaaaacagaugugucuagcuccgucaucaccagccugggagcgauugugucuugcuacggcaagacaaaauguacggccuccaacaagaaucgggggaucaucaagaccuucagcaacggaugcgacuauguuucuaauaaaggcguggacacagucuccgugggcaacacccuuuacuguguuaauaagcaagaggggcagagccuguaugugaaaggagagccuauuaucaacuuuuacgauccccucgucuucccuuccgacgaauuugaugcuucuauuagccaggugaacgagaagaucaaucagucccuggccuucauucgcaaaucugacgaacugcuccacaacgugaaugcuggcaagagcacaaccaacaucaugauuacgaccaucaucauuguuaucauugucauccugcuuucccugauugccguggggcuccugcuguauugcaaggccagaugaggacuaguguccaccugucccuccugggcugcuggauugucucguuuuccugccaaauaaacaggaucagcgcuuuacagaucuaaaaaaaaaaaaaaaaaaaaaaaaaaaaaaaaaaaaaaaaaaaaaaaaaaaaaaaaaaaaaaaaugcaucccccccccccccccccccccccccccccccaaaggcucuuuucagagccaccagaauu

SEQ ID NO: 3576 - RNA, 1853 nt, Artificial Sequence
  mRNA product Design c-1 comprising derived and/or modified sequence from HRSV(A2)__F-del_DSCav1_mut3 (opt6)
gggagaguccgcucagccagguugcagaagcggcuuagcguguguccuaaucuucucucugcguguagguaggccugugccgcaaacaagcuuaccauggaauuacuaauccugaaagcaaacgcaauuacuacaauacuaacagcaguaaccuuuugcuuugccucaggacaaaacauaacugaagaauuuuaccaaucaacuugcucagcagucucaaaaggcuaucuaggagcacuacgaacagguugguauacuucagucauaacaauagaauuaucaaacauaaaagaaauuaaauguaacggaacugacgcaaaaguaaaacucaucaaacaagaacucgauaaauacaaaaacgcuguaaccgacuuacaacuacuaaugcaaucaacuccagcaacaggcuccggauccgcaauaugcagugguguagcaguaugcaaaguccuacaccuagaaggagaaguaaauaagauaaaaucugcucuacuaucaacaaauaaagcaguugucucccuaucaaauggagucucaguacucaccuucaaaguauuagaccucaaaaacuacauagacaaacaacuauuaccaauacucaacaaacaauccugcuccaucccuaacauagaaaccguaaucgaauuucaacaaaaaaauaacagacucuuagaaauaacuagagaauuuucaguuaaugcaggcgugacaacaccaguaucaacauauaugcuaacaaacuccgaacuccuaucccuaauaaacgacaugccaaucacaaacgaccaaaaaaaacuaauguccaacaacguacaaaucguaagacaacaaucauacucuauaaugugcauaauaaaagaagaaguacuggccuacguaguacaauuaccacucuacggaguaauagacaccccaugcuggaaacuccauacaucaccccuaugcacaacaaacacaaaagaaggauccaacauaugucucacuagaacagacagaggcugguacugcgacaacgcuggauccgucucauucuucccccaagcagaaacauguaaaguacaaucuaauagaguauuuugugacacaaugaacagccucacacuaccauccgaagucaaccuauguaacguagauauauuuaaucccaaauacgacugcaaaauaaugacauccaaaacagauguaucaucauccguuaucaccucacuaggagccauaguuucaugcuacggaaaaacaaaaugcacugcaucuaacaaaaauagagguauaauaaaaacauuuuccaacggcugcgacuacgucucaaacaaaggcguagacaccguaucaguaggaaauacauuauauugcguaaauaaacaagaaggccaaucccuauacguaaaaggagaacccaucauaaacuucuaugacccacuuguuuuccccucagacgaauuugacgccucaauaucacaaguaaaugaaaaaauaaaccaaucucuugccuucauuagaaaaucagacgaauuacuacacaacgucaacgcaggaaaaucaacaacaaacaucaugauaacaacgauaauaauagucauaauaguaauacuacuaucauuaaucgcagucggacuccuauuauauugcaaagcuagauaaggacuaguguccaccugucccuccugggcugcuggauugucucguuuuccugccaaauaaacaggaucagcgcuuuacagaucuaaaaaaaaaaaaaaaaaaaaaaaaaaaaaaaaaaaaaaaaaaaaaaaaaaaaaaaaaaaaaaaaugcaucccccccccccccccccccccccccccccccaaaggcucuuuucagagccaccagaauu

SEQ ID NO: 3577 - RNA, 1853 nt, Artificial Sequence
  mRNA product Design c-1 comprising derived and/or modified sequence from HRSV(A2)__F-del_DSCav1_mut3 (opt11)
gggagaguccgcucagccagguugcagaagcggcuuagcguguguccuaaucuucucucugcguguagguaggccugugccgcaaacaagcuuaccauggaacuacucauacuaaaagccaacgccauaaccaccauccucaccgcaguaacuuucugcuucgcuuccggccaaaacaucaccgaagaauuuuaccaaaguaccugcagcgcagucucaaaaggauaccuaggcgcccuacgcacaggcugguacaccuccgucauuaccaucgaacucuccaacaucaaagaaauuaaaugcaacgguacagacgcaaaagucaaacucaucaaacaagaacucgacaaauacaaaaacgcagucaccgaccuccaacuccucaugcaauccacccccgccacaggcucuggcuccgccaucugcucaggcguagcagucugcaaaguccugcaccucgaaggcgaagucaacaaaaucaagucagcccuccucuccaccaacaaggccgucguaucccucucaaacggaguuagcguccucaccuucaaaguccuagaccucaaaaacuacaucgauaaacaacuacuccccauccuaaacaaacaaucaugcuccaucccaaacaucgaaaccguaaucgaguuccaacaaaagaacaaccgccuccucgaaaucacacgugaguucuccguuaacgccggcgucaccacccccgucucuacauacaugcucaccaacuccgaacuccuuucccucaucaacgacaugccaaucaccaacgaccaaaagaaacucaugucaaacaacguacaaaucguccgacaacaaagcuacuccaucaugugcaucaucaaagaagaaguccuugcauacgucguucaacuaccccucuacggcguaaucgacacucccugcuggaaacuccacaccuccccgcucugcacaaccaacaccaaagaaggcagcaacaucugccucacccgaaccgaccgcggcugguacugcgauaacgccggauccgucuccuucuucccacaagcagaaacuugcaaaguccaauccaaccgcgucuucugcgacaccaugaacucccucacacuccccuccgaagucaaccugugcaacgucgacaucuucaacccaaaauacgacugcaaaaucaugaccucaaaaaccgacgucucaucuucugucaucaccucucucggcgcuaucgucuccugcuauggcaaaaccaaaugcaccgccuccaacaagaaccgcggcauuaucaagaccuucuccaacggcugcgacuacgucuccaauaagggcgucgacaccgucucugucggcaacacccuuuacugcguaaacaaacaagaaggucaaucucucuacgucaaaggagaacccaucaucaacuucuacgacccccuggucuuccccuccgacgaguucgaugcaucaaucucccaagucaacgaaaagaucaaccaaucucucgcuuucauccgcaaauccgacgaacuccuacacaacguaaacgccggcaaauccaccacaaacaucaugaucaccaccauuaucauagucaucaucgucauccuccucuccuuaaucgccguuggccuccuucucuacugcaaagcccgauaaggacuaguguccaccugucccuccugggcugcuggauugucucguuuuccugccaaauaaacaggaucagcgcuuuacagaucuaaaaaaaaaaaaaaaaaaaaaaaaaaaaaaaaaaaaaaaaaaaaaaaaaaaaaaaaaaaaaaaaugcaucccccccccccccccccccccccccccccccaaaggcucuuuucagagccaccagaauu

SEQ ID NO: 3578 - RNA, 1943 nt, Artificial Sequence
  mRNA product Design c-2 comprising derived and/or modified sequence from HRSV(A2)__F-del_DSCav1_mut3 (opt1)
gggagacuccugucgggcggaaguaggaggaguagaguuuaaaaacaguacucuuuuuccgguucgggacguaguugaagcaacgacaagccggauaaccgcucuugagacaggaagcuuaccauggagcugcucauccugaaggccaacgccaucaccaccauccugacggcggugaccuucugcuucgccagcggccagaacaucaccgaggaguucuaccaguccacgugcagcgccgucuccaagggguaccucggcgcccugcggaccggcugguacaccuccgugaucaccaucgagcugagcaacaucaaggagaucaagugcaacgggaccgacgccaaggugaagcucaucaagcaggagcuggacaaguacaagaacgcggucacggaccugcagcuccugaugcaguccaccccggcaaccggcuccggcuccgccaucugcagcggcgucgccgugugcaaggugcugcaccucgagggggaggucaacaagaucaagagcgcccugcuguccaccaacaaggccguggugagccucuccaacggcgucagcgugcugaccuucaaggugcuggaccucaagaacuacaucgacaagcagcugcugcccauccugaacaagcagagcugcuccauccccaacaucgagacggugaucgaguuccagcagaagaacaaccggcuccuggagaucacccgcgaguucagcgugaacgccggggucaccacccccguguccacguacaugcugaccaacagcgagcuccugucccugaucaacgacaugccgaucaccaacgaccagaagaagcucaugagcaacaacgugcagaucguccggcagcaguccuacagcaucaugugcaucaucaaggaggaggugcuggcguacgugguccagcugccccucuacggcgugaucgacacccccugcuggaagcugcacacgagcccccugugcaccaccaacaccaaggagggguccaacaucugccucacgcgcaccgaccggggcugguacugcgacaacgccggcagcgucuccuucuucccgcaggccgagaccugcaaggugcagagcaaccgcguguucugcgacaccaugaacucccugacgcugcccagcgagguaaaccucugcaacgucgacaucuucaaccccaaguacgacugcaagaucaugaccuccaagaccgacgugagcuccagcgugaucaccucccugggggccaucgucagcugcuacggcaagacgaagugcaccgccagcaacaagaaccgggggaucaucaagaccuucuccaacggcugcgacuacgugagcaacaagggcguggacaccguguccgucgggaacacccuguacugcgugaacaagcaggagggccagagccucuacgugaagggggagcccaucaucaacuucuacgacccgcuggucuuccccuccgacgaguucgacgcgagcaucucccaggugaacgagaagaucaaccagagccuggccuucauccgcaaguccgacgagcugcuccacaacgugaacgccggcaagagcacgaccaacaucaugaucaccaccaucaucaucgucaucaucgugauccugcugucccucaucgccguggggcugcugcucuacugcaaggcccggugaggacuaguggaagcauuuuccuggcugauuaaaagaaauuacucagcuauggucaucuguuccuguuagaaggcuaugcagcauauuauauacuaugcgcauguuaugaaaugcauaauaaaaaauuuuaaaaaaucuaaaagaucuaaaaaaaaaaaaaaaaaaaaaaaaaaaaaaaaaaaaaaaaaaaaaaaaaaaaaaaaaaaaaaaaugcaucccccccccccccccccccccccccccccccaaaggcucuuuucagagccaccagaauu

SEQ ID NO: 3579 - RNA, 1943 nt, Artificial Sequence
  mRNA product Design c-2 comprising derived and/or modified sequence from HRSV(A2)__F-del_DSCav1_mut3 (opt1)
gggagacuccugucgggcggaaguaggaggaguagaguuuaaaaacaguacucuuuuuccgguucgggacguaguugaagcaacgacaagccggauaaccgcucuugagacaggaagcuuaccauggagcugcucauccugaaggccaacgccaucaccaccauccugacggcggugaccuucugcuucgccagcggccagaacaucaccgaggaguucuaccaguccacgugcagcgccgucuccaagggguaccucggcgcccugcgcaccgggugguacaccagcgugaucaccaucgagcuguccaacaucaaggagaucaagugcaacggcaccgacgccaaggugaagcucaucaagcaggagcuggacaaguacaagaacgcggucacggaccugcagcuccugaugcagagcacccccgccaccggguccggcagcgccaucugcuccggcguggccgugugcaagguccugcaccucgagggggaggugaacaagaucaagagcgcgcugcuguccaccaacaaggccguggucagccucuccaacggcgugagcgugcugacguucaagguccuggaccucaagaacuacaucgacaagcagcugcugccgauccucaacaagcaguccugcagcauccccaacaucgagaccgugaucgaguuccagcagaagaacaaccggcugcuggagaucacccgcgaguucuccgugaacgccggggucaccacgcccgugagcaccuacaugcucaccaacuccgagcugcugagccucaucaacgacaugcccaucaccaacgaccagaagaagcugaugagcaacaacgugcagaucguccggcagcaguccuacagcaucaugugcaucaucaaggaggaggugcuggccuacgugguccagcucccgcuguacggcgugaucgacacgcccugcuggaagcugcacaccagcccccucugcaccaccaacacgaaggagggguccaacaucugccugacccgcaccgaccggggcugguacugcgacaacgccggcuccgugagcuucuucccccaggcggagaccugcaagguccaguccaaccgcguguucugcgacacgaugaacagccugacccucccguccgaggucaaccugugcaacguggacaucuucaaccccaaguacgacugcaagaucaugaccagcaagaccgacguguccagcuccgucaucacgagccugggggccaucguguccugcuacggcaagaccaagugcaccgccagcaacaagaaccgggggaucaucaagaccuucuccaacggcugcgacuacgugagcaacaagggcgucgacacgguguccguggggaacacccucuacugcgucaacaagcaggagggccagagccuguacgugaagggggagcccaucaucaacuucuacgacccccugguguucccgagcgacgaguucgacgccuccaucagccaggucaacgagaagaucaaccagucccucgccuucauccgcaagagcgacgagcugcugcacaacgugaacgcgggcaaguccaccaccaacaucaugaucaccacgaucaucaucgugaucaucgucauccuccugagccugaucgccguggggcuccugcuguacugcaaggcccggugaggacuaguggaagcauuuuccuggcugauuaaaagaaauuacucagcuauggucaucuguuccuguuagaaggcuaugcagcauauuauauacuaugcgcauguuaugaaaugcauaauaaaaaauuuuaaaaaaucuaaaagaucuaaaaaaaaaaaaaaaaaaaaaaaaaaaaaaaaaaaaaaaaaaaaaaaaaaaaaaaaaaaaaaaaugcaucccccccccccccccccccccccccccccccaaaggcucuuuucagagccaccagaauu

SEQ ID NO: 3580 - RNA, 1943 nt, Artificial Sequence
  mRNA product Design c-2 comprising derived and/or modified sequence from HRSV(A2)__F-del_DSCav1_mut3 (opt2)
gggagacuccugucgggcggaaguaggaggaguagaguuuaaaaacaguacucuuuuuccgguucgggacguaguugaagcaacgacaagccggauaaccgcucuugagacaggaagcuuaccauggagcuccucauccucaaggccaacgccaucaccaccauccucaccgccgucaccuucugcuucgccuccggccagaacaucaccgaggaguucuaccaguccaccugcuccgccgucuccaagggcuaccucggcgcccuccgcaccggcugguacaccuccgucaucaccaucgagcucuccaacaucaaggagaucaagugcaacggcaccgacgccaaggucaagcucaucaagcaggagcucgacaaguacaagaacgccgucaccgaccuccagcuccucaugcaguccacccccgccaccggcuccggcuccgccaucugcuccggcgucgccgucugcaagguccuccaccucgagggcgaggucaacaagaucaaguccgcccuccucuccaccaacaaggccgucgucucccucuccaacggcgucuccguccucaccuucaagguccucgaccucaagaacuacaucgacaagcagcuccuccccauccucaacaagcaguccugcuccauccccaacaucgagaccgucaucgaguuccagcagaagaacaaccgccuccucgagaucacccgcgaguucuccgucaacgccggcgucaccacccccgucuccaccuacaugcucaccaacuccgagcuccucucccucaucaacgacaugcccaucaccaacgaccagaagaagcucauguccaacaacguccagaucguccgccagcaguccuacuccaucaugugcaucaucaaggaggagguccucgccuacgucguccagcucccccucuacggcgucaucgacacccccugcuggaagcuccacaccuccccccucugcaccaccaacaccaaggagggcuccaacaucugccucacccgcaccgaccgcggcugguacugcgacaacgccggcuccgucuccuucuucccccaggccgagaccugcaagguccaguccaaccgcgucuucugcgacaccaugaacucccucacccuccccuccgaggucaaccucugcaacgucgacaucuucaaccccaaguacgacugcaagaucaugaccuccaagaccgacgucuccuccuccgucaucaccucccucggcgccaucgucuccugcuacggcaagaccaagugcaccgccuccaacaagaaccgcggcaucaucaagaccuucuccaacggcugcgacuacgucuccaacaagggcgucgacaccgucuccgucggcaacacccucuacugcgucaacaagcaggagggccagucccucuacgucaagggcgagcccaucaucaacuucuacgacccccucgucuuccccuccgacgaguucgacgccuccaucucccaggucaacgagaagaucaaccagucccucgccuucauccgcaaguccgacgagcuccuccacaacgucaacgccggcaaguccaccaccaacaucaugaucaccaccaucaucaucgucaucaucgucauccuccucucccucaucgccgucggccuccuccucuacugcaaggcccgcugaggacuaguggaagcauuuuccuggcugauuaaaagaaauuacucagcuauggucaucuguuccuguuagaaggcuaugcagcauauuauauacuaugcgcauguuaugaaaugcauaauaaaaaauuuuaaaaaaucuaaaagaucuaaaaaaaaaaaaaaaaaaaaaaaaaaaaaaaaaaaaaaaaaaaaaaaaaaaaaaaaaaaaaaaaugcaucccccccccccccccccccccccccccccccaaaggcucuuuucagagccaccagaauu

SEQ ID NO: 3581 - RNA, 1943 nt, Artificial Sequence
  mRNA product Design c-2 comprising derived and/or modified sequence from HRSV(A2)__F-del_DSCav1_mut3 (opt3)
gggagacuccugucgggcggaaguaggaggaguagaguuuaaaaacaguacucuuuuuccgguucgggacguaguugaagcaacgacaagccggauaaccgcucuugagacaggaagcuuaccauggagcugcucauccuuaaggccaacgcuauuaccacaauacugacugcagugacguucugcuuugccagcggccagaauaucaccgaagaguucuaccaauccacauguucugcggucucaaaaggguauuugggagcuuuaagaacugguugguacaccaguguuauuacaaucgaacugagcaacauuaaggagaucaaaugcaauggcaccgacgccaaggugaaacuaauaaagcaggaacucgauaaguauaaaaacgcaguaacugaccugcagcuucugaugcaguccacacccgccaccgggucuggaucggcuaucuguucaggcguggcagucugcaagguguugcaccucgagggugagguuaauaaaauuaagagcgcccugcugaguacgaacaaagcuguggucucccucucuaauggggugagcguauuaacuuuuaagguucuggaucuuaagaacuacaucgacaaacaauugcugccuauucuaaauaagcaguccuguucaaucccaaacauagaaaccgugauugaguuccagcagaaaaauaacaggcuccuggaaaucacacgggaguuuagugucaaugccggagugacuaccccggugagcacauauaugcuuaccaacucugagcuguugucccucauuaaugauaugcccaucacgaacgaccaaaagaaacugaugucaaacaauguccagaucguucgccagcagagcuacaguauuaugugcauaaucaaggaagagguguuagcguauguagugcaacugccucucuacggcgucauugauacuccauguuggaaacuucauacaucuccccugugcaccacuaacacaaaggaaggcuccaauaucuguuugacccgaacggaccgugggugguacugcgauaacgcaggaagcgugucguucuuuccucaggccgagaccuguaagguucagucuaauagaguguucugcgacacaaugaacucccuaacucugccaucagaagucaaucucugcaacguggauauauuuaaucccaaauaugacuguaagauuaugaccaguaaaacagauguaagcuccucuguuaucacuagccugggugcuaucgugucaugcuacggcaagaccaaauguacagccaguaacaagaauagggggauuaucaagaccuucuccaacggaugcgacuaugucagcaauaaaggcguggacacugucucuguggguaacacgcuuuacuguguuaauaagcaagaggggcagucacuguaugugaaaggagagccuauuauaaacuuuuacgauccauugguauucccgagugacgaauuugaugcaagcaucucccaggucaacgagaagauuaaucagucucucgcuuucauccggaaaucggacgaacuguuacacaacgugaaugccggcaagagcacaaccaacaucaugauuacuaccauaaucauuguuaucauugugauccugcuaucccucauagcggucggccugcuuuuguauugcaaggcccgcugaggacuaguggaagcauuuuccuggcugauuaaaagaaauuacucagcuauggucaucuguuccuguuagaaggcuaugcagcauauuauauacuaugcgcauguuaugaaaugcauaauaaaaaauuuuaaaaaaucuaaaagaucuaaaaaaaaaaaaaaaaaaaaaaaaaaaaaaaaaaaaaaaaaaaaaaaaaaaaaaaaaaaaaaaaugcaucccccccccccccccccccccccccccccccaaaggcucuuuucagagccaccagaauu

SEQ ID NO: 3582 - RNA, 1943 nt, Artificial Sequence
  mRNA product Design c-2 comprising derived and/or modified sequence from HRSV(A2)__F-del_DSCav1_mut3 (opt4)
gggagacuccugucgggcggaaguaggaggaguagaguuuaaaaacaguacucuuuuuccgguucgggacguaguugaagcaacgacaagccggauaaccgcucuugagacaggaagcuuaccauggagcugcugauccugaaggccaacgccaucaccaccauccugaccgccgugaccuucugcuucgccagcggccagaacaucaccgaggaguucuaccagagcaccugcagcgccgugagcaagggcuaccugggcgcccugagaaccggcugguacaccagcgugaucaccaucgagcugagcaacaucaaggagaucaagugcaacggcaccgacgccaaggugaagcugaucaagcaggagcuggacaaguacaagaacgccgugaccgaccugcagcugcugaugcagagcacccccgccaccggcagcggcagcgccaucugcagcggcguggccgugugcaaggugcugcaccuggagggcgaggugaacaagaucaagagcgcccugcugagcaccaacaaggccguggugagccugagcaacggcgugagcgugcugaccuucaaggugcuggaccugaagaacuacaucgacaagcagcugcugcccauccugaacaagcagagcugcagcauccccaacaucgagaccgugaucgaguuccagcagaagaacaacagacugcuggagaucaccagagaguucagcgugaacgccggcgugaccacccccgugagcaccuacaugcugaccaacagcgagcugcugagccugaucaacgacaugcccaucaccaacgaccagaagaagcugaugagcaacaacgugcagaucgugagacagcagagcuacagcaucaugugcaucaucaaggaggaggugcuggccuacguggugcagcugccccuguacggcgugaucgacacccccugcuggaagcugcacaccagcccccugugcaccaccaacaccaaggagggcagcaacaucugccugaccagaaccgacagaggcugguacugcgacaacgccggcagcgugagcuucuucccccaggccgagaccugcaaggugcagagcaacagaguguucugcgacaccaugaacagccugacccugcccagcgaggugaaccugugcaacguggacaucuucaaccccaaguacgacugcaagaucaugaccagcaagaccgacgugagcagcagcgugaucaccagccugggcgccaucgugagcugcuacggcaagaccaagugcaccgccagcaacaagaacagaggcaucaucaagaccuucagcaacggcugcgacuacgugagcaacaagggcguggacaccgugagcgugggcaacacccuguacugcgugaacaagcaggagggccagagccuguacgugaagggcgagcccaucaucaacuucuacgacccccugguguuccccagcgacgaguucgacgccagcaucagccaggugaacgagaagaucaaccagagccuggccuucaucagaaagagcgacgagcugcugcacaacgugaacgccggcaagagcaccaccaacaucaugaucaccaccaucaucaucgugaucaucgugauccugcugagccugaucgccgugggccugcugcuguacugcaaggccagaugaggacuaguggaagcauuuuccuggcugauuaaaagaaauuacucagcuauggucaucuguuccuguuagaaggcuaugcagcauauuauauacuaugcgcauguuaugaaaugcauaauaaaaaauuuuaaaaaaucuaaaagaucuaaaaaaaaaaaaaaaaaaaaaaaaaaaaaaaaaaaaaaaaaaaaaaaaaaaaaaaaaaaaaaaaugcaucccccccccccccccccccccccccccccccaaaggcucuuuucagagccaccagaauu

SEQ ID NO: 3583 - RNA, 1943 nt, Artificial Sequence
  mRNA product Design c-2 comprising derived and/or modified sequence from HRSV(A2)__F-del_DSCav1_mut3 (opt5)
gggagacuccugucgggcggaaguaggaggaguagaguuuaaaaacaguacucuuuuuccgguucgggacguaguugaagcaacgacaagccggauaaccgcucuugagacaggaagcuuaccauggagcugcucauccugaaggccaacgcuauuaccacaauccuuacggccgugaccuucugcuuugcgagcggccagaauauuacagaagaguucuaccaauccaccuguucugcugucagcaaaggguaucugggagcccucagaacaggcugguacaccuccguuaucacaauugaacugucuaacaucaaggagaucaaaugcaaugggaccgacgccaaggugaaacuuauuaagcaggaacuggauaaguauaaaaacgcugugacggaccuccagcugcugaugcagagcacccccgccacaggauccggcucugcuaucuguagcggggucgccgugugcaagguucuccaccuggagggagaggugaauaaaauuaaguccgcgcuucugagcaccaacaaagccgucgugucucucuccaauggcguuagcgugcugacauuuaagguccuugaucugaagaacuacaucgacaaacaacuccugccuauucugaauaagcagucuuguuccaucccgaacauugaaaccgugaucgaguuccagcagaaaaauaaccggcuccuggaaaucacgcgcgaguuuagcgugaaugcuggcgucacaacccccguuucuacauauaugcuuaccaacuccgagcugcucagccugauuaaugauaugccuaucaccaacgaccaaaagaaacuuauguccaacaaugugcagauugugagacagcagucuuacagcaucaugugcauuaucaaggaagagguccuggccuaugugguucaacucccccuguacggggugaucgauacaccuuguuggaaacugcauacgagcccccucugcaccacaaacaccaaggaaggauccaauauuugucugacacggaccgaccgcggcugguacugcgauaacgcugggucugucuccuucuuuccucaggccgagacguguaaggugcagagcaauagaguuuucugcgacacaaugaacucucuuacccugccgagcgaagugaaucucugcaacgucgauaucuuuaaucccaaauaugacuguaagauuaugaccuccaaaacagaugugucuagcuccgucaucaccagccugggagcgauugugucuugcuacggcaagacaaaauguacggccuccaacaagaaucgggggaucaucaagaccuucagcaacggaugcgacuauguuucuaauaaaggcguggacacagucuccgugggcaacacccuuuacuguguuaauaagcaagaggggcagagccuguaugugaaaggagagccuauuaucaacuuuuacgauccccucgucuucccuuccgacgaauuugaugcuucuauuagccaggugaacgagaagaucaaucagucccuggccuucauucgcaaaucugacgaacugcuccacaacgugaaugcuggcaagagcacaaccaacaucaugauuacgaccaucaucauuguuaucauugucauccugcuuucccugauugccguggggcuccugcuguauugcaaggccagaugaggacuaguggaagcauuuuccuggcugauuaaaagaaauuacucagcuauggucaucuguuccuguuagaaggcuaugcagcauauuauauacuaugcgcauguuaugaaaugcauaauaaaaaauuuuaaaaaaucuaaaagaucuaaaaaaaaaaaaaaaaaaaaaaaaaaaaaaaaaaaaaaaaaaaaaaaaaaaaaaaaaaaaaaaaugcaucccccccccccccccccccccccccccccccaaaggcucuuuucagagccaccagaauu

SEQ ID NO: 3584 - RNA, 1943 nt, Artificial Sequence
  mRNA product Design c-2 comprising derived and/or modified sequence from HRSV(A2)__F-del_DSCav1_mut3 (opt6)
gggagacuccugucgggcggaaguaggaggaguagaguuuaaaaacaguacucuuuuuccgguucgggacguaguugaagcaacgacaagccggauaaccgcucuugagacaggaagcuuaccauggaauuacuaauccugaaagcaaacgcaauuacuacaauacuaacagcaguaaccuuuugcuuugccucaggacaaaacauaacugaagaauuuuaccaaucaacuugcucagcagucucaaaaggcuaucuaggagcacuacgaacagguugguauacuucagucauaacaauagaauuaucaaacauaaaagaaauuaaauguaacggaacugacgcaaaaguaaaacucaucaaacaagaacucgauaaauacaaaaacgcuguaaccgacuuacaacuacuaaugcaaucaacuccagcaacaggcuccggauccgcaauaugcagugguguagcaguaugcaaaguccuacaccuagaaggagaaguaaauaagauaaaaucugcucuacuaucaacaaauaaagcaguugucucccuaucaaauggagucucaguacucaccuucaaaguauuagaccucaaaaacuacauagacaaacaacuauuaccaauacucaacaaacaauccugcuccaucccuaacauagaaaccguaaucgaauuucaacaaaaaaauaacagacucuuagaaauaacuagagaauuuucaguuaaugcaggcgugacaacaccaguaucaacauauaugcuaacaaacuccgaacuccuaucccuaauaaacgacaugccaaucacaaacgaccaaaaaaaacuaauguccaacaacguacaaaucguaagacaacaaucauacucuauaaugugcauaauaaaagaagaaguacuggccuacguaguacaauuaccacucuacggaguaauagacaccccaugcuggaaacuccauacaucaccccuaugcacaacaaacacaaaagaaggauccaacauaugucucacuagaacagacagaggcugguacugcgacaacgcuggauccgucucauucuucccccaagcagaaacauguaaaguacaaucuaauagaguauuuugugacacaaugaacagccucacacuaccauccgaagucaaccuauguaacguagauauauuuaaucccaaauacgacugcaaaauaaugacauccaaaacagauguaucaucauccguuaucaccucacuaggagccauaguuucaugcuacggaaaaacaaaaugcacugcaucuaacaaaaauagagguauaauaaaaacauuuuccaacggcugcgacuacgucucaaacaaaggcguagacaccguaucaguaggaaauacauuauauugcguaaauaaacaagaaggccaaucccuauacguaaaaggagaacccaucauaaacuucuaugacccacuuguuuuccccucagacgaauuugacgccucaauaucacaaguaaaugaaaaaauaaaccaaucucuugccuucauuagaaaaucagacgaauuacuacacaacgucaacgcaggaaaaucaacaacaaacaucaugauaacaacgauaauaauagucauaauaguaauacuacuaucauuaaucgcagucggacuccuauuauauugcaaagcuagauaaggacuaguggaagcauuuuccuggcugauuaaaagaaauuacucagcuauggucaucuguuccuguuagaaggcuaugcagcauauuauauacuaugcgcauguuaugaaaugcauaauaaaaaauuuuaaaaaaucuaaaagaucuaaaaaaaaaaaaaaaaaaaaaaaaaaaaaaaaaaaaaaaaaaaaaaaaaaaaaaaaaaaaaaaaugcaucccccccccccccccccccccccccccccccaaaggcucuuuucagagccaccagaauu

SEQ ID NO: 3585 - RNA, 1943 nt, Artificial Sequence
  mRNA product Design c-2 comprising derived and/or modified sequence from HRSV(A2)__F-del_DSCav1_mut3 (opt11)
gggagacuccugucgggcggaaguaggaggaguagaguuuaaaaacaguacucuuuuuccgguucgggacguaguugaagcaacgacaagccggauaaccgcucuugagacaggaagcuuaccauggaacuacucauacuaaaagccaacgccauaaccaccauccucaccgcaguaacuuucugcuucgcuuccggccaaaacaucaccgaagaauuuuaccaaaguaccugcagcgcagucucaaaaggauaccuaggcgcccuacgcacaggcugguacaccuccgucauuaccaucgaacucuccaacaucaaagaaauuaaaugcaacgguacagacgcaaaagucaaacucaucaaacaagaacucgacaaauacaaaaacgcagucaccgaccuccaacuccucaugcaauccacccccgccacaggcucuggcuccgccaucugcucaggcguagcagucugcaaaguccugcaccucgaaggcgaagucaacaaaaucaagucagcccuccucuccaccaacaaggccgucguaucccucucaaacggaguuagcguccucaccuucaaaguccuagaccucaaaaacuacaucgauaaacaacuacuccccauccuaaacaaacaaucaugcuccaucccaaacaucgaaaccguaaucgaguuccaacaaaagaacaaccgccuccucgaaaucacacgugaguucuccguuaacgccggcgucaccacccccgucucuacauacaugcucaccaacuccgaacuccuuucccucaucaacgacaugccaaucaccaacgaccaaaagaaacucaugucaaacaacguacaaaucguccgacaacaaagcuacuccaucaugugcaucaucaaagaagaaguccuugcauacgucguucaacuaccccucuacggcguaaucgacacucccugcuggaaacuccacaccuccccgcucugcacaaccaacaccaaagaaggcagcaacaucugccucacccgaaccgaccgcggcugguacugcgauaacgccggauccgucuccuucuucccacaagcagaaacuugcaaaguccaauccaaccgcgucuucugcgacaccaugaacucccucacacuccccuccgaagucaaccugugcaacgucgacaucuucaacccaaaauacgacugcaaaaucaugaccucaaaaaccgacgucucaucuucugucaucaccucucucggcgcuaucgucuccugcuauggcaaaaccaaaugcaccgccuccaacaagaaccgcggcauuaucaagaccuucuccaacggcugcgacuacgucuccaauaagggcgucgacaccgucucugucggcaacacccuuuacugcguaaacaaacaagaaggucaaucucucuacgucaaaggagaacccaucaucaacuucuacgacccccuggucuuccccuccgacgaguucgaugcaucaaucucccaagucaacgaaaagaucaaccaaucucucgcuuucauccgcaaauccgacgaacuccuacacaacguaaacgccggcaaauccaccacaaacaucaugaucaccaccauuaucauagucaucaucgucauccuccucuccuuaaucgccguuggccuccuucucuacugcaaagcccgauaaggacuaguggaagcauuuuccuggcugauuaaaagaaauuacucagcuauggucaucuguuccuguuagaaggcuaugcagcauauuauauacuaugcgcauguuaugaaaugcauaauaaaaaauuuuaaaaaaucuaaaagaucuaaaaaaaaaaaaaaaaaaaaaaaaaaaaaaaaaaaaaaaaaaaaaaaaaaaaaaaaaaaaaaaaugcaucccccccccccccccccccccccccccccccaaaggcucuuuucagagccaccagaauu

SEQ ID NO: 3586 - RNA, 1920 nt, Artificial Sequence
  mRNA product Design c-3 comprising derived and/or modified sequence from HRSV(A2)__F-del_DSCav1_mut3 (opt1)
gggagaguccgcucagccagguugcagaagcggcuuagcguguguccuaaucuucucucugcguguagguaggccugugccgcaaacaagcuuaccauggagcugcucauccugaaggccaacgccaucaccaccauccugacggcggugaccuucugcuucgccagcggccagaacaucaccgaggaguucuaccaguccacgugcagcgccgucuccaagggguaccucggcgcccugcggaccggcugguacaccuccgugaucaccaucgagcugagcaacaucaaggagaucaagugcaacgggaccgacgccaaggugaagcucaucaagcaggagcuggacaaguacaagaacgcggucacggaccugcagcuccugaugcaguccaccccggcaaccggcuccggcuccgccaucugcagcggcgucgccgugugcaaggugcugcaccucgagggggaggucaacaagaucaagagcgcccugcuguccaccaacaaggccguggugagccucuccaacggcgucagcgugcugaccuucaaggugcuggaccucaagaacuacaucgacaagcagcugcugcccauccugaacaagcagagcugcuccauccccaacaucgagacggugaucgaguuccagcagaagaacaaccggcuccuggagaucacccgcgaguucagcgugaacgccggggucaccacccccguguccacguacaugcugaccaacagcgagcuccugucccugaucaacgacaugccgaucaccaacgaccagaagaagcucaugagcaacaacgugcagaucguccggcagcaguccuacagcaucaugugcaucaucaaggaggaggugcuggcguacgugguccagcugccccucuacggcgugaucgacacccccugcuggaagcugcacacgagcccccugugcaccaccaacaccaaggagggguccaacaucugccucacgcgcaccgaccggggcugguacugcgacaacgccggcagcgucuccuucuucccgcaggccgagaccugcaaggugcagagcaaccgcguguucugcgacaccaugaacucccugacgcugcccagcgagguaaaccucugcaacgucgacaucuucaaccccaaguacgacugcaagaucaugaccuccaagaccgacgugagcuccagcgugaucaccucccugggggccaucgucagcugcuacggcaagacgaagugcaccgccagcaacaagaaccgggggaucaucaagaccuucuccaacggcugcgacuacgugagcaacaagggcguggacaccguguccgucgggaacacccuguacugcgugaacaagcaggagggccagagccucuacgugaagggggagcccaucaucaacuucuacgacccgcuggucuuccccuccgacgaguucgacgcgagcaucucccaggugaacgagaagaucaaccagagccuggccuucauccgcaaguccgacgagcugcuccacaacgugaacgccggcaagagcacgaccaacaucaugaucaccaccaucaucaucgucaucaucgugauccugcugucccucaucgccguggggcugcugcucuacugcaaggcccggugaggacuaguacuggcugcaucucccuuuccucuguccuccauccuucucccaggauggugaagggggaccugguacccagugauccccaccccaggauccuaaaucaugacuuaccugcuaauaaaaacucauuggaaaagugagaagaucuaaaaaaaaaaaaaaaaaaaaaaaaaaaaaaaaaaaaaaaaaaaaaaaaaaaaaaaaaaaaaaaaugcaucccccccccccccccccccccccccccccccaaaggcucuuuucagagccaccagaauu

SEQ ID NO: 3587 - RNA, 1920 nt, Artificial Sequence
  mRNA product Design c-3 comprising derived and/or modified sequence from HRSV(A2)__F-del_DSCav1_mut3 (opt1)
gggagaguccgcucagccagguugcagaagcggcuuagcguguguccuaaucuucucucugcguguagguaggccugugccgcaaacaagcuuaccauggagcugcucauccugaaggccaacgccaucaccaccauccugacggcggugaccuucugcuucgccagcggccagaacaucaccgaggaguucuaccaguccacgugcagcgccgucuccaagggguaccucggcgcccugcgcaccgggugguacaccagcgugaucaccaucgagcuguccaacaucaaggagaucaagugcaacggcaccgacgccaaggugaagcucaucaagcaggagcuggacaaguacaagaacgcggucacggaccugcagcuccugaugcagagcacccccgccaccggguccggcagcgccaucugcuccggcguggccgugugcaagguccugcaccucgagggggaggugaacaagaucaagagcgcgcugcuguccaccaacaaggccguggucagccucuccaacggcgugagcgugcugacguucaagguccuggaccucaagaacuacaucgacaagcagcugcugccgauccucaacaagcaguccugcagcauccccaacaucgagaccgugaucgaguuccagcagaagaacaaccggcugcuggagaucacccgcgaguucuccgugaacgccggggucaccacgcccgugagcaccuacaugcucaccaacuccgagcugcugagccucaucaacgacaugcccaucaccaacgaccagaagaagcugaugagcaacaacgugcagaucguccggcagcaguccuacagcaucaugugcaucaucaaggaggaggugcuggccuacgugguccagcucccgcuguacggcgugaucgacacgcccugcuggaagcugcacaccagcccccucugcaccaccaacacgaaggagggguccaacaucugccugacccgcaccgaccggggcugguacugcgacaacgccggcuccgugagcuucuucccccaggcggagaccugcaagguccaguccaaccgcguguucugcgacacgaugaacagccugacccucccguccgaggucaaccugugcaacguggacaucuucaaccccaaguacgacugcaagaucaugaccagcaagaccgacguguccagcuccgucaucacgagccugggggccaucguguccugcuacggcaagaccaagugcaccgccagcaacaagaaccgggggaucaucaagaccuucuccaacggcugcgacuacgugagcaacaagggcgucgacacgguguccguggggaacacccucuacugcgucaacaagcaggagggccagagccuguacgugaagggggagcccaucaucaacuucuacgacccccugguguucccgagcgacgaguucgacgccuccaucagccaggucaacgagaagaucaaccagucccucgccuucauccgcaagagcgacgagcugcugcacaacgugaacgcgggcaaguccaccaccaacaucaugaucaccacgaucaucaucgugaucaucgucauccuccugagccugaucgccguggggcuccugcuguacugcaaggcccggugaggacuaguacuggcugcaucucccuuuccucuguccuccauccuucucccaggauggugaagggggaccugguacccagugauccccaccccaggauccuaaaucaugacuuaccugcuaauaaaaacucauuggaaaagugagaagaucuaaaaaaaaaaaaaaaaaaaaaaaaaaaaaaaaaaaaaaaaaaaaaaaaaaaaaaaaaaaaaaaaugcaucccccccccccccccccccccccccccccccaaaggcucuuuucagagccaccagaauu

SEQ ID NO: 3588 - RNA, 1920 nt, Artificial Sequence
  mRNA product Design c-3 comprising derived and/or modified sequence from HRSV(A2)__F-del_DSCav1_mut3 (opt2)
gggagaguccgcucagccagguugcagaagcggcuuagcguguguccuaaucuucucucugcguguagguaggccugugccgcaaacaagcuuaccauggagcuccucauccucaaggccaacgccaucaccaccauccucaccgccgucaccuucugcuucgccuccggccagaacaucaccgaggaguucuaccaguccaccugcuccgccgucuccaagggcuaccucggcgcccuccgcaccggcugguacaccuccgucaucaccaucgagcucuccaacaucaaggagaucaagugcaacggcaccgacgccaaggucaagcucaucaagcaggagcucgacaaguacaagaacgccgucaccgaccuccagcuccucaugcaguccacccccgccaccggcuccggcuccgccaucugcuccggcgucgccgucugcaagguccuccaccucgagggcgaggucaacaagaucaaguccgcccuccucuccaccaacaaggccgucgucucccucuccaacggcgucuccguccucaccuucaagguccucgaccucaagaacuacaucgacaagcagcuccuccccauccucaacaagcaguccugcuccauccccaacaucgagaccgucaucgaguuccagcagaagaacaaccgccuccucgagaucacccgcgaguucuccgucaacgccggcgucaccacccccgucuccaccuacaugcucaccaacuccgagcuccucucccucaucaacgacaugcccaucaccaacgaccagaagaagcucauguccaacaacguccagaucguccgccagcaguccuacuccaucaugugcaucaucaaggaggagguccucgccuacgucguccagcucccccucuacggcgucaucgacacccccugcuggaagcuccacaccuccccccucugcaccaccaacaccaaggagggcuccaacaucugccucacccgcaccgaccgcggcugguacugcgacaacgccggcuccgucuccuucuucccccaggccgagaccugcaagguccaguccaaccgcgucuucugcgacaccaugaacucccucacccuccccuccgaggucaaccucugcaacgucgacaucuucaaccccaaguacgacugcaagaucaugaccuccaagaccgacgucuccuccuccgucaucaccucccucggcgccaucgucuccugcuacggcaagaccaagugcaccgccuccaacaagaaccgcggcaucaucaagaccuucuccaacggcugcgacuacgucuccaacaagggcgucgacaccgucuccgucggcaacacccucuacugcgucaacaagcaggagggccagucccucuacgucaagggcgagcccaucaucaacuucuacgacccccucgucuuccccuccgacgaguucgacgccuccaucucccaggucaacgagaagaucaaccagucccucgccuucauccgcaaguccgacgagcuccuccacaacgucaacgccggcaaguccaccaccaacaucaugaucaccaccaucaucaucgucaucaucgucauccuccucucccucaucgccgucggccuccuccucuacugcaaggcccgcugaggacuaguacuggcugcaucucccuuuccucuguccuccauccuucucccaggauggugaagggggaccugguacccagugauccccaccccaggauccuaaaucaugacuuaccugcuaauaaaaacucauuggaaaagugagaagaucuaaaaaaaaaaaaaaaaaaaaaaaaaaaaaaaaaaaaaaaaaaaaaaaaaaaaaaaaaaaaaaaaugcaucccccccccccccccccccccccccccccccaaaggcucuuuucagagccaccagaauu

SEQ ID NO: 3589 - RNA, 1920 nt, Artificial Sequence
  mRNA product Design c-3 comprising derived and/or modified sequence from HRSV(A2)__F-del_DSCav1_mut3 (opt3)
gggagaguccgcucagccagguugcagaagcggcuuagcguguguccuaaucuucucucugcguguagguaggccugugccgcaaacaagcuuaccauggagcugcucauccuuaaggccaacgcuauuaccacaauacugacugcagugacguucugcuuugccagcggccagaauaucaccgaagaguucuaccaauccacauguucugcggucucaaaaggguauuugggagcuuuaagaacugguugguacaccaguguuauuacaaucgaacugagcaacauuaaggagaucaaaugcaauggcaccgacgccaaggugaaacuaauaaagcaggaacucgauaaguauaaaaacgcaguaacugaccugcagcuucugaugcaguccacacccgccaccgggucuggaucggcuaucuguucaggcguggcagucugcaagguguugcaccucgagggugagguuaauaaaauuaagagcgcccugcugaguacgaacaaagcuguggucucccucucuaauggggugagcguauuaacuuuuaagguucuggaucuuaagaacuacaucgacaaacaauugcugccuauucuaaauaagcaguccuguucaaucccaaacauagaaaccgugauugaguuccagcagaaaaauaacaggcuccuggaaaucacacgggaguuuagugucaaugccggagugacuaccccggugagcacauauaugcuuaccaacucugagcuguugucccucauuaaugauaugcccaucacgaacgaccaaaagaaacugaugucaaacaauguccagaucguucgccagcagagcuacaguauuaugugcauaaucaaggaagagguguuagcguauguagugcaacugccucucuacggcgucauugauacuccauguuggaaacuucauacaucuccccugugcaccacuaacacaaaggaaggcuccaauaucuguuugacccgaacggaccgugggugguacugcgauaacgcaggaagcgugucguucuuuccucaggccgagaccuguaagguucagucuaauagaguguucugcgacacaaugaacucccuaacucugccaucagaagucaaucucugcaacguggauauauuuaaucccaaauaugacuguaagauuaugaccaguaaaacagauguaagcuccucuguuaucacuagccugggugcuaucgugucaugcuacggcaagaccaaauguacagccaguaacaagaauagggggauuaucaagaccuucuccaacggaugcgacuaugucagcaauaaaggcguggacacugucucuguggguaacacgcuuuacuguguuaauaagcaagaggggcagucacuguaugugaaaggagagccuauuauaaacuuuuacgauccauugguauucccgagugacgaauuugaugcaagcaucucccaggucaacgagaagauuaaucagucucucgcuuucauccggaaaucggacgaacuguuacacaacgugaaugccggcaagagcacaaccaacaucaugauuacuaccauaaucauuguuaucauugugauccugcuaucccucauagcggucggccugcuuuuguauugcaaggcccgcugaggacuaguacuggcugcaucucccuuuccucuguccuccauccuucucccaggauggugaagggggaccugguacccagugauccccaccccaggauccuaaaucaugacuuaccugcuaauaaaaacucauuggaaaagugagaagaucuaaaaaaaaaaaaaaaaaaaaaaaaaaaaaaaaaaaaaaaaaaaaaaaaaaaaaaaaaaaaaaaaugcaucccccccccccccccccccccccccccccccaaaggcucuuuucagagccaccagaauu

SEQ ID NO: 3590 - RNA, 1920 nt, Artificial Sequence
  mRNA product Design c-3 comprising derived and/or modified sequence from HRSV(A2)__F-del_DSCav1_mut3 (opt4)
gggagaguccgcucagccagguugcagaagcggcuuagcguguguccuaaucuucucucugcguguagguaggccugugccgcaaacaagcuuaccauggagcugcugauccugaaggccaacgccaucaccaccauccugaccgccgugaccuucugcuucgccagcggccagaacaucaccgaggaguucuaccagagcaccugcagcgccgugagcaagggcuaccugggcgcccugagaaccggcugguacaccagcgugaucaccaucgagcugagcaacaucaaggagaucaagugcaacggcaccgacgccaaggugaagcugaucaagcaggagcuggacaaguacaagaacgccgugaccgaccugcagcugcugaugcagagcacccccgccaccggcagcggcagcgccaucugcagcggcguggccgugugcaaggugcugcaccuggagggcgaggugaacaagaucaagagcgcccugcugagcaccaacaaggccguggugagccugagcaacggcgugagcgugcugaccuucaaggugcuggaccugaagaacuacaucgacaagcagcugcugcccauccugaacaagcagagcugcagcauccccaacaucgagaccgugaucgaguuccagcagaagaacaacagacugcuggagaucaccagagaguucagcgugaacgccggcgugaccacccccgugagcaccuacaugcugaccaacagcgagcugcugagccugaucaacgacaugcccaucaccaacgaccagaagaagcugaugagcaacaacgugcagaucgugagacagcagagcuacagcaucaugugcaucaucaaggaggaggugcuggccuacguggugcagcugccccuguacggcgugaucgacacccccugcuggaagcugcacaccagcccccugugcaccaccaacaccaaggagggcagcaacaucugccugaccagaaccgacagaggcugguacugcgacaacgccggcagcgugagcuucuucccccaggccgagaccugcaaggugcagagcaacagaguguucugcgacaccaugaacagccugacccugcccagcgaggugaaccugugcaacguggacaucuucaaccccaaguacgacugcaagaucaugaccagcaagaccgacgugagcagcagcgugaucaccagccugggcgccaucgugagcugcuacggcaagaccaagugcaccgccagcaacaagaacagaggcaucaucaagaccuucagcaacggcugcgacuacgugagcaacaagggcguggacaccgugagcgugggcaacacccuguacugcgugaacaagcaggagggccagagccuguacgugaagggcgagcccaucaucaacuucuacgacccccugguguuccccagcgacgaguucgacgccagcaucagccaggugaacgagaagaucaaccagagccuggccuucaucagaaagagcgacgagcugcugcacaacgugaacgccggcaagagcaccaccaacaucaugaucaccaccaucaucaucgugaucaucgugauccugcugagccugaucgccgugggccugcugcuguacugcaaggccagaugaggacuaguacuggcugcaucucccuuuccucuguccuccauccuucucccaggauggugaagggggaccugguacccagugauccccaccccaggauccuaaaucaugacuuaccugcuaauaaaaacucauuggaaaagugagaagaucuaaaaaaaaaaaaaaaaaaaaaaaaaaaaaaaaaaaaaaaaaaaaaaaaaaaaaaaaaaaaaaaaugcaucccccccccccccccccccccccccccccccaaaggcucuuuucagagccaccagaauu

SEQ ID NO: 3591 - RNA, 1920 nt, Artificial Sequence
  mRNA product Design c-3 comprising derived and/or modified sequence from HRSV(A2)__F-del_DSCav1_mut3 (opt5)
gggagaguccgcucagccagguugcagaagcggcuuagcguguguccuaaucuucucucugcguguagguaggccugugccgcaaacaagcuuaccauggagcugcucauccugaaggccaacgcuauuaccacaauccuuacggccgugaccuucugcuuugcgagcggccagaauauuacagaagaguucuaccaauccaccuguucugcugucagcaaaggguaucugggagcccucagaacaggcugguacaccuccguuaucacaauugaacugucuaacaucaaggagaucaaaugcaaugggaccgacgccaaggugaaacuuauuaagcaggaacuggauaaguauaaaaacgcugugacggaccuccagcugcugaugcagagcacccccgccacaggauccggcucugcuaucuguagcggggucgccgugugcaagguucuccaccuggagggagaggugaauaaaauuaaguccgcgcuucugagcaccaacaaagccgucgugucucucuccaauggcguuagcgugcugacauuuaagguccuugaucugaagaacuacaucgacaaacaacuccugccuauucugaauaagcagucuuguuccaucccgaacauugaaaccgugaucgaguuccagcagaaaaauaaccggcuccuggaaaucacgcgcgaguuuagcgugaaugcuggcgucacaacccccguuucuacauauaugcuuaccaacuccgagcugcucagccugauuaaugauaugccuaucaccaacgaccaaaagaaacuuauguccaacaaugugcagauugugagacagcagucuuacagcaucaugugcauuaucaaggaagagguccuggccuaugugguucaacucccccuguacggggugaucgauacaccuuguuggaaacugcauacgagcccccucugcaccacaaacaccaaggaaggauccaauauuugucugacacggaccgaccgcggcugguacugcgauaacgcugggucugucuccuucuuuccucaggccgagacguguaaggugcagagcaauagaguuuucugcgacacaaugaacucucuuacccugccgagcgaagugaaucucugcaacgucgauaucuuuaaucccaaauaugacuguaagauuaugaccuccaaaacagaugugucuagcuccgucaucaccagccugggagcgauugugucuugcuacggcaagacaaaauguacggccuccaacaagaaucgggggaucaucaagaccuucagcaacggaugcgacuauguuucuaauaaaggcguggacacagucuccgugggcaacacccuuuacuguguuaauaagcaagaggggcagagccuguaugugaaaggagagccuauuaucaacuuuuacgauccccucgucuucccuuccgacgaauuugaugcuucuauuagccaggugaacgagaagaucaaucagucccuggccuucauucgcaaaucugacgaacugcuccacaacgugaaugcuggcaagagcacaaccaacaucaugauuacgaccaucaucauuguuaucauugucauccugcuuucccugauugccguggggcuccugcuguauugcaaggccagaugaggacuaguacuggcugcaucucccuuuccucuguccuccauccuucucccaggauggugaagggggaccugguacccagugauccccaccccaggauccuaaaucaugacuuaccugcuaauaaaaacucauuggaaaagugagaagaucuaaaaaaaaaaaaaaaaaaaaaaaaaaaaaaaaaaaaaaaaaaaaaaaaaaaaaaaaaaaaaaaaugcaucccccccccccccccccccccccccccccccaaaggcucuuuucagagccaccagaauu

SEQ ID NO: 3592 - RNA, 1920 nt, Artificial Sequence
  mRNA product Design c-3 comprising derived and/or modified sequence from HRSV(A2)__F-del_DSCav1_mut3 (opt6)
gggagaguccgcucagccagguugcagaagcggcuuagcguguguccuaaucuucucucugcguguagguaggccugugccgcaaacaagcuuaccauggaauuacuaauccugaaagcaaacgcaauuacuacaauacuaacagcaguaaccuuuugcuuugccucaggacaaaacauaacugaagaauuuuaccaaucaacuugcucagcagucucaaaaggcuaucuaggagcacuacgaacagguugguauacuucagucauaacaauagaauuaucaaacauaaaagaaauuaaauguaacggaacugacgcaaaaguaaaacucaucaaacaagaacucgauaaauacaaaaacgcuguaaccgacuuacaacuacuaaugcaaucaacuccagcaacaggcuccggauccgcaauaugcagugguguagcaguaugcaaaguccuacaccuagaaggagaaguaaauaagauaaaaucugcucuacuaucaacaaauaaagcaguugucucccuaucaaauggagucucaguacucaccuucaaaguauuagaccucaaaaacuacauagacaaacaacuauuaccaauacucaacaaacaauccugcuccaucccuaacauagaaaccguaaucgaauuucaacaaaaaaauaacagacucuuagaaauaacuagagaauuuucaguuaaugcaggcgugacaacaccaguaucaacauauaugcuaacaaacuccgaacuccuaucccuaauaaacgacaugccaaucacaaacgaccaaaaaaaacuaauguccaacaacguacaaaucguaagacaacaaucauacucuauaaugugcauaauaaaagaagaaguacuggccuacguaguacaauuaccacucuacggaguaauagacaccccaugcuggaaacuccauacaucaccccuaugcacaacaaacacaaaagaaggauccaacauaugucucacuagaacagacagaggcugguacugcgacaacgcuggauccgucucauucuucccccaagcagaaacauguaaaguacaaucuaauagaguauuuugugacacaaugaacagccucacacuaccauccgaagucaaccuauguaacguagauauauuuaaucccaaauacgacugcaaaauaaugacauccaaaacagauguaucaucauccguuaucaccucacuaggagccauaguuucaugcuacggaaaaacaaaaugcacugcaucuaacaaaaauagagguauaauaaaaacauuuuccaacggcugcgacuacgucucaaacaaaggcguagacaccguaucaguaggaaauacauuauauugcguaaauaaacaagaaggccaaucccuauacguaaaaggagaacccaucauaaacuucuaugacccacuuguuuuccccucagacgaauuugacgccucaauaucacaaguaaaugaaaaaauaaaccaaucucuugccuucauuagaaaaucagacgaauuacuacacaacgucaacgcaggaaaaucaacaacaaacaucaugauaacaacgauaauaauagucauaauaguaauacuacuaucauuaaucgcagucggacuccuauuauauugcaaagcuagauaaggacuaguacuggcugcaucucccuuuccucuguccuccauccuucucccaggauggugaagggggaccugguacccagugauccccaccccaggauccuaaaucaugacuuaccugcuaauaaaaacucauuggaaaagugagaagaucuaaaaaaaaaaaaaaaaaaaaaaaaaaaaaaaaaaaaaaaaaaaaaaaaaaaaaaaaaaaaaaaaugcaucccccccccccccccccccccccccccccccaaaggcucuuuucagagccaccagaauu

SEQ ID NO: 3593 - RNA, 1920 nt, Artificial Sequence
  mRNA product Design c-3 comprising derived and/or modified sequence from HRSV(A2)__F-del_DSCav1_mut3 (opt11)
gggagaguccgcucagccagguugcagaagcggcuuagcguguguccuaaucuucucucugcguguagguaggccugugccgcaaacaagcuuaccauggaacuacucauacuaaaagccaacgccauaaccaccauccucaccgcaguaacuuucugcuucgcuuccggccaaaacaucaccgaagaauuuuaccaaaguaccugcagcgcagucucaaaaggauaccuaggcgcccuacgcacaggcugguacaccuccgucauuaccaucgaacucuccaacaucaaagaaauuaaaugcaacgguacagacgcaaaagucaaacucaucaaacaagaacucgacaaauacaaaaacgcagucaccgaccuccaacuccucaugcaauccacccccgccacaggcucuggcuccgccaucugcucaggcguagcagucugcaaaguccugcaccucgaaggcgaagucaacaaaaucaagucagcccuccucuccaccaacaaggccgucguaucccucucaaacggaguuagcguccucaccuucaaaguccuagaccucaaaaacuacaucgauaaacaacuacuccccauccuaaacaaacaaucaugcuccaucccaaacaucgaaaccguaaucgaguuccaacaaaagaacaaccgccuccucgaaaucacacgugaguucuccguuaacgccggcgucaccacccccgucucuacauacaugcucaccaacuccgaacuccuuucccucaucaacgacaugccaaucaccaacgaccaaaagaaacucaugucaaacaacguacaaaucguccgacaacaaagcuacuccaucaugugcaucaucaaagaagaaguccuugcauacgucguucaacuaccccucuacggcguaaucgacacucccugcuggaaacuccacaccuccccgcucugcacaaccaacaccaaagaaggcagcaacaucugccucacccgaaccgaccgcggcugguacugcgauaacgccggauccgucuccuucuucccacaagcagaaacuugcaaaguccaauccaaccgcgucuucugcgacaccaugaacucccucacacuccccuccgaagucaaccugugcaacgucgacaucuucaacccaaaauacgacugcaaaaucaugaccucaaaaaccgacgucucaucuucugucaucaccucucucggcgcuaucgucuccugcuauggcaaaaccaaaugcaccgccuccaacaagaaccgcggcauuaucaagaccuucuccaacggcugcgacuacgucuccaauaagggcgucgacaccgucucugucggcaacacccuuuacugcguaaacaaacaagaaggucaaucucucuacgucaaaggagaacccaucaucaacuucuacgacccccuggucuuccccuccgacgaguucgaugcaucaaucucccaagucaacgaaaagaucaaccaaucucucgcuuucauccgcaaauccgacgaacuccuacacaacguaaacgccggcaaauccaccacaaacaucaugaucaccaccauuaucauagucaucaucgucauccuccucuccuuaaucgccguuggccuccuucucuacugcaaagcccgauaaggacuaguacuggcugcaucucccuuuccucuguccuccauccuucucccaggauggugaagggggaccugguacccagugauccccaccccaggauccuaaaucaugacuuaccugcuaauaaaaacucauuggaaaagugagaagaucuaaaaaaaaaaaaaaaaaaaaaaaaaaaaaaaaaaaaaaaaaaaaaaaaaaaaaaaaaaaaaaaaugcaucccccccccccccccccccccccccccccccaaaggcucuuuucagagccaccagaauu

SEQ ID NO: 3594 - RNA, 1916 nt, Artificial Sequence
  mRNA product Design c-4 comprising derived and/or modified sequence from HRSV(A2)__F-del_DSCav1_mut3 (opt1)
gggagaguccgcucagccagguugcagaagcggcuuagcguguguccuaaucuucucucugcguguagguaggccugugccgcaaacaagcuuaccauggagcugcucauccugaaggccaacgccaucaccaccauccugacggcggugaccuucugcuucgccagcggccagaacaucaccgaggaguucuaccaguccacgugcagcgccgucuccaagggguaccucggcgcccugcggaccggcugguacaccuccgugaucaccaucgagcugagcaacaucaaggagaucaagugcaacgggaccgacgccaaggugaagcucaucaagcaggagcuggacaaguacaagaacgcggucacggaccugcagcuccugaugcaguccaccccggcaaccggcuccggcuccgccaucugcagcggcgucgccgugugcaaggugcugcaccucgagggggaggucaacaagaucaagagcgcccugcuguccaccaacaaggccguggugagccucuccaacggcgucagcgugcugaccuucaaggugcuggaccucaagaacuacaucgacaagcagcugcugcccauccugaacaagcagagcugcuccauccccaacaucgagacggugaucgaguuccagcagaagaacaaccggcuccuggagaucacccgcgaguucagcgugaacgccggggucaccacccccguguccacguacaugcugaccaacagcgagcuccugucccugaucaacgacaugccgaucaccaacgaccagaagaagcucaugagcaacaacgugcagaucguccggcagcaguccuacagcaucaugugcaucaucaaggaggaggugcuggcguacgugguccagcugccccucuacggcgugaucgacacccccugcuggaagcugcacacgagcccccugugcaccaccaacaccaaggagggguccaacaucugccucacgcgcaccgaccggggcugguacugcgacaacgccggcagcgucuccuucuucccgcaggccgagaccugcaaggugcagagcaaccgcguguucugcgacaccaugaacucccugacgcugcccagcgagguaaaccucugcaacgucgacaucuucaaccccaaguacgacugcaagaucaugaccuccaagaccgacgugagcuccagcgugaucaccucccugggggccaucgucagcugcuacggcaagacgaagugcaccgccagcaacaagaaccgggggaucaucaagaccuucuccaacggcugcgacuacgugagcaacaagggcguggacaccguguccgucgggaacacccuguacugcgugaacaagcaggagggccagagccucuacgugaagggggagcccaucaucaacuucuacgacccgcuggucuuccccuccgacgaguucgacgcgagcaucucccaggugaacgagaagaucaaccagagccuggccuucauccgcaaguccgacgagcugcuccacaacgugaacgccggcaagagcacgaccaacaucaugaucaccaccaucaucaucgucaucaucgugauccugcugucccucaucgccguggggcugcugcucuacugcaaggcccggugaggacuaguggaagcauuuuccuggcugauuaaaagaaauuacucagcuauggucaucuguuccuguuagaaggcuaugcagcauauuauauacuaugcgcauguuaugaaaugcauaauaaaaaauuuuaaaaaaucuaaaagaucuaaaaaaaaaaaaaaaaaaaaaaaaaaaaaaaaaaaaaaaaaaaaaaaaaaaaaaaaaaaaaaaaugcaucccccccccccccccccccccccccccccccaaaggcucuuuucagagccaccagaauu

SEQ ID NO: 3595 - RNA, 1916 nt, Artificial Sequence
  mRNA product Design c-4 comprising derived and/or modified sequence from HRSV(A2)__F-del_DSCav1_mut3 (opt1)
gggagaguccgcucagccagguugcagaagcggcuuagcguguguccuaaucuucucucugcguguagguaggccugugccgcaaacaagcuuaccauggagcugcucauccugaaggccaacgccaucaccaccauccugacggcggugaccuucugcuucgccagcggccagaacaucaccgaggaguucuaccaguccacgugcagcgccgucuccaagggguaccucggcgcccugcgcaccgggugguacaccagcgugaucaccaucgagcuguccaacaucaaggagaucaagugcaacggcaccgacgccaaggugaagcucaucaagcaggagcuggacaaguacaagaacgcggucacggaccugcagcuccugaugcagagcacccccgccaccggguccggcagcgccaucugcuccggcguggccgugugcaagguccugcaccucgagggggaggugaacaagaucaagagcgcgcugcuguccaccaacaaggccguggucagccucuccaacggcgugagcgugcugacguucaagguccuggaccucaagaacuacaucgacaagcagcugcugccgauccucaacaagcaguccugcagcauccccaacaucgagaccgugaucgaguuccagcagaagaacaaccggcugcuggagaucacccgcgaguucuccgugaacgccggggucaccacgcccgugagcaccuacaugcucaccaacuccgagcugcugagccucaucaacgacaugcccaucaccaacgaccagaagaagcugaugagcaacaacgugcagaucguccggcagcaguccuacagcaucaugugcaucaucaaggaggaggugcuggccuacgugguccagcucccgcuguacggcgugaucgacacgcccugcuggaagcugcacaccagcccccucugcaccaccaacacgaaggagggguccaacaucugccugacccgcaccgaccggggcugguacugcgacaacgccggcuccgugagcuucuucccccaggcggagaccugcaagguccaguccaaccgcguguucugcgacacgaugaacagccugacccucccguccgaggucaaccugugcaacguggacaucuucaaccccaaguacgacugcaagaucaugaccagcaagaccgacguguccagcuccgucaucacgagccugggggccaucguguccugcuacggcaagaccaagugcaccgccagcaacaagaaccgggggaucaucaagaccuucuccaacggcugcgacuacgugagcaacaagggcgucgacacgguguccguggggaacacccucuacugcgucaacaagcaggagggccagagccuguacgugaagggggagcccaucaucaacuucuacgacccccugguguucccgagcgacgaguucgacgccuccaucagccaggucaacgagaagaucaaccagucccucgccuucauccgcaagagcgacgagcugcugcacaacgugaacgcgggcaaguccaccaccaacaucaugaucaccacgaucaucaucgugaucaucgucauccuccugagccugaucgccguggggcuccugcuguacugcaaggcccggugaggacuaguggaagcauuuuccuggcugauuaaaagaaauuacucagcuauggucaucuguuccuguuagaaggcuaugcagcauauuauauacuaugcgcauguuaugaaaugcauaauaaaaaauuuuaaaaaaucuaaaagaucuaaaaaaaaaaaaaaaaaaaaaaaaaaaaaaaaaaaaaaaaaaaaaaaaaaaaaaaaaaaaaaaaugcaucccccccccccccccccccccccccccccccaaaggcucuuuucagagccaccagaauu

SEQ ID NO: 3596 - RNA, 1916 nt, Artificial Sequence
  mRNA product Design c-4 comprising derived and/or modified sequence from HRSV(A2)__F-del_DSCav1_mut3 (opt2)
gggagaguccgcucagccagguugcagaagcggcuuagcguguguccuaaucuucucucugcguguagguaggccugugccgcaaacaagcuuaccauggagcuccucauccucaaggccaacgccaucaccaccauccucaccgccgucaccuucugcuucgccuccggccagaacaucaccgaggaguucuaccaguccaccugcuccgccgucuccaagggcuaccucggcgcccuccgcaccggcugguacaccuccgucaucaccaucgagcucuccaacaucaaggagaucaagugcaacggcaccgacgccaaggucaagcucaucaagcaggagcucgacaaguacaagaacgccgucaccgaccuccagcuccucaugcaguccacccccgccaccggcuccggcuccgccaucugcuccggcgucgccgucugcaagguccuccaccucgagggcgaggucaacaagaucaaguccgcccuccucuccaccaacaaggccgucgucucccucuccaacggcgucuccguccucaccuucaagguccucgaccucaagaacuacaucgacaagcagcuccuccccauccucaacaagcaguccugcuccauccccaacaucgagaccgucaucgaguuccagcagaagaacaaccgccuccucgagaucacccgcgaguucuccgucaacgccggcgucaccacccccgucuccaccuacaugcucaccaacuccgagcuccucucccucaucaacgacaugcccaucaccaacgaccagaagaagcucauguccaacaacguccagaucguccgccagcaguccuacuccaucaugugcaucaucaaggaggagguccucgccuacgucguccagcucccccucuacggcgucaucgacacccccugcuggaagcuccacaccuccccccucugcaccaccaacaccaaggagggcuccaacaucugccucacccgcaccgaccgcggcugguacugcgacaacgccggcuccgucuccuucuucccccaggccgagaccugcaagguccaguccaaccgcgucuucugcgacaccaugaacucccucacccuccccuccgaggucaaccucugcaacgucgacaucuucaaccccaaguacgacugcaagaucaugaccuccaagaccgacgucuccuccuccgucaucaccucccucggcgccaucgucuccugcuacggcaagaccaagugcaccgccuccaacaagaaccgcggcaucaucaagaccuucuccaacggcugcgacuacgucuccaacaagggcgucgacaccgucuccgucggcaacacccucuacugcgucaacaagcaggagggccagucccucuacgucaagggcgagcccaucaucaacuucuacgacccccucgucuuccccuccgacgaguucgacgccuccaucucccaggucaacgagaagaucaaccagucccucgccuucauccgcaaguccgacgagcuccuccacaacgucaacgccggcaaguccaccaccaacaucaugaucaccaccaucaucaucgucaucaucgucauccuccucucccucaucgccgucggccuccuccucuacugcaaggcccgcugaggacuaguggaagcauuuuccuggcugauuaaaagaaauuacucagcuauggucaucuguuccuguuagaaggcuaugcagcauauuauauacuaugcgcauguuaugaaaugcauaauaaaaaauuuuaaaaaaucuaaaagaucuaaaaaaaaaaaaaaaaaaaaaaaaaaaaaaaaaaaaaaaaaaaaaaaaaaaaaaaaaaaaaaaaugcaucccccccccccccccccccccccccccccccaaaggcucuuuucagagccaccagaauu

SEQ ID NO: 3597 - RNA, 1916 nt, Artificial Sequence
  mRNA product Design c-4 comprising derived and/or modified sequence from HRSV(A2)__F-del_DSCav1_mut3 (opt3)
gggagaguccgcucagccagguugcagaagcggcuuagcguguguccuaaucuucucucugcguguagguaggccugugccgcaaacaagcuuaccauggagcugcucauccuuaaggccaacgcuauuaccacaauacugacugcagugacguucugcuuugccagcggccagaauaucaccgaagaguucuaccaauccacauguucugcggucucaaaaggguauuugggagcuuuaagaacugguugguacaccaguguuauuacaaucgaacugagcaacauuaaggagaucaaaugcaauggcaccgacgccaaggugaaacuaauaaagcaggaacucgauaaguauaaaaacgcaguaacugaccugcagcuucugaugcaguccacacccgccaccgggucuggaucggcuaucuguucaggcguggcagucugcaagguguugcaccucgagggugagguuaauaaaauuaagagcgcccugcugaguacgaacaaagcuguggucucccucucuaauggggugagcguauuaacuuuuaagguucuggaucuuaagaacuacaucgacaaacaauugcugccuauucuaaauaagcaguccuguucaaucccaaacauagaaaccgugauugaguuccagcagaaaaauaacaggcuccuggaaaucacacgggaguuuagugucaaugccggagugacuaccccggugagcacauauaugcuuaccaacucugagcuguugucccucauuaaugauaugcccaucacgaacgaccaaaagaaacugaugucaaacaauguccagaucguucgccagcagagcuacaguauuaugugcauaaucaaggaagagguguuagcguauguagugcaacugccucucuacggcgucauugauacuccauguuggaaacuucauacaucuccccugugcaccacuaacacaaaggaaggcuccaauaucuguuugacccgaacggaccgugggugguacugcgauaacgcaggaagcgugucguucuuuccucaggccgagaccuguaagguucagucuaauagaguguucugcgacacaaugaacucccuaacucugccaucagaagucaaucucugcaacguggauauauuuaaucccaaauaugacuguaagauuaugaccaguaaaacagauguaagcuccucuguuaucacuagccugggugcuaucgugucaugcuacggcaagaccaaauguacagccaguaacaagaauagggggauuaucaagaccuucuccaacggaugcgacuaugucagcaauaaaggcguggacacugucucuguggguaacacgcuuuacuguguuaauaagcaagaggggcagucacuguaugugaaaggagagccuauuauaaacuuuuacgauccauugguauucccgagugacgaauuugaugcaagcaucucccaggucaacgagaagauuaaucagucucucgcuuucauccggaaaucggacgaacuguuacacaacgugaaugccggcaagagcacaaccaacaucaugauuacuaccauaaucauuguuaucauugugauccugcuaucccucauagcggucggccugcuuuuguauugcaaggcccgcugaggacuaguggaagcauuuuccuggcugauuaaaagaaauuacucagcuauggucaucuguuccuguuagaaggcuaugcagcauauuauauacuaugcgcauguuaugaaaugcauaauaaaaaauuuuaaaaaaucuaaaagaucuaaaaaaaaaaaaaaaaaaaaaaaaaaaaaaaaaaaaaaaaaaaaaaaaaaaaaaaaaaaaaaaaugcaucccccccccccccccccccccccccccccccaaaggcucuuuucagagccaccagaauu

SEQ ID NO: 3598 - RNA, 1916 nt, Artificial Sequence
  mRNA product Design c-4 comprising derived and/or modified sequence from HRSV(A2)__F-del_DSCav1_mut3 (opt4)
gggagaguccgcucagccagguugcagaagcggcuuagcguguguccuaaucuucucucugcguguagguaggccugugccgcaaacaagcuuaccauggagcugcugauccugaaggccaacgccaucaccaccauccugaccgccgugaccuucugcuucgccagcggccagaacaucaccgaggaguucuaccagagcaccugcagcgccgugagcaagggcuaccugggcgcccugagaaccggcugguacaccagcgugaucaccaucgagcugagcaacaucaaggagaucaagugcaacggcaccgacgccaaggugaagcugaucaagcaggagcuggacaaguacaagaacgccgugaccgaccugcagcugcugaugcagagcacccccgccaccggcagcggcagcgccaucugcagcggcguggccgugugcaaggugcugcaccuggagggcgaggugaacaagaucaagagcgcccugcugagcaccaacaaggccguggugagccugagcaacggcgugagcgugcugaccuucaaggugcuggaccugaagaacuacaucgacaagcagcugcugcccauccugaacaagcagagcugcagcauccccaacaucgagaccgugaucgaguuccagcagaagaacaacagacugcuggagaucaccagagaguucagcgugaacgccggcgugaccacccccgugagcaccuacaugcugaccaacagcgagcugcugagccugaucaacgacaugcccaucaccaacgaccagaagaagcugaugagcaacaacgugcagaucgugagacagcagagcuacagcaucaugugcaucaucaaggaggaggugcuggccuacguggugcagcugccccuguacggcgugaucgacacccccugcuggaagcugcacaccagcccccugugcaccaccaacaccaaggagggcagcaacaucugccugaccagaaccgacagaggcugguacugcgacaacgccggcagcgugagcuucuucccccaggccgagaccugcaaggugcagagcaacagaguguucugcgacaccaugaacagccugacccugcccagcgaggugaaccugugcaacguggacaucuucaaccccaaguacgacugcaagaucaugaccagcaagaccgacgugagcagcagcgugaucaccagccugggcgccaucgugagcugcuacggcaagaccaagugcaccgccagcaacaagaacagaggcaucaucaagaccuucagcaacggcugcgacuacgugagcaacaagggcguggacaccgugagcgugggcaacacccuguacugcgugaacaagcaggagggccagagccuguacgugaagggcgagcccaucaucaacuucuacgacccccugguguuccccagcgacgaguucgacgccagcaucagccaggugaacgagaagaucaaccagagccuggccuucaucagaaagagcgacgagcugcugcacaacgugaacgccggcaagagcaccaccaacaucaugaucaccaccaucaucaucgugaucaucgugauccugcugagccugaucgccgugggccugcugcuguacugcaaggccagaugaggacuaguggaagcauuuuccuggcugauuaaaagaaauuacucagcuauggucaucuguuccuguuagaaggcuaugcagcauauuauauacuaugcgcauguuaugaaaugcauaauaaaaaauuuuaaaaaaucuaaaagaucuaaaaaaaaaaaaaaaaaaaaaaaaaaaaaaaaaaaaaaaaaaaaaaaaaaaaaaaaaaaaaaaaugcaucccccccccccccccccccccccccccccccaaaggcucuuuucagagccaccagaauu

SEQ ID NO: 3599 - RNA, 1916 nt, Artificial Sequence
  mRNA product Design c-4 comprising derived and/or modified sequence from HRSV(A2)__F-del_DSCav1_mut3 (opt5)
gggagaguccgcucagccagguugcagaagcggcuuagcguguguccuaaucuucucucugcguguagguaggccugugccgcaaacaagcuuaccauggagcugcucauccugaaggccaacgcuauuaccacaauccuuacggccgugaccuucugcuuugcgagcggccagaauauuacagaagaguucuaccaauccaccuguucugcugucagcaaaggguaucugggagcccucagaacaggcugguacaccuccguuaucacaauugaacugucuaacaucaaggagaucaaaugcaaugggaccgacgccaaggugaaacuuauuaagcaggaacuggauaaguauaaaaacgcugugacggaccuccagcugcugaugcagagcacccccgccacaggauccggcucugcuaucuguagcggggucgccgugugcaagguucuccaccuggagggagaggugaauaaaauuaaguccgcgcuucugagcaccaacaaagccgucgugucucucuccaauggcguuagcgugcugacauuuaagguccuugaucugaagaacuacaucgacaaacaacuccugccuauucugaauaagcagucuuguuccaucccgaacauugaaaccgugaucgaguuccagcagaaaaauaaccggcuccuggaaaucacgcgcgaguuuagcgugaaugcuggcgucacaacccccguuucuacauauaugcuuaccaacuccgagcugcucagccugauuaaugauaugccuaucaccaacgaccaaaagaaacuuauguccaacaaugugcagauugugagacagcagucuuacagcaucaugugcauuaucaaggaagagguccuggccuaugugguucaacucccccuguacggggugaucgauacaccuuguuggaaacugcauacgagcccccucugcaccacaaacaccaaggaaggauccaauauuugucugacacggaccgaccgcggcugguacugcgauaacgcugggucugucuccuucuuuccucaggccgagacguguaaggugcagagcaauagaguuuucugcgacacaaugaacucucuuacccugccgagcgaagugaaucucugcaacgucgauaucuuuaaucccaaauaugacuguaagauuaugaccuccaaaacagaugugucuagcuccgucaucaccagccugggagcgauugugucuugcuacggcaagacaaaauguacggccuccaacaagaaucgggggaucaucaagaccuucagcaacggaugcgacuauguuucuaauaaaggcguggacacagucuccgugggcaacacccuuuacuguguuaauaagcaagaggggcagagccuguaugugaaaggagagccuauuaucaacuuuuacgauccccucgucuucccuuccgacgaauuugaugcuucuauuagccaggugaacgagaagaucaaucagucccuggccuucauucgcaaaucugacgaacugcuccacaacgugaaugcuggcaagagcacaaccaacaucaugauuacgaccaucaucauuguuaucauugucauccugcuuucccugauugccguggggcuccugcuguauugcaaggccagaugaggacuaguggaagcauuuuccuggcugauuaaaagaaauuacucagcuauggucaucuguuccuguuagaaggcuaugcagcauauuauauacuaugcgcauguuaugaaaugcauaauaaaaaauuuuaaaaaaucuaaaagaucuaaaaaaaaaaaaaaaaaaaaaaaaaaaaaaaaaaaaaaaaaaaaaaaaaaaaaaaaaaaaaaaaugcaucccccccccccccccccccccccccccccccaaaggcucuuuucagagccaccagaauu

SEQ ID NO: 3600 - RNA, 1916 nt, Artificial Sequence
  mRNA product Design c-4 comprising derived and/or modified sequence from HRSV(A2)__F-del_DSCav1_mut3 (opt6)
gggagaguccgcucagccagguugcagaagcggcuuagcguguguccuaaucuucucucugcguguagguaggccugugccgcaaacaagcuuaccauggaauuacuaauccugaaagcaaacgcaauuacuacaauacuaacagcaguaaccuuuugcuuugccucaggacaaaacauaacugaagaauuuuaccaaucaacuugcucagcagucucaaaaggcuaucuaggagcacuacgaacagguugguauacuucagucauaacaauagaauuaucaaacauaaaagaaauuaaauguaacggaacugacgcaaaaguaaaacucaucaaacaagaacucgauaaauacaaaaacgcuguaaccgacuuacaacuacuaaugcaaucaacuccagcaacaggcuccggauccgcaauaugcagugguguagcaguaugcaaaguccuacaccuagaaggagaaguaaauaagauaaaaucugcucuacuaucaacaaauaaagcaguugucucccuaucaaauggagucucaguacucaccuucaaaguauuagaccucaaaaacuacauagacaaacaacuauuaccaauacucaacaaacaauccugcuccaucccuaacauagaaaccguaaucgaauuucaacaaaaaaauaacagacucuuagaaauaacuagagaauuuucaguuaaugcaggcgugacaacaccaguaucaacauauaugcuaacaaacuccgaacuccuaucccuaauaaacgacaugccaaucacaaacgaccaaaaaaaacuaauguccaacaacguacaaaucguaagacaacaaucauacucuauaaugugcauaauaaaagaagaaguacuggccuacguaguacaauuaccacucuacggaguaauagacaccccaugcuggaaacuccauacaucaccccuaugcacaacaaacacaaaagaaggauccaacauaugucucacuagaacagacagaggcugguacugcgacaacgcuggauccgucucauucuucccccaagcagaaacauguaaaguacaaucuaauagaguauuuugugacacaaugaacagccucacacuaccauccgaagucaaccuauguaacguagauauauuuaaucccaaauacgacugcaaaauaaugacauccaaaacagauguaucaucauccguuaucaccucacuaggagccauaguuucaugcuacggaaaaacaaaaugcacugcaucuaacaaaaauagagguauaauaaaaacauuuuccaacggcugcgacuacgucucaaacaaaggcguagacaccguaucaguaggaaauacauuauauugcguaaauaaacaagaaggccaaucccuauacguaaaaggagaacccaucauaaacuucuaugacccacuuguuuuccccucagacgaauuugacgccucaauaucacaaguaaaugaaaaaauaaaccaaucucuugccuucauuagaaaaucagacgaauuacuacacaacgucaacgcaggaaaaucaacaacaaacaucaugauaacaacgauaauaauagucauaauaguaauacuacuaucauuaaucgcagucggacuccuauuauauugcaaagcuagauaaggacuaguggaagcauuuuccuggcugauuaaaagaaauuacucagcuauggucaucuguuccuguuagaaggcuaugcagcauauuauauacuaugcgcauguuaugaaaugcauaauaaaaaauuuuaaaaaaucuaaaagaucuaaaaaaaaaaaaaaaaaaaaaaaaaaaaaaaaaaaaaaaaaaaaaaaaaaaaaaaaaaaaaaaaugcaucccccccccccccccccccccccccccccccaaaggcucuuuucagagccaccagaauu

SEQ ID NO: 3601 - RNA, 1916 nt, Artificial Sequence
  mRNA product Design c-4 comprising derived and/or modified sequence from HRSV(A2)__F-del_DSCav1_mut3 (opt11)
gggagaguccgcucagccagguugcagaagcggcuuagcguguguccuaaucuucucucugcguguagguaggccugugccgcaaacaagcuuaccauggaacuacucauacuaaaagccaacgccauaaccaccauccucaccgcaguaacuuucugcuucgcuuccggccaaaacaucaccgaagaauuuuaccaaaguaccugcagcgcagucucaaaaggauaccuaggcgcccuacgcacaggcugguacaccuccgucauuaccaucgaacucuccaacaucaaagaaauuaaaugcaacgguacagacgcaaaagucaaacucaucaaacaagaacucgacaaauacaaaaacgcagucaccgaccuccaacuccucaugcaauccacccccgccacaggcucuggcuccgccaucugcucaggcguagcagucugcaaaguccugcaccucgaaggcgaagucaacaaaaucaagucagcccuccucuccaccaacaaggccgucguaucccucucaaacggaguuagcguccucaccuucaaaguccuagaccucaaaaacuacaucgauaaacaacuacuccccauccuaaacaaacaaucaugcuccaucccaaacaucgaaaccguaaucgaguuccaacaaaagaacaaccgccuccucgaaaucacacgugaguucuccguuaacgccggcgucaccacccccgucucuacauacaugcucaccaacuccgaacuccuuucccucaucaacgacaugccaaucaccaacgaccaaaagaaacucaugucaaacaacguacaaaucguccgacaacaaagcuacuccaucaugugcaucaucaaagaagaaguccuugcauacgucguucaacuaccccucuacggcguaaucgacacucccugcuggaaacuccacaccuccccgcucugcacaaccaacaccaaagaaggcagcaacaucugccucacccgaaccgaccgcggcugguacugcgauaacgccggauccgucuccuucuucccacaagcagaaacuugcaaaguccaauccaaccgcgucuucugcgacaccaugaacucccucacacuccccuccgaagucaaccugugcaacgucgacaucuucaacccaaaauacgacugcaaaaucaugaccucaaaaaccgacgucucaucuucugucaucaccucucucggcgcuaucgucuccugcuauggcaaaaccaaaugcaccgccuccaacaagaaccgcggcauuaucaagaccuucuccaacggcugcgacuacgucuccaauaagggcgucgacaccgucucugucggcaacacccuuuacugcguaaacaaacaagaaggucaaucucucuacgucaaaggagaacccaucaucaacuucuacgacccccuggucuuccccuccgacgaguucgaugcaucaaucucccaagucaacgaaaagaucaaccaaucucucgcuuucauccgcaaauccgacgaacuccuacacaacguaaacgccggcaaauccaccacaaacaucaugaucaccaccauuaucauagucaucaucgucauccuccucuccuuaaucgccguuggccuccuucucuacugcaaagcccgauaaggacuaguggaagcauuuuccuggcugauuaaaagaaauuacucagcuauggucaucuguuccuguuagaaggcuaugcagcauauuauauacuaugcgcauguuaugaaaugcauaauaaaaaauuuuaaaaaaucuaaaagaucuaaaaaaaaaaaaaaaaaaaaaaaaaaaaaaaaaaaaaaaaaaaaaaaaaaaaaaaaaaaaaaaaugcaucccccccccccccccccccccccccccccccaaaggcucuuuucagagccaccagaauu

SEQ ID NO: 3602 - RNA, 1834 nt, Artificial Sequence
  mRNA product Design c-5 comprising derived and/or modified sequence from HRSV(A2)__F-del_DSCav1_mut3 (opt1)
gggagagcggcucggccauuuugucccagucaguccggaggcugcggcugcagaaguaccgccugcggaguaacugcaaagaagcuuaccauggagcugcucauccugaaggccaacgccaucaccaccauccugacggcggugaccuucugcuucgccagcggccagaacaucaccgaggaguucuaccaguccacgugcagcgccgucuccaagggguaccucggcgcccugcggaccggcugguacaccuccgugaucaccaucgagcugagcaacaucaaggagaucaagugcaacgggaccgacgccaaggugaagcucaucaagcaggagcuggacaaguacaagaacgcggucacggaccugcagcuccugaugcaguccaccccggcaaccggcuccggcuccgccaucugcagcggcgucgccgugugcaaggugcugcaccucgagggggaggucaacaagaucaagagcgcccugcuguccaccaacaaggccguggugagccucuccaacggcgucagcgugcugaccuucaaggugcuggaccucaagaacuacaucgacaagcagcugcugcccauccugaacaagcagagcugcuccauccccaacaucgagacggugaucgaguuccagcagaagaacaaccggcuccuggagaucacccgcgaguucagcgugaacgccggggucaccacccccguguccacguacaugcugaccaacagcgagcuccugucccugaucaacgacaugccgaucaccaacgaccagaagaagcucaugagcaacaacgugcagaucguccggcagcaguccuacagcaucaugugcaucaucaaggaggaggugcuggcguacgugguccagcugccccucuacggcgugaucgacacccccugcuggaagcugcacacgagcccccugugcaccaccaacaccaaggagggguccaacaucugccucacgcgcaccgaccggggcugguacugcgacaacgccggcagcgucuccuucuucccgcaggccgagaccugcaaggugcagagcaaccgcguguucugcgacaccaugaacucccugacgcugcccagcgagguaaaccucugcaacgucgacaucuucaaccccaaguacgacugcaagaucaugaccuccaagaccgacgugagcuccagcgugaucaccucccugggggccaucgucagcugcuacggcaagacgaagugcaccgccagcaacaagaaccgggggaucaucaagaccuucuccaacggcugcgacuacgugagcaacaagggcguggacaccguguccgucgggaacacccuguacugcgugaacaagcaggagggccagagccucuacgugaagggggagcccaucaucaacuucuacgacccgcuggucuuccccuccgacgaguucgacgcgagcaucucccaggugaacgagaagaucaaccagagccuggccuucauccgcaaguccgacgagcugcuccacaacgugaacgccggcaagagcacgaccaacaucaugaucaccaccaucaucaucgucaucaucgugauccugcugucccucaucgccguggggcugcugcucuacugcaaggcccggugaggacuagucccuguucccagagcccacuuuuuuuucuuuuuuugaaauaaaauagccugucuuucagaucuaaaaaaaaaaaaaaaaaaaaaaaaaaaaaaaaaaaaaaaaaaaaaaaaaaaaaaaaaaaaaaaaugcaucccccccccccccccccccccccccccccccaaaggcucuuuucagagccaccagaauu

SEQ ID NO: 3603 - RNA, 1834 nt, Artificial Sequence
  mRNA product Design c-5 comprising derived and/or modified sequence from HRSV(A2)__F-del_DSCav1_mut3 (opt1)
gggagagcggcucggccauuuugucccagucaguccggaggcugcggcugcagaaguaccgccugcggaguaacugcaaagaagcuuaccauggagcugcucauccugaaggccaacgccaucaccaccauccugacggcggugaccuucugcuucgccagcggccagaacaucaccgaggaguucuaccaguccacgugcagcgccgucuccaagggguaccucggcgcccugcgcaccgggugguacaccagcgugaucaccaucgagcuguccaacaucaaggagaucaagugcaacggcaccgacgccaaggugaagcucaucaagcaggagcuggacaaguacaagaacgcggucacggaccugcagcuccugaugcagagcacccccgccaccggguccggcagcgccaucugcuccggcguggccgugugcaagguccugcaccucgagggggaggugaacaagaucaagagcgcgcugcuguccaccaacaaggccguggucagccucuccaacggcgugagcgugcugacguucaagguccuggaccucaagaacuacaucgacaagcagcugcugccgauccucaacaagcaguccugcagcauccccaacaucgagaccgugaucgaguuccagcagaagaacaaccggcugcuggagaucacccgcgaguucuccgugaacgccggggucaccacgcccgugagcaccuacaugcucaccaacuccgagcugcugagccucaucaacgacaugcccaucaccaacgaccagaagaagcugaugagcaacaacgugcagaucguccggcagcaguccuacagcaucaugugcaucaucaaggaggaggugcuggccuacgugguccagcucccgcuguacggcgugaucgacacgcccugcuggaagcugcacaccagcccccucugcaccaccaacacgaaggagggguccaacaucugccugacccgcaccgaccggggcugguacugcgacaacgccggcuccgugagcuucuucccccaggcggagaccugcaagguccaguccaaccgcguguucugcgacacgaugaacagccugacccucccguccgaggucaaccugugcaacguggacaucuucaaccccaaguacgacugcaagaucaugaccagcaagaccgacguguccagcuccgucaucacgagccugggggccaucguguccugcuacggcaagaccaagugcaccgccagcaacaagaaccgggggaucaucaagaccuucuccaacggcugcgacuacgugagcaacaagggcgucgacacgguguccguggggaacacccucuacugcgucaacaagcaggagggccagagccuguacgugaagggggagcccaucaucaacuucuacgacccccugguguucccgagcgacgaguucgacgccuccaucagccaggucaacgagaagaucaaccagucccucgccuucauccgcaagagcgacgagcugcugcacaacgugaacgcgggcaaguccaccaccaacaucaugaucaccacgaucaucaucgugaucaucgucauccuccugagccugaucgccguggggcuccugcuguacugcaaggcccggugaggacuagucccuguucccagagcccacuuuuuuuucuuuuuuugaaauaaaauagccugucuuucagaucuaaaaaaaaaaaaaaaaaaaaaaaaaaaaaaaaaaaaaaaaaaaaaaaaaaaaaaaaaaaaaaaaugcaucccccccccccccccccccccccccccccccaaaggcucuuuucagagccaccagaauu

SEQ ID NO: 3604 - RNA, 1834 nt, Artificial Sequence
  mRNA product Design c-5 comprising derived and/or modified sequence from HRSV(A2)__F-del_DSCav1_mut3 (opt2)
gggagagcggcucggccauuuugucccagucaguccggaggcugcggcugcagaaguaccgccugcggaguaacugcaaagaagcuuaccauggagcuccucauccucaaggccaacgccaucaccaccauccucaccgccgucaccuucugcuucgccuccggccagaacaucaccgaggaguucuaccaguccaccugcuccgccgucuccaagggcuaccucggcgcccuccgcaccggcugguacaccuccgucaucaccaucgagcucuccaacaucaaggagaucaagugcaacggcaccgacgccaaggucaagcucaucaagcaggagcucgacaaguacaagaacgccgucaccgaccuccagcuccucaugcaguccacccccgccaccggcuccggcuccgccaucugcuccggcgucgccgucugcaagguccuccaccucgagggcgaggucaacaagaucaaguccgcccuccucuccaccaacaaggccgucgucucccucuccaacggcgucuccguccucaccuucaagguccucgaccucaagaacuacaucgacaagcagcuccuccccauccucaacaagcaguccugcuccauccccaacaucgagaccgucaucgaguuccagcagaagaacaaccgccuccucgagaucacccgcgaguucuccgucaacgccggcgucaccacccccgucuccaccuacaugcucaccaacuccgagcuccucucccucaucaacgacaugcccaucaccaacgaccagaagaagcucauguccaacaacguccagaucguccgccagcaguccuacuccaucaugugcaucaucaaggaggagguccucgccuacgucguccagcucccccucuacggcgucaucgacacccccugcuggaagcuccacaccuccccccucugcaccaccaacaccaaggagggcuccaacaucugccucacccgcaccgaccgcggcugguacugcgacaacgccggcuccgucuccuucuucccccaggccgagaccugcaagguccaguccaaccgcgucuucugcgacaccaugaacucccucacccuccccuccgaggucaaccucugcaacgucgacaucuucaaccccaaguacgacugcaagaucaugaccuccaagaccgacgucuccuccuccgucaucaccucccucggcgccaucgucuccugcuacggcaagaccaagugcaccgccuccaacaagaaccgcggcaucaucaagaccuucuccaacggcugcgacuacgucuccaacaagggcgucgacaccgucuccgucggcaacacccucuacugcgucaacaagcaggagggccagucccucuacgucaagggcgagcccaucaucaacuucuacgacccccucgucuuccccuccgacgaguucgacgccuccaucucccaggucaacgagaagaucaaccagucccucgccuucauccgcaaguccgacgagcuccuccacaacgucaacgccggcaaguccaccaccaacaucaugaucaccaccaucaucaucgucaucaucgucauccuccucucccucaucgccgucggccuccuccucuacugcaaggcccgcugaggacuagucccuguucccagagcccacuuuuuuuucuuuuuuugaaauaaaauagccugucuuucagaucuaaaaaaaaaaaaaaaaaaaaaaaaaaaaaaaaaaaaaaaaaaaaaaaaaaaaaaaaaaaaaaaaugcaucccccccccccccccccccccccccccccccaaaggcucuuuucagagccaccagaauu

SEQ ID NO: 3605 - RNA, 1834 nt, Artificial Sequence
  mRNA product Design c-5 comprising derived and/or modified sequence from HRSV(A2)__F-del_DSCav1_mut3 (opt3)
gggagagcggcucggccauuuugucccagucaguccggaggcugcggcugcagaaguaccgccugcggaguaacugcaaagaagcuuaccauggagcugcucauccuuaaggccaacgcuauuaccacaauacugacugcagugacguucugcuuugccagcggccagaauaucaccgaagaguucuaccaauccacauguucugcggucucaaaaggguauuugggagcuuuaagaacugguugguacaccaguguuauuacaaucgaacugagcaacauuaaggagaucaaaugcaauggcaccgacgccaaggugaaacuaauaaagcaggaacucgauaaguauaaaaacgcaguaacugaccugcagcuucugaugcaguccacacccgccaccgggucuggaucggcuaucuguucaggcguggcagucugcaagguguugcaccucgagggugagguuaauaaaauuaagagcgcccugcugaguacgaacaaagcuguggucucccucucuaauggggugagcguauuaacuuuuaagguucuggaucuuaagaacuacaucgacaaacaauugcugccuauucuaaauaagcaguccuguucaaucccaaacauagaaaccgugauugaguuccagcagaaaaauaacaggcuccuggaaaucacacgggaguuuagugucaaugccggagugacuaccccggugagcacauauaugcuuaccaacucugagcuguugucccucauuaaugauaugcccaucacgaacgaccaaaagaaacugaugucaaacaauguccagaucguucgccagcagagcuacaguauuaugugcauaaucaaggaagagguguuagcguauguagugcaacugccucucuacggcgucauugauacuccauguuggaaacuucauacaucuccccugugcaccacuaacacaaaggaaggcuccaauaucuguuugacccgaacggaccgugggugguacugcgauaacgcaggaagcgugucguucuuuccucaggccgagaccuguaagguucagucuaauagaguguucugcgacacaaugaacucccuaacucugccaucagaagucaaucucugcaacguggauauauuuaaucccaaauaugacuguaagauuaugaccaguaaaacagauguaagcuccucuguuaucacuagccugggugcuaucgugucaugcuacggcaagaccaaauguacagccaguaacaagaauagggggauuaucaagaccuucuccaacggaugcgacuaugucagcaauaaaggcguggacacugucucuguggguaacacgcuuuacuguguuaauaagcaagaggggcagucacuguaugugaaaggagagccuauuauaaacuuuuacgauccauugguauucccgagugacgaauuugaugcaagcaucucccaggucaacgagaagauuaaucagucucucgcuuucauccggaaaucggacgaacuguuacacaacgugaaugccggcaagagcacaaccaacaucaugauuacuaccauaaucauuguuaucauugugauccugcuaucccucauagcggucggccugcuuuuguauugcaaggcccgcugaggacuagucccuguucccagagcccacuuuuuuuucuuuuuuugaaauaaaauagccugucuuucagaucuaaaaaaaaaaaaaaaaaaaaaaaaaaaaaaaaaaaaaaaaaaaaaaaaaaaaaaaaaaaaaaaaugcaucccccccccccccccccccccccccccccccaaaggcucuuuucagagccaccagaauu

SEQ ID NO: 3606 - RNA, 1834 nt, Artificial Sequence
  mRNA product Design c-5 comprising derived and/or modified sequence from HRSV(A2)__F-del_DSCav1_mut3 (opt4)
gggagagcggcucggccauuuugucccagucaguccggaggcugcggcugcagaaguaccgccugcggaguaacugcaaagaagcuuaccauggagcugcugauccugaaggccaacgccaucaccaccauccugaccgccgugaccuucugcuucgccagcggccagaacaucaccgaggaguucuaccagagcaccugcagcgccgugagcaagggcuaccugggcgcccugagaaccggcugguacaccagcgugaucaccaucgagcugagcaacaucaaggagaucaagugcaacggcaccgacgccaaggugaagcugaucaagcaggagcuggacaaguacaagaacgccgugaccgaccugcagcugcugaugcagagcacccccgccaccggcagcggcagcgccaucugcagcggcguggccgugugcaaggugcugcaccuggagggcgaggugaacaagaucaagagcgcccugcugagcaccaacaaggccguggugagccugagcaacggcgugagcgugcugaccuucaaggugcuggaccugaagaacuacaucgacaagcagcugcugcccauccugaacaagcagagcugcagcauccccaacaucgagaccgugaucgaguuccagcagaagaacaacagacugcuggagaucaccagagaguucagcgugaacgccggcgugaccacccccgugagcaccuacaugcugaccaacagcgagcugcugagccugaucaacgacaugcccaucaccaacgaccagaagaagcugaugagcaacaacgugcagaucgugagacagcagagcuacagcaucaugugcaucaucaaggaggaggugcuggccuacguggugcagcugccccuguacggcgugaucgacacccccugcuggaagcugcacaccagcccccugugcaccaccaacaccaaggagggcagcaacaucugccugaccagaaccgacagaggcugguacugcgacaacgccggcagcgugagcuucuucccccaggccgagaccugcaaggugcagagcaacagaguguucugcgacaccaugaacagccugacccugcccagcgaggugaaccugugcaacguggacaucuucaaccccaaguacgacugcaagaucaugaccagcaagaccgacgugagcagcagcgugaucaccagccugggcgccaucgugagcugcuacggcaagaccaagugcaccgccagcaacaagaacagaggcaucaucaagaccuucagcaacggcugcgacuacgugagcaacaagggcguggacaccgugagcgugggcaacacccuguacugcgugaacaagcaggagggccagagccuguacgugaagggcgagcccaucaucaacuucuacgacccccugguguuccccagcgacgaguucgacgccagcaucagccaggugaacgagaagaucaaccagagccuggccuucaucagaaagagcgacgagcugcugcacaacgugaacgccggcaagagcaccaccaacaucaugaucaccaccaucaucaucgugaucaucgugauccugcugagccugaucgccgugggccugcugcuguacugcaaggccagaugaggacuagucccuguucccagagcccacuuuuuuuucuuuuuuugaaauaaaauagccugucuuucagaucuaaaaaaaaaaaaaaaaaaaaaaaaaaaaaaaaaaaaaaaaaaaaaaaaaaaaaaaaaaaaaaaaugcaucccccccccccccccccccccccccccccccaaaggcucuuuucagagccaccagaauu

SEQ ID NO: 3607 - RNA, 1834 nt, Artificial Sequence
  mRNA product Design c-5 comprising derived and/or modified sequence from HRSV(A2)__F-del_DSCav1_mut3 (opt5)
gggagagcggcucggccauuuugucccagucaguccggaggcugcggcugcagaaguaccgccugcggaguaacugcaaagaagcuuaccauggagcugcucauccugaaggccaacgcuauuaccacaauccuuacggccgugaccuucugcuuugcgagcggccagaauauuacagaagaguucuaccaauccaccuguucugcugucagcaaaggguaucugggagcccucagaacaggcugguacaccuccguuaucacaauugaacugucuaacaucaaggagaucaaaugcaaugggaccgacgccaaggugaaacuuauuaagcaggaacuggauaaguauaaaaacgcugugacggaccuccagcugcugaugcagagcacccccgccacaggauccggcucugcuaucuguagcggggucgccgugugcaagguucuccaccuggagggagaggugaauaaaauuaaguccgcgcuucugagcaccaacaaagccgucgugucucucuccaauggcguuagcgugcugacauuuaagguccuugaucugaagaacuacaucgacaaacaacuccugccuauucugaauaagcagucuuguuccaucccgaacauugaaaccgugaucgaguuccagcagaaaaauaaccggcuccuggaaaucacgcgcgaguuuagcgugaaugcuggcgucacaacccccguuucuacauauaugcuuaccaacuccgagcugcucagccugauuaaugauaugccuaucaccaacgaccaaaagaaacuuauguccaacaaugugcagauugugagacagcagucuuacagcaucaugugcauuaucaaggaagagguccuggccuaugugguucaacucccccuguacggggugaucgauacaccuuguuggaaacugcauacgagcccccucugcaccacaaacaccaaggaaggauccaauauuugucugacacggaccgaccgcggcugguacugcgauaacgcugggucugucuccuucuuuccucaggccgagacguguaaggugcagagcaauagaguuuucugcgacacaaugaacucucuuacccugccgagcgaagugaaucucugcaacgucgauaucuuuaaucccaaauaugacuguaagauuaugaccuccaaaacagaugugucuagcuccgucaucaccagccugggagcgauugugucuugcuacggcaagacaaaauguacggccuccaacaagaaucgggggaucaucaagaccuucagcaacggaugcgacuauguuucuaauaaaggcguggacacagucuccgugggcaacacccuuuacuguguuaauaagcaagaggggcagagccuguaugugaaaggagagccuauuaucaacuuuuacgauccccucgucuucccuuccgacgaauuugaugcuucuauuagccaggugaacgagaagaucaaucagucccuggccuucauucgcaaaucugacgaacugcuccacaacgugaaugcuggcaagagcacaaccaacaucaugauuacgaccaucaucauuguuaucauugucauccugcuuucccugauugccguggggcuccugcuguauugcaaggccagaugaggacuagucccuguucccagagcccacuuuuuuuucuuuuuuugaaauaaaauagccugucuuucagaucuaaaaaaaaaaaaaaaaaaaaaaaaaaaaaaaaaaaaaaaaaaaaaaaaaaaaaaaaaaaaaaaaugcaucccccccccccccccccccccccccccccccaaaggcucuuuucagagccaccagaauu

SEQ ID NO: 3608 - RNA, 1834 nt, Artificial Sequence
  mRNA product Design c-5 comprising derived and/or modified sequence from HRSV(A2)__F-del_DSCav1_mut3 (opt6)
gggagagcggcucggccauuuugucccagucaguccggaggcugcggcugcagaaguaccgccugcggaguaacugcaaagaagcuuaccauggaauuacuaauccugaaagcaaacgcaauuacuacaauacuaacagcaguaaccuuuugcuuugccucaggacaaaacauaacugaagaauuuuaccaaucaacuugcucagcagucucaaaaggcuaucuaggagcacuacgaacagguugguauacuucagucauaacaauagaauuaucaaacauaaaagaaauuaaauguaacggaacugacgcaaaaguaaaacucaucaaacaagaacucgauaaauacaaaaacgcuguaaccgacuuacaacuacuaaugcaaucaacuccagcaacaggcuccggauccgcaauaugcagugguguagcaguaugcaaaguccuacaccuagaaggagaaguaaauaagauaaaaucugcucuacuaucaacaaauaaagcaguugucucccuaucaaauggagucucaguacucaccuucaaaguauuagaccucaaaaacuacauagacaaacaacuauuaccaauacucaacaaacaauccugcuccaucccuaacauagaaaccguaaucgaauuucaacaaaaaaauaacagacucuuagaaauaacuagagaauuuucaguuaaugcaggcgugacaacaccaguaucaacauauaugcuaacaaacuccgaacuccuaucccuaauaaacgacaugccaaucacaaacgaccaaaaaaaacuaauguccaacaacguacaaaucguaagacaacaaucauacucuauaaugugcauaauaaaagaagaaguacuggccuacguaguacaauuaccacucuacggaguaauagacaccccaugcuggaaacuccauacaucaccccuaugcacaacaaacacaaaagaaggauccaacauaugucucacuagaacagacagaggcugguacugcgacaacgcuggauccgucucauucuucccccaagcagaaacauguaaaguacaaucuaauagaguauuuugugacacaaugaacagccucacacuaccauccgaagucaaccuauguaacguagauauauuuaaucccaaauacgacugcaaaauaaugacauccaaaacagauguaucaucauccguuaucaccucacuaggagccauaguuucaugcuacggaaaaacaaaaugcacugcaucuaacaaaaauagagguauaauaaaaacauuuuccaacggcugcgacuacgucucaaacaaaggcguagacaccguaucaguaggaaauacauuauauugcguaaauaaacaagaaggccaaucccuauacguaaaaggagaacccaucauaaacuucuaugacccacuuguuuuccccucagacgaauuugacgccucaauaucacaaguaaaugaaaaaauaaaccaaucucuugccuucauuagaaaaucagacgaauuacuacacaacgucaacgcaggaaaaucaacaacaaacaucaugauaacaacgauaauaauagucauaauaguaauacuacuaucauuaaucgcagucggacuccuauuauauugcaaagcuagauaaggacuagucccuguucccagagcccacuuuuuuuucuuuuuuugaaauaaaauagccugucuuucagaucuaaaaaaaaaaaaaaaaaaaaaaaaaaaaaaaaaaaaaaaaaaaaaaaaaaaaaaaaaaaaaaaaugcaucccccccccccccccccccccccccccccccaaaggcucuuuucagagccaccagaauu

SEQ ID NO: 3609 - RNA, 1834 nt, Artificial Sequence
  mRNA product Design c-5 comprising derived and/or modified sequence from HRSV(A2)__F-del_DSCav1_mut3 (opt11)
gggagagcggcucggccauuuugucccagucaguccggaggcugcggcugcagaaguaccgccugcggaguaacugcaaagaagcuuaccauggaacuacucauacuaaaagccaacgccauaaccaccauccucaccgcaguaacuuucugcuucgcuuccggccaaaacaucaccgaagaauuuuaccaaaguaccugcagcgcagucucaaaaggauaccuaggcgcccuacgcacaggcugguacaccuccgucauuaccaucgaacucuccaacaucaaagaaauuaaaugcaacgguacagacgcaaaagucaaacucaucaaacaagaacucgacaaauacaaaaacgcagucaccgaccuccaacuccucaugcaauccacccccgccacaggcucuggcuccgccaucugcucaggcguagcagucugcaaaguccugcaccucgaaggcgaagucaacaaaaucaagucagcccuccucuccaccaacaaggccgucguaucccucucaaacggaguuagcguccucaccuucaaaguccuagaccucaaaaacuacaucgauaaacaacuacuccccauccuaaacaaacaaucaugcuccaucccaaacaucgaaaccguaaucgaguuccaacaaaagaacaaccgccuccucgaaaucacacgugaguucuccguuaacgccggcgucaccacccccgucucuacauacaugcucaccaacuccgaacuccuuucccucaucaacgacaugccaaucaccaacgaccaaaagaaacucaugucaaacaacguacaaaucguccgacaacaaagcuacuccaucaugugcaucaucaaagaagaaguccuugcauacgucguucaacuaccccucuacggcguaaucgacacucccugcuggaaacuccacaccuccccgcucugcacaaccaacaccaaagaaggcagcaacaucugccucacccgaaccgaccgcggcugguacugcgauaacgccggauccgucuccuucuucccacaagcagaaacuugcaaaguccaauccaaccgcgucuucugcgacaccaugaacucccucacacuccccuccgaagucaaccugugcaacgucgacaucuucaacccaaaauacgacugcaaaaucaugaccucaaaaaccgacgucucaucuucugucaucaccucucucggcgcuaucgucuccugcuauggcaaaaccaaaugcaccgccuccaacaagaaccgcggcauuaucaagaccuucuccaacggcugcgacuacgucuccaauaagggcgucgacaccgucucugucggcaacacccuuuacugcguaaacaaacaagaaggucaaucucucuacgucaaaggagaacccaucaucaacuucuacgacccccuggucuuccccuccgacgaguucgaugcaucaaucucccaagucaacgaaaagaucaaccaaucucucgcuuucauccgcaaauccgacgaacuccuacacaacguaaacgccggcaaauccaccacaaacaucaugaucaccaccauuaucauagucaucaucgucauccuccucuccuuaaucgccguuggccuccuucucuacugcaaagcccgauaaggacuagucccuguucccagagcccacuuuuuuuucuuuuuuugaaauaaaauagccugucuuucagaucuaaaaaaaaaaaaaaaaaaaaaaaaaaaaaaaaaaaaaaaaaaaaaaaaaaaaaaaaaaaaaaaaugcaucccccccccccccccccccccccccccccccaaaggcucuuuucagagccaccagaauu

SEQ ID NO: 3610 - RNA, 1843 nt, Artificial Sequence
  mRNA product Design d-1 comprising derived and/or modified sequence from HRSV(A2)__F-del_DSCav1_mut3 (opt1)
gggagacccgugacccggaaguuguacggcuacgcgacuuucccucccacaaacccucgcgcccuuccuuuccuacuugggcccggcagaaagcuuaccauggagcugcucauccugaaggccaacgccaucaccaccauccugacggcggugaccuucugcuucgccagcggccagaacaucaccgaggaguucuaccaguccacgugcagcgccgucuccaagggguaccucggcgcccugcggaccggcugguacaccuccgugaucaccaucgagcugagcaacaucaaggagaucaagugcaacgggaccgacgccaaggugaagcucaucaagcaggagcuggacaaguacaagaacgcggucacggaccugcagcuccugaugcaguccaccccggcaaccggcuccggcuccgccaucugcagcggcgucgccgugugcaaggugcugcaccucgagggggaggucaacaagaucaagagcgcccugcuguccaccaacaaggccguggugagccucuccaacggcgucagcgugcugaccuucaaggugcuggaccucaagaacuacaucgacaagcagcugcugcccauccugaacaagcagagcugcuccauccccaacaucgagacggugaucgaguuccagcagaagaacaaccggcuccuggagaucacccgcgaguucagcgugaacgccggggucaccacccccguguccacguacaugcugaccaacagcgagcuccugucccugaucaacgacaugccgaucaccaacgaccagaagaagcucaugagcaacaacgugcagaucguccggcagcaguccuacagcaucaugugcaucaucaaggaggaggugcuggcguacgugguccagcugccccucuacggcgugaucgacacccccugcuggaagcugcacacgagcccccugugcaccaccaacaccaaggagggguccaacaucugccucacgcgcaccgaccggggcugguacugcgacaacgccggcagcgucuccuucuucccgcaggccgagaccugcaaggugcagagcaaccgcguguucugcgacaccaugaacucccugacgcugcccagcgagguaaaccucugcaacgucgacaucuucaaccccaaguacgacugcaagaucaugaccuccaagaccgacgugagcuccagcgugaucaccucccugggggccaucgucagcugcuacggcaagacgaagugcaccgccagcaacaagaaccgggggaucaucaagaccuucuccaacggcugcgacuacgugagcaacaagggcguggacaccguguccgucgggaacacccuguacugcgugaacaagcaggagggccagagccucuacgugaagggggagcccaucaucaacuucuacgacccgcuggucuuccccuccgacgaguucgacgcgagcaucucccaggugaacgagaagaucaaccagagccuggccuucauccgcaaguccgacgagcugcuccacaacgugaacgccggcaagagcacgaccaacaucaugaucaccaccaucaucaucgucaucaucgugauccugcugucccucaucgccguggggcugcugcucuacugcaaggcccggugaggacuagucccuguucccagagcccacuuuuuuuucuuuuuuugaaauaaaauagccugucuuucagaucuaaaaaaaaaaaaaaaaaaaaaaaaaaaaaaaaaaaaaaaaaaaaaaaaaaaaaaaaaaaaaaaaugcaucccccccccccccccccccccccccccccccaaaggcucuuuucagagccaccagaauu

SEQ ID NO: 3611 - RNA, 1843 nt, Artificial Sequence
  mRNA product Design d-1 comprising derived and/or modified sequence from HRSV(A2)__F-del_DSCav1_mut3 (opt1)
gggagacccgugacccggaaguuguacggcuacgcgacuuucccucccacaaacccucgcgcccuuccuuuccuacuugggcccggcagaaagcuuaccauggagcugcucauccugaaggccaacgccaucaccaccauccugacggcggugaccuucugcuucgccagcggccagaacaucaccgaggaguucuaccaguccacgugcagcgccgucuccaagggguaccucggcgcccugcgcaccgggugguacaccagcgugaucaccaucgagcuguccaacaucaaggagaucaagugcaacggcaccgacgccaaggugaagcucaucaagcaggagcuggacaaguacaagaacgcggucacggaccugcagcuccugaugcagagcacccccgccaccggguccggcagcgccaucugcuccggcguggccgugugcaagguccugcaccucgagggggaggugaacaagaucaagagcgcgcugcuguccaccaacaaggccguggucagccucuccaacggcgugagcgugcugacguucaagguccuggaccucaagaacuacaucgacaagcagcugcugccgauccucaacaagcaguccugcagcauccccaacaucgagaccgugaucgaguuccagcagaagaacaaccggcugcuggagaucacccgcgaguucuccgugaacgccggggucaccacgcccgugagcaccuacaugcucaccaacuccgagcugcugagccucaucaacgacaugcccaucaccaacgaccagaagaagcugaugagcaacaacgugcagaucguccggcagcaguccuacagcaucaugugcaucaucaaggaggaggugcuggccuacgugguccagcucccgcuguacggcgugaucgacacgcccugcuggaagcugcacaccagcccccucugcaccaccaacacgaaggagggguccaacaucugccugacccgcaccgaccggggcugguacugcgacaacgccggcuccgugagcuucuucccccaggcggagaccugcaagguccaguccaaccgcguguucugcgacacgaugaacagccugacccucccguccgaggucaaccugugcaacguggacaucuucaaccccaaguacgacugcaagaucaugaccagcaagaccgacguguccagcuccgucaucacgagccugggggccaucguguccugcuacggcaagaccaagugcaccgccagcaacaagaaccgggggaucaucaagaccuucuccaacggcugcgacuacgugagcaacaagggcgucgacacgguguccguggggaacacccucuacugcgucaacaagcaggagggccagagccuguacgugaagggggagcccaucaucaacuucuacgacccccugguguucccgagcgacgaguucgacgccuccaucagccaggucaacgagaagaucaaccagucccucgccuucauccgcaagagcgacgagcugcugcacaacgugaacgcgggcaaguccaccaccaacaucaugaucaccacgaucaucaucgugaucaucgucauccuccugagccugaucgccguggggcuccugcuguacugcaaggcccggugaggacuagucccuguucccagagcccacuuuuuuuucuuuuuuugaaauaaaauagccugucuuucagaucuaaaaaaaaaaaaaaaaaaaaaaaaaaaaaaaaaaaaaaaaaaaaaaaaaaaaaaaaaaaaaaaaugcaucccccccccccccccccccccccccccccccaaaggcucuuuucagagccaccagaauu

SEQ ID NO: 3612 - RNA, 1843 nt, Artificial Sequence
  mRNA product Design d-1 comprising derived and/or modified sequence from HRSV(A2)__F-del_DSCav1_mut3 (opt2)
gggagacccgugacccggaaguuguacggcuacgcgacuuucccucccacaaacccucgcgcccuuccuuuccuacuugggcccggcagaaagcuuaccauggagcuccucauccucaaggccaacgccaucaccaccauccucaccgccgucaccuucugcuucgccuccggccagaacaucaccgaggaguucuaccaguccaccugcuccgccgucuccaagggcuaccucggcgcccuccgcaccggcugguacaccuccgucaucaccaucgagcucuccaacaucaaggagaucaagugcaacggcaccgacgccaaggucaagcucaucaagcaggagcucgacaaguacaagaacgccgucaccgaccuccagcuccucaugcaguccacccccgccaccggcuccggcuccgccaucugcuccggcgucgccgucugcaagguccuccaccucgagggcgaggucaacaagaucaaguccgcccuccucuccaccaacaaggccgucgucucccucuccaacggcgucuccguccucaccuucaagguccucgaccucaagaacuacaucgacaagcagcuccuccccauccucaacaagcaguccugcuccauccccaacaucgagaccgucaucgaguuccagcagaagaacaaccgccuccucgagaucacccgcgaguucuccgucaacgccggcgucaccacccccgucuccaccuacaugcucaccaacuccgagcuccucucccucaucaacgacaugcccaucaccaacgaccagaagaagcucauguccaacaacguccagaucguccgccagcaguccuacuccaucaugugcaucaucaaggaggagguccucgccuacgucguccagcucccccucuacggcgucaucgacacccccugcuggaagcuccacaccuccccccucugcaccaccaacaccaaggagggcuccaacaucugccucacccgcaccgaccgcggcugguacugcgacaacgccggcuccgucuccuucuucccccaggccgagaccugcaagguccaguccaaccgcgucuucugcgacaccaugaacucccucacccuccccuccgaggucaaccucugcaacgucgacaucuucaaccccaaguacgacugcaagaucaugaccuccaagaccgacgucuccuccuccgucaucaccucccucggcgccaucgucuccugcuacggcaagaccaagugcaccgccuccaacaagaaccgcggcaucaucaagaccuucuccaacggcugcgacuacgucuccaacaagggcgucgacaccgucuccgucggcaacacccucuacugcgucaacaagcaggagggccagucccucuacgucaagggcgagcccaucaucaacuucuacgacccccucgucuuccccuccgacgaguucgacgccuccaucucccaggucaacgagaagaucaaccagucccucgccuucauccgcaaguccgacgagcuccuccacaacgucaacgccggcaaguccaccaccaacaucaugaucaccaccaucaucaucgucaucaucgucauccuccucucccucaucgccgucggccuccuccucuacugcaaggcccgcugaggacuagucccuguucccagagcccacuuuuuuuucuuuuuuugaaauaaaauagccugucuuucagaucuaaaaaaaaaaaaaaaaaaaaaaaaaaaaaaaaaaaaaaaaaaaaaaaaaaaaaaaaaaaaaaaaugcaucccccccccccccccccccccccccccccccaaaggcucuuuucagagccaccagaauu

SEQ ID NO: 3613 - RNA, 1843 nt, Artificial Sequence
  mRNA product Design d-1 comprising derived and/or modified sequence from HRSV(A2)__F-del_DSCav1_mut3 (opt3)
gggagacccgugacccggaaguuguacggcuacgcgacuuucccucccacaaacccucgcgcccuuccuuuccuacuugggcccggcagaaagcuuaccauggagcugcucauccuuaaggccaacgcuauuaccacaauacugacugcagugacguucugcuuugccagcggccagaauaucaccgaagaguucuaccaauccacauguucugcggucucaaaaggguauuugggagcuuuaagaacugguugguacaccaguguuauuacaaucgaacugagcaacauuaaggagaucaaaugcaauggcaccgacgccaaggugaaacuaauaaagcaggaacucgauaaguauaaaaacgcaguaacugaccugcagcuucugaugcaguccacacccgccaccgggucuggaucggcuaucuguucaggcguggcagucugcaagguguugcaccucgagggugagguuaauaaaauuaagagcgcccugcugaguacgaacaaagcuguggucucccucucuaauggggugagcguauuaacuuuuaagguucuggaucuuaagaacuacaucgacaaacaauugcugccuauucuaaauaagcaguccuguucaaucccaaacauagaaaccgugauugaguuccagcagaaaaauaacaggcuccuggaaaucacacgggaguuuagugucaaugccggagugacuaccccggugagcacauauaugcuuaccaacucugagcuguugucccucauuaaugauaugcccaucacgaacgaccaaaagaaacugaugucaaacaauguccagaucguucgccagcagagcuacaguauuaugugcauaaucaaggaagagguguuagcguauguagugcaacugccucucuacggcgucauugauacuccauguuggaaacuucauacaucuccccugugcaccacuaacacaaaggaaggcuccaauaucuguuugacccgaacggaccgugggugguacugcgauaacgcaggaagcgugucguucuuuccucaggccgagaccuguaagguucagucuaauagaguguucugcgacacaaugaacucccuaacucugccaucagaagucaaucucugcaacguggauauauuuaaucccaaauaugacuguaagauuaugaccaguaaaacagauguaagcuccucuguuaucacuagccugggugcuaucgugucaugcuacggcaagaccaaauguacagccaguaacaagaauagggggauuaucaagaccuucuccaacggaugcgacuaugucagcaauaaaggcguggacacugucucuguggguaacacgcuuuacuguguuaauaagcaagaggggcagucacuguaugugaaaggagagccuauuauaaacuuuuacgauccauugguauucccgagugacgaauuugaugcaagcaucucccaggucaacgagaagauuaaucagucucucgcuuucauccggaaaucggacgaacuguuacacaacgugaaugccggcaagagcacaaccaacaucaugauuacuaccauaaucauuguuaucauugugauccugcuaucccucauagcggucggccugcuuuuguauugcaaggcccgcugaggacuagucccuguucccagagcccacuuuuuuuucuuuuuuugaaauaaaauagccugucuuucagaucuaaaaaaaaaaaaaaaaaaaaaaaaaaaaaaaaaaaaaaaaaaaaaaaaaaaaaaaaaaaaaaaaugcaucccccccccccccccccccccccccccccccaaaggcucuuuucagagccaccagaauu

SEQ ID NO: 3614 - RNA, 1843 nt, Artificial Sequence
  mRNA product Design d-1 comprising derived and/or modified sequence from HRSV(A2)__F-del_DSCav1_mut3 (opt4)
gggagacccgugacccggaaguuguacggcuacgcgacuuucccucccacaaacccucgcgcccuuccuuuccuacuugggcccggcagaaagcuuaccauggagcugcugauccugaaggccaacgccaucaccaccauccugaccgccgugaccuucugcuucgccagcggccagaacaucaccgaggaguucuaccagagcaccugcagcgccgugagcaagggcuaccugggcgcccugagaaccggcugguacaccagcgugaucaccaucgagcugagcaacaucaaggagaucaagugcaacggcaccgacgccaaggugaagcugaucaagcaggagcuggacaaguacaagaacgccgugaccgaccugcagcugcugaugcagagcacccccgccaccggcagcggcagcgccaucugcagcggcguggccgugugcaaggugcugcaccuggagggcgaggugaacaagaucaagagcgcccugcugagcaccaacaaggccguggugagccugagcaacggcgugagcgugcugaccuucaaggugcuggaccugaagaacuacaucgacaagcagcugcugcccauccugaacaagcagagcugcagcauccccaacaucgagaccgugaucgaguuccagcagaagaacaacagacugcuggagaucaccagagaguucagcgugaacgccggcgugaccacccccgugagcaccuacaugcugaccaacagcgagcugcugagccugaucaacgacaugcccaucaccaacgaccagaagaagcugaugagcaacaacgugcagaucgugagacagcagagcuacagcaucaugugcaucaucaaggaggaggugcuggccuacguggugcagcugccccuguacggcgugaucgacacccccugcuggaagcugcacaccagcccccugugcaccaccaacaccaaggagggcagcaacaucugccugaccagaaccgacagaggcugguacugcgacaacgccggcagcgugagcuucuucccccaggccgagaccugcaaggugcagagcaacagaguguucugcgacaccaugaacagccugacccugcccagcgaggugaaccugugcaacguggacaucuucaaccccaaguacgacugcaagaucaugaccagcaagaccgacgugagcagcagcgugaucaccagccugggcgccaucgugagcugcuacggcaagaccaagugcaccgccagcaacaagaacagaggcaucaucaagaccuucagcaacggcugcgacuacgugagcaacaagggcguggacaccgugagcgugggcaacacccuguacugcgugaacaagcaggagggccagagccuguacgugaagggcgagcccaucaucaacuucuacgacccccugguguuccccagcgacgaguucgacgccagcaucagccaggugaacgagaagaucaaccagagccuggccuucaucagaaagagcgacgagcugcugcacaacgugaacgccggcaagagcaccaccaacaucaugaucaccaccaucaucaucgugaucaucgugauccugcugagccugaucgccgugggccugcugcuguacugcaaggccagaugaggacuagucccuguucccagagcccacuuuuuuuucuuuuuuugaaauaaaauagccugucuuucagaucuaaaaaaaaaaaaaaaaaaaaaaaaaaaaaaaaaaaaaaaaaaaaaaaaaaaaaaaaaaaaaaaaugcaucccccccccccccccccccccccccccccccaaaggcucuuuucagagccaccagaauu

SEQ ID NO: 3615 - RNA, 1843 nt, Artificial Sequence
  mRNA product Design d-1 comprising derived and/or modified sequence from HRSV(A2)__F-del_DSCav1_mut3 (opt5)
gggagacccgugacccggaaguuguacggcuacgcgacuuucccucccacaaacccucgcgcccuuccuuuccuacuugggcccggcagaaagcuuaccauggagcugcucauccugaaggccaacgcuauuaccacaauccuuacggccgugaccuucugcuuugcgagcggccagaauauuacagaagaguucuaccaauccaccuguucugcugucagcaaaggguaucugggagcccucagaacaggcugguacaccuccguuaucacaauugaacugucuaacaucaaggagaucaaaugcaaugggaccgacgccaaggugaaacuuauuaagcaggaacuggauaaguauaaaaacgcugugacggaccuccagcugcugaugcagagcacccccgccacaggauccggcucugcuaucuguagcggggucgccgugugcaagguucuccaccuggagggagaggugaauaaaauuaaguccgcgcuucugagcaccaacaaagccgucgugucucucuccaauggcguuagcgugcugacauuuaagguccuugaucugaagaacuacaucgacaaacaacuccugccuauucugaauaagcagucuuguuccaucccgaacauugaaaccgugaucgaguuccagcagaaaaauaaccggcuccuggaaaucacgcgcgaguuuagcgugaaugcuggcgucacaacccccguuucuacauauaugcuuaccaacuccgagcugcucagccugauuaaugauaugccuaucaccaacgaccaaaagaaacuuauguccaacaaugugcagauugugagacagcagucuuacagcaucaugugcauuaucaaggaagagguccuggccuaugugguucaacucccccuguacggggugaucgauacaccuuguuggaaacugcauacgagcccccucugcaccacaaacaccaaggaaggauccaauauuugucugacacggaccgaccgcggcugguacugcgauaacgcugggucugucuccuucuuuccucaggccgagacguguaaggugcagagcaauagaguuuucugcgacacaaugaacucucuuacccugccgagcgaagugaaucucugcaacgucgauaucuuuaaucccaaauaugacuguaagauuaugaccuccaaaacagaugugucuagcuccgucaucaccagccugggagcgauugugucuugcuacggcaagacaaaauguacggccuccaacaagaaucgggggaucaucaagaccuucagcaacggaugcgacuauguuucuaauaaaggcguggacacagucuccgugggcaacacccuuuacuguguuaauaagcaagaggggcagagccuguaugugaaaggagagccuauuaucaacuuuuacgauccccucgucuucccuuccgacgaauuugaugcuucuauuagccaggugaacgagaagaucaaucagucccuggccuucauucgcaaaucugacgaacugcuccacaacgugaaugcuggcaagagcacaaccaacaucaugauuacgaccaucaucauuguuaucauugucauccugcuuucccugauugccguggggcuccugcuguauugcaaggccagaugaggacuagucccuguucccagagcccacuuuuuuuucuuuuuuugaaauaaaauagccugucuuucagaucuaaaaaaaaaaaaaaaaaaaaaaaaaaaaaaaaaaaaaaaaaaaaaaaaaaaaaaaaaaaaaaaaugcaucccccccccccccccccccccccccccccccaaaggcucuuuucagagccaccagaauu

SEQ ID NO: 3616 - RNA, 1843 nt, Artificial Sequence
  mRNA product Design d-1 comprising derived and/or modified sequence from HRSV(A2)__F-del_DSCav1_mut3 (opt6)
gggagacccgugacccggaaguuguacggcuacgcgacuuucccucccacaaacccucgcgcccuuccuuuccuacuugggcccggcagaaagcuuaccauggaauuacuaauccugaaagcaaacgcaauuacuacaauacuaacagcaguaaccuuuugcuuugccucaggacaaaacauaacugaagaauuuuaccaaucaacuugcucagcagucucaaaaggcuaucuaggagcacuacgaacagguugguauacuucagucauaacaauagaauuaucaaacauaaaagaaauuaaauguaacggaacugacgcaaaaguaaaacucaucaaacaagaacucgauaaauacaaaaacgcuguaaccgacuuacaacuacuaaugcaaucaacuccagcaacaggcuccggauccgcaauaugcagugguguagcaguaugcaaaguccuacaccuagaaggagaaguaaauaagauaaaaucugcucuacuaucaacaaauaaagcaguugucucccuaucaaauggagucucaguacucaccuucaaaguauuagaccucaaaaacuacauagacaaacaacuauuaccaauacucaacaaacaauccugcuccaucccuaacauagaaaccguaaucgaauuucaacaaaaaaauaacagacucuuagaaauaacuagagaauuuucaguuaaugcaggcgugacaacaccaguaucaacauauaugcuaacaaacuccgaacuccuaucccuaauaaacgacaugccaaucacaaacgaccaaaaaaaacuaauguccaacaacguacaaaucguaagacaacaaucauacucuauaaugugcauaauaaaagaagaaguacuggccuacguaguacaauuaccacucuacggaguaauagacaccccaugcuggaaacuccauacaucaccccuaugcacaacaaacacaaaagaaggauccaacauaugucucacuagaacagacagaggcugguacugcgacaacgcuggauccgucucauucuucccccaagcagaaacauguaaaguacaaucuaauagaguauuuugugacacaaugaacagccucacacuaccauccgaagucaaccuauguaacguagauauauuuaaucccaaauacgacugcaaaauaaugacauccaaaacagauguaucaucauccguuaucaccucacuaggagccauaguuucaugcuacggaaaaacaaaaugcacugcaucuaacaaaaauagagguauaauaaaaacauuuuccaacggcugcgacuacgucucaaacaaaggcguagacaccguaucaguaggaaauacauuauauugcguaaauaaacaagaaggccaaucccuauacguaaaaggagaacccaucauaaacuucuaugacccacuuguuuuccccucagacgaauuugacgccucaauaucacaaguaaaugaaaaaauaaaccaaucucuugccuucauuagaaaaucagacgaauuacuacacaacgucaacgcaggaaaaucaacaacaaacaucaugauaacaacgauaauaauagucauaauaguaauacuacuaucauuaaucgcagucggacuccuauuauauugcaaagcuagauaaggacuagucccuguucccagagcccacuuuuuuuucuuuuuuugaaauaaaauagccugucuuucagaucuaaaaaaaaaaaaaaaaaaaaaaaaaaaaaaaaaaaaaaaaaaaaaaaaaaaaaaaaaaaaaaaaugcaucccccccccccccccccccccccccccccccaaaggcucuuuucagagccaccagaauu

SEQ ID NO: 3617 - RNA, 1843 nt, Artificial Sequence
  mRNA product Design d-1 comprising derived and/or modified sequence from HRSV(A2)__F-del_DSCav1_mut3 (opt11)
gggagacccgugacccggaaguuguacggcuacgcgacuuucccucccacaaacccucgcgcccuuccuuuccuacuugggcccggcagaaagcuuaccauggaacuacucauacuaaaagccaacgccauaaccaccauccucaccgcaguaacuuucugcuucgcuuccggccaaaacaucaccgaagaauuuuaccaaaguaccugcagcgcagucucaaaaggauaccuaggcgcccuacgcacaggcugguacaccuccgucauuaccaucgaacucuccaacaucaaagaaauuaaaugcaacgguacagacgcaaaagucaaacucaucaaacaagaacucgacaaauacaaaaacgcagucaccgaccuccaacuccucaugcaauccacccccgccacaggcucuggcuccgccaucugcucaggcguagcagucugcaaaguccugcaccucgaaggcgaagucaacaaaaucaagucagcccuccucuccaccaacaaggccgucguaucccucucaaacggaguuagcguccucaccuucaaaguccuagaccucaaaaacuacaucgauaaacaacuacuccccauccuaaacaaacaaucaugcuccaucccaaacaucgaaaccguaaucgaguuccaacaaaagaacaaccgccuccucgaaaucacacgugaguucuccguuaacgccggcgucaccacccccgucucuacauacaugcucaccaacuccgaacuccuuucccucaucaacgacaugccaaucaccaacgaccaaaagaaacucaugucaaacaacguacaaaucguccgacaacaaagcuacuccaucaugugcaucaucaaagaagaaguccuugcauacgucguucaacuaccccucuacggcguaaucgacacucccugcuggaaacuccacaccuccccgcucugcacaaccaacaccaaagaaggcagcaacaucugccucacccgaaccgaccgcggcugguacugcgauaacgccggauccgucuccuucuucccacaagcagaaacuugcaaaguccaauccaaccgcgucuucugcgacaccaugaacucccucacacuccccuccgaagucaaccugugcaacgucgacaucuucaacccaaaauacgacugcaaaaucaugaccucaaaaaccgacgucucaucuucugucaucaccucucucggcgcuaucgucuccugcuauggcaaaaccaaaugcaccgccuccaacaagaaccgcggcauuaucaagaccuucuccaacggcugcgacuacgucuccaauaagggcgucgacaccgucucugucggcaacacccuuuacugcguaaacaaacaagaaggucaaucucucuacgucaaaggagaacccaucaucaacuucuacgacccccuggucuuccccuccgacgaguucgaugcaucaaucucccaagucaacgaaaagaucaaccaaucucucgcuuucauccgcaaauccgacgaacuccuacacaacguaaacgccggcaaauccaccacaaacaucaugaucaccaccauuaucauagucaucaucgucauccuccucuccuuaaucgccguuggccuccuucucuacugcaaagcccgauaaggacuagucccuguucccagagcccacuuuuuuuucuuuuuuugaaauaaaauagccugucuuucagaucuaaaaaaaaaaaaaaaaaaaaaaaaaaaaaaaaaaaaaaaaaaaaaaaaaaaaaaaaaaaaaaaaugcaucccccccccccccccccccccccccccccccaaaggcucuuuucagagccaccagaauu

SEQ ID NO: 3618 - RNA, 1898 nt, Artificial Sequence
  mRNA product Design d-2 comprising derived and/or modified sequence from HRSV(A2)__F-del_DSCav1_mut3 (opt1)
gggagagcggcucggccauuuugucccagucaguccggaggcugcggcugcagaaguaccgccugcggaguaacugcaaagaagcuuaccauggagcugcucauccugaaggccaacgccaucaccaccauccugacggcggugaccuucugcuucgccagcggccagaacaucaccgaggaguucuaccaguccacgugcagcgccgucuccaagggguaccucggcgcccugcggaccggcugguacaccuccgugaucaccaucgagcugagcaacaucaaggagaucaagugcaacgggaccgacgccaaggugaagcucaucaagcaggagcuggacaaguacaagaacgcggucacggaccugcagcuccugaugcaguccaccccggcaaccggcuccggcuccgccaucugcagcggcgucgccgugugcaaggugcugcaccucgagggggaggucaacaagaucaagagcgcccugcuguccaccaacaaggccguggugagccucuccaacggcgucagcgugcugaccuucaaggugcuggaccucaagaacuacaucgacaagcagcugcugcccauccugaacaagcagagcugcuccauccccaacaucgagacggugaucgaguuccagcagaagaacaaccggcuccuggagaucacccgcgaguucagcgugaacgccggggucaccacccccguguccacguacaugcugaccaacagcgagcuccugucccugaucaacgacaugccgaucaccaacgaccagaagaagcucaugagcaacaacgugcagaucguccggcagcaguccuacagcaucaugugcaucaucaaggaggaggugcuggcguacgugguccagcugccccucuacggcgugaucgacacccccugcuggaagcugcacacgagcccccugugcaccaccaacaccaaggagggguccaacaucugccucacgcgcaccgaccggggcugguacugcgacaacgccggcagcgucuccuucuucccgcaggccgagaccugcaaggugcagagcaaccgcguguucugcgacaccaugaacucccugacgcugcccagcgagguaaaccucugcaacgucgacaucuucaaccccaaguacgacugcaagaucaugaccuccaagaccgacgugagcuccagcgugaucaccucccugggggccaucgucagcugcuacggcaagacgaagugcaccgccagcaacaagaaccgggggaucaucaagaccuucuccaacggcugcgacuacgugagcaacaagggcguggacaccguguccgucgggaacacccuguacugcgugaacaagcaggagggccagagccucuacgugaagggggagcccaucaucaacuucuacgacccgcuggucuuccccuccgacgaguucgacgcgagcaucucccaggugaacgagaagaucaaccagagccuggccuucauccgcaaguccgacgagcugcuccacaacgugaacgccggcaagagcacgaccaacaucaugaucaccaccaucaucaucgucaucaucgugauccugcugucccucaucgccguggggcugcugcucuacugcaaggcccggugaggacuaguaauaaggaaacuguaugaaugucugugggcaggaagugaagagauccuucuguaaagguuuuuggaauuaugucugcugaauaauaaacuuuuuugaaauaauaaaucugguagaaaaaugagaucuaaaaaaaaaaaaaaaaaaaaaaaaaaaaaaaaaaaaaaaaaaaaaaaaaaaaaaaaaaaaaaaaugcaucccccccccccccccccccccccccccccccaaaggcucuuuucagagccaccagaauu

SEQ ID NO: 3619 - RNA, 1898 nt, Artificial Sequence
  mRNA product Design d-2 comprising derived and/or modified sequence from HRSV(A2)__F-del_DSCav1_mut3 (opt1)
gggagagcggcucggccauuuugucccagucaguccggaggcugcggcugcagaaguaccgccugcggaguaacugcaaagaagcuuaccauggagcugcucauccugaaggccaacgccaucaccaccauccugacggcggugaccuucugcuucgccagcggccagaacaucaccgaggaguucuaccaguccacgugcagcgccgucuccaagggguaccucggcgcccugcgcaccgggugguacaccagcgugaucaccaucgagcuguccaacaucaaggagaucaagugcaacggcaccgacgccaaggugaagcucaucaagcaggagcuggacaaguacaagaacgcggucacggaccugcagcuccugaugcagagcacccccgccaccggguccggcagcgccaucugcuccggcguggccgugugcaagguccugcaccucgagggggaggugaacaagaucaagagcgcgcugcuguccaccaacaaggccguggucagccucuccaacggcgugagcgugcugacguucaagguccuggaccucaagaacuacaucgacaagcagcugcugccgauccucaacaagcaguccugcagcauccccaacaucgagaccgugaucgaguuccagcagaagaacaaccggcugcuggagaucacccgcgaguucuccgugaacgccggggucaccacgcccgugagcaccuacaugcucaccaacuccgagcugcugagccucaucaacgacaugcccaucaccaacgaccagaagaagcugaugagcaacaacgugcagaucguccggcagcaguccuacagcaucaugugcaucaucaaggaggaggugcuggccuacgugguccagcucccgcuguacggcgugaucgacacgcccugcuggaagcugcacaccagcccccucugcaccaccaacacgaaggagggguccaacaucugccugacccgcaccgaccggggcugguacugcgacaacgccggcuccgugagcuucuucccccaggcggagaccugcaagguccaguccaaccgcguguucugcgacacgaugaacagccugacccucccguccgaggucaaccugugcaacguggacaucuucaaccccaaguacgacugcaagaucaugaccagcaagaccgacguguccagcuccgucaucacgagccugggggccaucguguccugcuacggcaagaccaagugcaccgccagcaacaagaaccgggggaucaucaagaccuucuccaacggcugcgacuacgugagcaacaagggcgucgacacgguguccguggggaacacccucuacugcgucaacaagcaggagggccagagccuguacgugaagggggagcccaucaucaacuucuacgacccccugguguucccgagcgacgaguucgacgccuccaucagccaggucaacgagaagaucaaccagucccucgccuucauccgcaagagcgacgagcugcugcacaacgugaacgcgggcaaguccaccaccaacaucaugaucaccacgaucaucaucgugaucaucgucauccuccugagccugaucgccguggggcuccugcuguacugcaaggcccggugaggacuaguaauaaggaaacuguaugaaugucugugggcaggaagugaagagauccuucuguaaagguuuuuggaauuaugucugcugaauaauaaacuuuuuugaaauaauaaaucugguagaaaaaugagaucuaaaaaaaaaaaaaaaaaaaaaaaaaaaaaaaaaaaaaaaaaaaaaaaaaaaaaaaaaaaaaaaaugcaucccccccccccccccccccccccccccccccaaaggcucuuuucagagccaccagaauu

SEQ ID NO: 3620 - RNA, 1898 nt, Artificial Sequence
  mRNA product Design d-2 comprising derived and/or modified sequence from HRSV(A2)__F-del_DSCav1_mut3 (opt2)
gggagagcggcucggccauuuugucccagucaguccggaggcugcggcugcagaaguaccgccugcggaguaacugcaaagaagcuuaccauggagcuccucauccucaaggccaacgccaucaccaccauccucaccgccgucaccuucugcuucgccuccggccagaacaucaccgaggaguucuaccaguccaccugcuccgccgucuccaagggcuaccucggcgcccuccgcaccggcugguacaccuccgucaucaccaucgagcucuccaacaucaaggagaucaagugcaacggcaccgacgccaaggucaagcucaucaagcaggagcucgacaaguacaagaacgccgucaccgaccuccagcuccucaugcaguccacccccgccaccggcuccggcuccgccaucugcuccggcgucgccgucugcaagguccuccaccucgagggcgaggucaacaagaucaaguccgcccuccucuccaccaacaaggccgucgucucccucuccaacggcgucuccguccucaccuucaagguccucgaccucaagaacuacaucgacaagcagcuccuccccauccucaacaagcaguccugcuccauccccaacaucgagaccgucaucgaguuccagcagaagaacaaccgccuccucgagaucacccgcgaguucuccgucaacgccggcgucaccacccccgucuccaccuacaugcucaccaacuccgagcuccucucccucaucaacgacaugcccaucaccaacgaccagaagaagcucauguccaacaacguccagaucguccgccagcaguccuacuccaucaugugcaucaucaaggaggagguccucgccuacgucguccagcucccccucuacggcgucaucgacacccccugcuggaagcuccacaccuccccccucugcaccaccaacaccaaggagggcuccaacaucugccucacccgcaccgaccgcggcugguacugcgacaacgccggcuccgucuccuucuucccccaggccgagaccugcaagguccaguccaaccgcgucuucugcgacaccaugaacucccucacccuccccuccgaggucaaccucugcaacgucgacaucuucaaccccaaguacgacugcaagaucaugaccuccaagaccgacgucuccuccuccgucaucaccucccucggcgccaucgucuccugcuacggcaagaccaagugcaccgccuccaacaagaaccgcggcaucaucaagaccuucuccaacggcugcgacuacgucuccaacaagggcgucgacaccgucuccgucggcaacacccucuacugcgucaacaagcaggagggccagucccucuacgucaagggcgagcccaucaucaacuucuacgacccccucgucuuccccuccgacgaguucgacgccuccaucucccaggucaacgagaagaucaaccagucccucgccuucauccgcaaguccgacgagcuccuccacaacgucaacgccggcaaguccaccaccaacaucaugaucaccaccaucaucaucgucaucaucgucauccuccucucccucaucgccgucggccuccuccucuacugcaaggcccgcugaggacuaguaauaaggaaacuguaugaaugucugugggcaggaagugaagagauccuucuguaaagguuuuuggaauuaugucugcugaauaauaaacuuuuuugaaauaauaaaucugguagaaaaaugagaucuaaaaaaaaaaaaaaaaaaaaaaaaaaaaaaaaaaaaaaaaaaaaaaaaaaaaaaaaaaaaaaaaugcaucccccccccccccccccccccccccccccccaaaggcucuuuucagagccaccagaauu

SEQ ID NO: 3621 - RNA, 1898 nt, Artificial Sequence
  mRNA product Design d-2 comprising derived and/or modified sequence from HRSV(A2)__F-del_DSCav1_mut3 (opt3)
gggagagcggcucggccauuuugucccagucaguccggaggcugcggcugcagaaguaccgccugcggaguaacugcaaagaagcuuaccauggagcugcucauccuuaaggccaacgcuauuaccacaauacugacugcagugacguucugcuuugccagcggccagaauaucaccgaagaguucuaccaauccacauguucugcggucucaaaaggguauuugggagcuuuaagaacugguugguacaccaguguuauuacaaucgaacugagcaacauuaaggagaucaaaugcaauggcaccgacgccaaggugaaacuaauaaagcaggaacucgauaaguauaaaaacgcaguaacugaccugcagcuucugaugcaguccacacccgccaccgggucuggaucggcuaucuguucaggcguggcagucugcaagguguugcaccucgagggugagguuaauaaaauuaagagcgcccugcugaguacgaacaaagcuguggucucccucucuaauggggugagcguauuaacuuuuaagguucuggaucuuaagaacuacaucgacaaacaauugcugccuauucuaaauaagcaguccuguucaaucccaaacauagaaaccgugauugaguuccagcagaaaaauaacaggcuccuggaaaucacacgggaguuuagugucaaugccggagugacuaccccggugagcacauauaugcuuaccaacucugagcuguugucccucauuaaugauaugcccaucacgaacgaccaaaagaaacugaugucaaacaauguccagaucguucgccagcagagcuacaguauuaugugcauaaucaaggaagagguguuagcguauguagugcaacugccucucuacggcgucauugauacuccauguuggaaacuucauacaucuccccugugcaccacuaacacaaaggaaggcuccaauaucuguuugacccgaacggaccgugggugguacugcgauaacgcaggaagcgugucguucuuuccucaggccgagaccuguaagguucagucuaauagaguguucugcgacacaaugaacucccuaacucugccaucagaagucaaucucugcaacguggauauauuuaaucccaaauaugacuguaagauuaugaccaguaaaacagauguaagcuccucuguuaucacuagccugggugcuaucgugucaugcuacggcaagaccaaauguacagccaguaacaagaauagggggauuaucaagaccuucuccaacggaugcgacuaugucagcaauaaaggcguggacacugucucuguggguaacacgcuuuacuguguuaauaagcaagaggggcagucacuguaugugaaaggagagccuauuauaaacuuuuacgauccauugguauucccgagugacgaauuugaugcaagcaucucccaggucaacgagaagauuaaucagucucucgcuuucauccggaaaucggacgaacuguuacacaacgugaaugccggcaagagcacaaccaacaucaugauuacuaccauaaucauuguuaucauugugauccugcuaucccucauagcggucggccugcuuuuguauugcaaggcccgcugaggacuaguaauaaggaaacuguaugaaugucugugggcaggaagugaagagauccuucuguaaagguuuuuggaauuaugucugcugaauaauaaacuuuuuugaaauaauaaaucugguagaaaaaugagaucuaaaaaaaaaaaaaaaaaaaaaaaaaaaaaaaaaaaaaaaaaaaaaaaaaaaaaaaaaaaaaaaaugcaucccccccccccccccccccccccccccccccaaaggcucuuuucagagccaccagaauu

SEQ ID NO: 3622 - RNA, 1898 nt, Artificial Sequence
  mRNA product Design d-2 comprising derived and/or modified sequence from HRSV(A2)__F-del_DSCav1_mut3 (opt4)
gggagagcggcucggccauuuugucccagucaguccggaggcugcggcugcagaaguaccgccugcggaguaacugcaaagaagcuuaccauggagcugcugauccugaaggccaacgccaucaccaccauccugaccgccgugaccuucugcuucgccagcggccagaacaucaccgaggaguucuaccagagcaccugcagcgccgugagcaagggcuaccugggcgcccugagaaccggcugguacaccagcgugaucaccaucgagcugagcaacaucaaggagaucaagugcaacggcaccgacgccaaggugaagcugaucaagcaggagcuggacaaguacaagaacgccgugaccgaccugcagcugcugaugcagagcacccccgccaccggcagcggcagcgccaucugcagcggcguggccgugugcaaggugcugcaccuggagggcgaggugaacaagaucaagagcgcccugcugagcaccaacaaggccguggugagccugagcaacggcgugagcgugcugaccuucaaggugcuggaccugaagaacuacaucgacaagcagcugcugcccauccugaacaagcagagcugcagcauccccaacaucgagaccgugaucgaguuccagcagaagaacaacagacugcuggagaucaccagagaguucagcgugaacgccggcgugaccacccccgugagcaccuacaugcugaccaacagcgagcugcugagccugaucaacgacaugcccaucaccaacgaccagaagaagcugaugagcaacaacgugcagaucgugagacagcagagcuacagcaucaugugcaucaucaaggaggaggugcuggccuacguggugcagcugccccuguacggcgugaucgacacccccugcuggaagcugcacaccagcccccugugcaccaccaacaccaaggagggcagcaacaucugccugaccagaaccgacagaggcugguacugcgacaacgccggcagcgugagcuucuucccccaggccgagaccugcaaggugcagagcaacagaguguucugcgacaccaugaacagccugacccugcccagcgaggugaaccugugcaacguggacaucuucaaccccaaguacgacugcaagaucaugaccagcaagaccgacgugagcagcagcgugaucaccagccugggcgccaucgugagcugcuacggcaagaccaagugcaccgccagcaacaagaacagaggcaucaucaagaccuucagcaacggcugcgacuacgugagcaacaagggcguggacaccgugagcgugggcaacacccuguacugcgugaacaagcaggagggccagagccuguacgugaagggcgagcccaucaucaacuucuacgacccccugguguuccccagcgacgaguucgacgccagcaucagccaggugaacgagaagaucaaccagagccuggccuucaucagaaagagcgacgagcugcugcacaacgugaacgccggcaagagcaccaccaacaucaugaucaccaccaucaucaucgugaucaucgugauccugcugagccugaucgccgugggccugcugcuguacugcaaggccagaugaggacuaguaauaaggaaacuguaugaaugucugugggcaggaagugaagagauccuucuguaaagguuuuuggaauuaugucugcugaauaauaaacuuuuuugaaauaauaaaucugguagaaaaaugagaucuaaaaaaaaaaaaaaaaaaaaaaaaaaaaaaaaaaaaaaaaaaaaaaaaaaaaaaaaaaaaaaaaugcaucccccccccccccccccccccccccccccccaaaggcucuuuucagagccaccagaauu

SEQ ID NO: 3623 - RNA, 1898 nt, Artificial Sequence
  mRNA product Design d-2 comprising derived and/or modified sequence from HRSV(A2)__F-del_DSCav1_mut3 (opt5)
gggagagcggcucggccauuuugucccagucaguccggaggcugcggcugcagaaguaccgccugcggaguaacugcaaagaagcuuaccauggagcugcucauccugaaggccaacgcuauuaccacaauccuuacggccgugaccuucugcuuugcgagcggccagaauauuacagaagaguucuaccaauccaccuguucugcugucagcaaaggguaucugggagcccucagaacaggcugguacaccuccguuaucacaauugaacugucuaacaucaaggagaucaaaugcaaugggaccgacgccaaggugaaacuuauuaagcaggaacuggauaaguauaaaaacgcugugacggaccuccagcugcugaugcagagcacccccgccacaggauccggcucugcuaucuguagcggggucgccgugugcaagguucuccaccuggagggagaggugaauaaaauuaaguccgcgcuucugagcaccaacaaagccgucgugucucucuccaauggcguuagcgugcugacauuuaagguccuugaucugaagaacuacaucgacaaacaacuccugccuauucugaauaagcagucuuguuccaucccgaacauugaaaccgugaucgaguuccagcagaaaaauaaccggcuccuggaaaucacgcgcgaguuuagcgugaaugcuggcgucacaacccccguuucuacauauaugcuuaccaacuccgagcugcucagccugauuaaugauaugccuaucaccaacgaccaaaagaaacuuauguccaacaaugugcagauugugagacagcagucuuacagcaucaugugcauuaucaaggaagagguccuggccuaugugguucaacucccccuguacggggugaucgauacaccuuguuggaaacugcauacgagcccccucugcaccacaaacaccaaggaaggauccaauauuugucugacacggaccgaccgcggcugguacugcgauaacgcugggucugucuccuucuuuccucaggccgagacguguaaggugcagagcaauagaguuuucugcgacacaaugaacucucuuacccugccgagcgaagugaaucucugcaacgucgauaucuuuaaucccaaauaugacuguaagauuaugaccuccaaaacagaugugucuagcuccgucaucaccagccugggagcgauugugucuugcuacggcaagacaaaauguacggccuccaacaagaaucgggggaucaucaagaccuucagcaacggaugcgacuauguuucuaauaaaggcguggacacagucuccgugggcaacacccuuuacuguguuaauaagcaagaggggcagagccuguaugugaaaggagagccuauuaucaacuuuuacgauccccucgucuucccuuccgacgaauuugaugcuucuauuagccaggugaacgagaagaucaaucagucccuggccuucauucgcaaaucugacgaacugcuccacaacgugaaugcuggcaagagcacaaccaacaucaugauuacgaccaucaucauuguuaucauugucauccugcuuucccugauugccguggggcuccugcuguauugcaaggccagaugaggacuaguaauaaggaaacuguaugaaugucugugggcaggaagugaagagauccuucuguaaagguuuuuggaauuaugucugcugaauaauaaacuuuuuugaaauaauaaaucugguagaaaaaugagaucuaaaaaaaaaaaaaaaaaaaaaaaaaaaaaaaaaaaaaaaaaaaaaaaaaaaaaaaaaaaaaaaaugcaucccccccccccccccccccccccccccccccaaaggcucuuuucagagccaccagaauu

SEQ ID NO: 3624 - RNA, 1898 nt, Artificial Sequence
  mRNA product Design d-2 comprising derived and/or modified sequence from HRSV(A2)__F-del_DSCav1_mut3 (opt6)
gggagagcggcucggccauuuugucccagucaguccggaggcugcggcugcagaaguaccgccugcggaguaacugcaaagaagcuuaccauggaauuacuaauccugaaagcaaacgcaauuacuacaauacuaacagcaguaaccuuuugcuuugccucaggacaaaacauaacugaagaauuuuaccaaucaacuugcucagcagucucaaaaggcuaucuaggagcacuacgaacagguugguauacuucagucauaacaauagaauuaucaaacauaaaagaaauuaaauguaacggaacugacgcaaaaguaaaacucaucaaacaagaacucgauaaauacaaaaacgcuguaaccgacuuacaacuacuaaugcaaucaacuccagcaacaggcuccggauccgcaauaugcagugguguagcaguaugcaaaguccuacaccuagaaggagaaguaaauaagauaaaaucugcucuacuaucaacaaauaaagcaguugucucccuaucaaauggagucucaguacucaccuucaaaguauuagaccucaaaaacuacauagacaaacaacuauuaccaauacucaacaaacaauccugcuccaucccuaacauagaaaccguaaucgaauuucaacaaaaaaauaacagacucuuagaaauaacuagagaauuuucaguuaaugcaggcgugacaacaccaguaucaacauauaugcuaacaaacuccgaacuccuaucccuaauaaacgacaugccaaucacaaacgaccaaaaaaaacuaauguccaacaacguacaaaucguaagacaacaaucauacucuauaaugugcauaauaaaagaagaaguacuggccuacguaguacaauuaccacucuacggaguaauagacaccccaugcuggaaacuccauacaucaccccuaugcacaacaaacacaaaagaaggauccaacauaugucucacuagaacagacagaggcugguacugcgacaacgcuggauccgucucauucuucccccaagcagaaacauguaaaguacaaucuaauagaguauuuugugacacaaugaacagccucacacuaccauccgaagucaaccuauguaacguagauauauuuaaucccaaauacgacugcaaaauaaugacauccaaaacagauguaucaucauccguuaucaccucacuaggagccauaguuucaugcuacggaaaaacaaaaugcacugcaucuaacaaaaauagagguauaauaaaaacauuuuccaacggcugcgacuacgucucaaacaaaggcguagacaccguaucaguaggaaauacauuauauugcguaaauaaacaagaaggccaaucccuauacguaaaaggagaacccaucauaaacuucuaugacccacuuguuuuccccucagacgaauuugacgccucaauaucacaaguaaaugaaaaaauaaaccaaucucuugccuucauuagaaaaucagacgaauuacuacacaacgucaacgcaggaaaaucaacaacaaacaucaugauaacaacgauaauaauagucauaauaguaauacuacuaucauuaaucgcagucggacuccuauuauauugcaaagcuagauaaggacuaguaauaaggaaacuguaugaaugucugugggcaggaagugaagagauccuucuguaaagguuuuuggaauuaugucugcugaauaauaaacuuuuuugaaauaauaaaucugguagaaaaaugagaucuaaaaaaaaaaaaaaaaaaaaaaaaaaaaaaaaaaaaaaaaaaaaaaaaaaaaaaaaaaaaaaaaugcaucccccccccccccccccccccccccccccccaaaggcucuuuucagagccaccagaauu

SEQ ID NO: 3625 - RNA, 1898 nt, Artificial Sequence
  mRNA product Design d-2 comprising derived and/or modified sequence from HRSV(A2)__F-del_DSCav1_mut3 (opt11)
gggagagcggcucggccauuuugucccagucaguccggaggcugcggcugcagaaguaccgccugcggaguaacugcaaagaagcuuaccauggaacuacucauacuaaaagccaacgccauaaccaccauccucaccgcaguaacuuucugcuucgcuuccggccaaaacaucaccgaagaauuuuaccaaaguaccugcagcgcagucucaaaaggauaccuaggcgcccuacgcacaggcugguacaccuccgucauuaccaucgaacucuccaacaucaaagaaauuaaaugcaacgguacagacgcaaaagucaaacucaucaaacaagaacucgacaaauacaaaaacgcagucaccgaccuccaacuccucaugcaauccacccccgccacaggcucuggcuccgccaucugcucaggcguagcagucugcaaaguccugcaccucgaaggcgaagucaacaaaaucaagucagcccuccucuccaccaacaaggccgucguaucccucucaaacggaguuagcguccucaccuucaaaguccuagaccucaaaaacuacaucgauaaacaacuacuccccauccuaaacaaacaaucaugcuccaucccaaacaucgaaaccguaaucgaguuccaacaaaagaacaaccgccuccucgaaaucacacgugaguucuccguuaacgccggcgucaccacccccgucucuacauacaugcucaccaacuccgaacuccuuucccucaucaacgacaugccaaucaccaacgaccaaaagaaacucaugucaaacaacguacaaaucguccgacaacaaagcuacuccaucaugugcaucaucaaagaagaaguccuugcauacgucguucaacuaccccucuacggcguaaucgacacucccugcuggaaacuccacaccuccccgcucugcacaaccaacaccaaagaaggcagcaacaucugccucacccgaaccgaccgcggcugguacugcgauaacgccggauccgucuccuucuucccacaagcagaaacuugcaaaguccaauccaaccgcgucuucugcgacaccaugaacucccucacacuccccuccgaagucaaccugugcaacgucgacaucuucaacccaaaauacgacugcaaaaucaugaccucaaaaaccgacgucucaucuucugucaucaccucucucggcgcuaucgucuccugcuauggcaaaaccaaaugcaccgccuccaacaagaaccgcggcauuaucaagaccuucuccaacggcugcgacuacgucuccaauaagggcgucgacaccgucucugucggcaacacccuuuacugcguaaacaaacaagaaggucaaucucucuacgucaaaggagaacccaucaucaacuucuacgacccccuggucuuccccuccgacgaguucgaugcaucaaucucccaagucaacgaaaagaucaaccaaucucucgcuuucauccgcaaauccgacgaacuccuacacaacguaaacgccggcaaauccaccacaaacaucaugaucaccaccauuaucauagucaucaucgucauccuccucuccuuaaucgccguuggccuccuucucuacugcaaagcccgauaaggacuaguaauaaggaaacuguaugaaugucugugggcaggaagugaagagauccuucuguaaagguuuuuggaauuaugucugcugaauaauaaacuuuuuugaaauaauaaaucugguagaaaaaugagaucuaaaaaaaaaaaaaaaaaaaaaaaaaaaaaaaaaaaaaaaaaaaaaaaaaaaaaaaaaaaaaaaaugcaucccccccccccccccccccccccccccccccaaaggcucuuuucagagccaccagaauu

SEQ ID NO: 3626 - RNA, 2214 nt, Artificial Sequence
  mRNA product Design d-3 comprising derived and/or modified sequence from HRSV(A2)__F-del_DSCav1_mut3 (opt1)
gggagagggcgcuuggcuugcaaggacccugagcugcggcauugaagcacacccaacccaacucgacugaagucagccucacugaaccggaucugagaaucuucucucucugggcuugccagggcucuccgaaccuagcuagcauccucuucaauuccaacuagaaagcuuaccauggagcugcucauccugaaggccaacgccaucaccaccauccugacggcggugaccuucugcuucgccagcggccagaacaucaccgaggaguucuaccaguccacgugcagcgccgucuccaagggguaccucggcgcccugcggaccggcugguacaccuccgugaucaccaucgagcugagcaacaucaaggagaucaagugcaacgggaccgacgccaaggugaagcucaucaagcaggagcuggacaaguacaagaacgcggucacggaccugcagcuccugaugcaguccaccccggcaaccggcuccggcuccgccaucugcagcggcgucgccgugugcaaggugcugcaccucgagggggaggucaacaagaucaagagcgcccugcuguccaccaacaaggccguggugagccucuccaacggcgucagcgugcugaccuucaaggugcuggaccucaagaacuacaucgacaagcagcugcugcccauccugaacaagcagagcugcuccauccccaacaucgagacggugaucgaguuccagcagaagaacaaccggcuccuggagaucacccgcgaguucagcgugaacgccggggucaccacccccguguccacguacaugcugaccaacagcgagcuccugucccugaucaacgacaugccgaucaccaacgaccagaagaagcucaugagcaacaacgugcagaucguccggcagcaguccuacagcaucaugugcaucaucaaggaggaggugcuggcguacgugguccagcugccccucuacggcgugaucgacacccccugcuggaagcugcacacgagcccccugugcaccaccaacaccaaggagggguccaacaucugccucacgcgcaccgaccggggcugguacugcgacaacgccggcagcgucuccuucuucccgcaggccgagaccugcaaggugcagagcaaccgcguguucugcgacaccaugaacucccugacgcugcccagcgagguaaaccucugcaacgucgacaucuucaaccccaaguacgacugcaagaucaugaccuccaagaccgacgugagcuccagcgugaucaccucccugggggccaucgucagcugcuacggcaagacgaagugcaccgccagcaacaagaaccgggggaucaucaagaccuucuccaacggcugcgacuacgugagcaacaagggcguggacaccguguccgucgggaacacccuguacugcgugaacaagcaggagggccagagccucuacgugaagggggagcccaucaucaacuucuacgacccgcuggucuuccccuccgacgaguucgacgcgagcaucucccaggugaacgagaagaucaaccagagccuggccuucauccgcaaguccgacgagcugcuccacaacgugaacgccggcaagagcacgaccaacaucaugaucaccaccaucaucaucgucaucaucgugauccugcugucccucaucgccguggggcugcugcucuacugcaaggcccggugaggacuagugaagggaacacccaaauuuaauucagccuuaagcacaauuaauuaagagugaaacguaauuguacaagcaguuggucacccaccauagggcaugaucaacaccgcaaccuuuccuuuuucccccagugauucugaaaaaccccucuucccuucagcuugcuuagauguuccaaauuuaguaagcuuaaggcggccuacagaagaaaaagaaaaaaaaggccacaaaaguucccucucacuuucaguaaauaaaauaaaagcagcaacagaaauaaagaaauaaaugaaauucaaaaugaaauaaauauuguguugugcagcauuaaaaaaucaauaaaaauuaaaaaugagcaagaucuaaaaaaaaaaaaaaaaaaaaaaaaaaaaaaaaaaaaaaaaaaaaaaaaaaaaaaaaaaaaaaaaugcaucccccccccccccccccccccccccccccccaaaggcucuuuucagagccaccagaauu

SEQ ID NO: 3627 - RNA, 2214 nt, Artificial Sequence
  mRNA product Design d-3 comprising derived and/or modified sequence from HRSV(A2)__F-del_DSCav1_mut3 (opt1)
gggagagggcgcuuggcuugcaaggacccugagcugcggcauugaagcacacccaacccaacucgacugaagucagccucacugaaccggaucugagaaucuucucucucugggcuugccagggcucuccgaaccuagcuagcauccucuucaauuccaacuagaaagcuuaccauggagcugcucauccugaaggccaacgccaucaccaccauccugacggcggugaccuucugcuucgccagcggccagaacaucaccgaggaguucuaccaguccacgugcagcgccgucuccaagggguaccucggcgcccugcgcaccgggugguacaccagcgugaucaccaucgagcuguccaacaucaaggagaucaagugcaacggcaccgacgccaaggugaagcucaucaagcaggagcuggacaaguacaagaacgcggucacggaccugcagcuccugaugcagagcacccccgccaccggguccggcagcgccaucugcuccggcguggccgugugcaagguccugcaccucgagggggaggugaacaagaucaagagcgcgcugcuguccaccaacaaggccguggucagccucuccaacggcgugagcgugcugacguucaagguccuggaccucaagaacuacaucgacaagcagcugcugccgauccucaacaagcaguccugcagcauccccaacaucgagaccgugaucgaguuccagcagaagaacaaccggcugcuggagaucacccgcgaguucuccgugaacgccggggucaccacgcccgugagcaccuacaugcucaccaacuccgagcugcugagccucaucaacgacaugcccaucaccaacgaccagaagaagcugaugagcaacaacgugcagaucguccggcagcaguccuacagcaucaugugcaucaucaaggaggaggugcuggccuacgugguccagcucccgcuguacggcgugaucgacacgcccugcuggaagcugcacaccagcccccucugcaccaccaacacgaaggagggguccaacaucugccugacccgcaccgaccggggcugguacugcgacaacgccggcuccgugagcuucuucccccaggcggagaccugcaagguccaguccaaccgcguguucugcgacacgaugaacagccugacccucccguccgaggucaaccugugcaacguggacaucuucaaccccaaguacgacugcaagaucaugaccagcaagaccgacguguccagcuccgucaucacgagccugggggccaucguguccugcuacggcaagaccaagugcaccgccagcaacaagaaccgggggaucaucaagaccuucuccaacggcugcgacuacgugagcaacaagggcgucgacacgguguccguggggaacacccucuacugcgucaacaagcaggagggccagagccuguacgugaagggggagcccaucaucaacuucuacgacccccugguguucccgagcgacgaguucgacgccuccaucagccaggucaacgagaagaucaaccagucccucgccuucauccgcaagagcgacgagcugcugcacaacgugaacgcgggcaaguccaccaccaacaucaugaucaccacgaucaucaucgugaucaucgucauccuccugagccugaucgccguggggcuccugcuguacugcaaggcccggugaggacuagugaagggaacacccaaauuuaauucagccuuaagcacaauuaauuaagagugaaacguaauuguacaagcaguuggucacccaccauagggcaugaucaacaccgcaaccuuuccuuuuucccccagugauucugaaaaaccccucuucccuucagcuugcuuagauguuccaaauuuaguaagcuuaaggcggccuacagaagaaaaagaaaaaaaaggccacaaaaguucccucucacuuucaguaaauaaaauaaaagcagcaacagaaauaaagaaauaaaugaaauucaaaaugaaauaaauauuguguugugcagcauuaaaaaaucaauaaaaauuaaaaaugagcaagaucuaaaaaaaaaaaaaaaaaaaaaaaaaaaaaaaaaaaaaaaaaaaaaaaaaaaaaaaaaaaaaaaaugcaucccccccccccccccccccccccccccccccaaaggcucuuuucagagccaccagaauu

SEQ ID NO: 3628 - RNA, 2214 nt, Artificial Sequence
  mRNA product Design d-3 comprising derived and/or modified sequence from HRSV(A2)__F-del_DSCav1_mut3 (opt2)
gggagagggcgcuuggcuugcaaggacccugagcugcggcauugaagcacacccaacccaacucgacugaagucagccucacugaaccggaucugagaaucuucucucucugggcuugccagggcucuccgaaccuagcuagcauccucuucaauuccaacuagaaagcuuaccauggagcuccucauccucaaggccaacgccaucaccaccauccucaccgccgucaccuucugcuucgccuccggccagaacaucaccgaggaguucuaccaguccaccugcuccgccgucuccaagggcuaccucggcgcccuccgcaccggcugguacaccuccgucaucaccaucgagcucuccaacaucaaggagaucaagugcaacggcaccgacgccaaggucaagcucaucaagcaggagcucgacaaguacaagaacgccgucaccgaccuccagcuccucaugcaguccacccccgccaccggcuccggcuccgccaucugcuccggcgucgccgucugcaagguccuccaccucgagggcgaggucaacaagaucaaguccgcccuccucuccaccaacaaggccgucgucucccucuccaacggcgucuccguccucaccuucaagguccucgaccucaagaacuacaucgacaagcagcuccuccccauccucaacaagcaguccugcuccauccccaacaucgagaccgucaucgaguuccagcagaagaacaaccgccuccucgagaucacccgcgaguucuccgucaacgccggcgucaccacccccgucuccaccuacaugcucaccaacuccgagcuccucucccucaucaacgacaugcccaucaccaacgaccagaagaagcucauguccaacaacguccagaucguccgccagcaguccuacuccaucaugugcaucaucaaggaggagguccucgccuacgucguccagcucccccucuacggcgucaucgacacccccugcuggaagcuccacaccuccccccucugcaccaccaacaccaaggagggcuccaacaucugccucacccgcaccgaccgcggcugguacugcgacaacgccggcuccgucuccuucuucccccaggccgagaccugcaagguccaguccaaccgcgucuucugcgacaccaugaacucccucacccuccccuccgaggucaaccucugcaacgucgacaucuucaaccccaaguacgacugcaagaucaugaccuccaagaccgacgucuccuccuccgucaucaccucccucggcgccaucgucuccugcuacggcaagaccaagugcaccgccuccaacaagaaccgcggcaucaucaagaccuucuccaacggcugcgacuacgucuccaacaagggcgucgacaccgucuccgucggcaacacccucuacugcgucaacaagcaggagggccagucccucuacgucaagggcgagcccaucaucaacuucuacgacccccucgucuuccccuccgacgaguucgacgccuccaucucccaggucaacgagaagaucaaccagucccucgccuucauccgcaaguccgacgagcuccuccacaacgucaacgccggcaaguccaccaccaacaucaugaucaccaccaucaucaucgucaucaucgucauccuccucucccucaucgccgucggccuccuccucuacugcaaggcccgcugaggacuagugaagggaacacccaaauuuaauucagccuuaagcacaauuaauuaagagugaaacguaauuguacaagcaguuggucacccaccauagggcaugaucaacaccgcaaccuuuccuuuuucccccagugauucugaaaaaccccucuucccuucagcuugcuuagauguuccaaauuuaguaagcuuaaggcggccuacagaagaaaaagaaaaaaaaggccacaaaaguucccucucacuuucaguaaauaaaauaaaagcagcaacagaaauaaagaaauaaaugaaauucaaaaugaaauaaauauuguguugugcagcauuaaaaaaucaauaaaaauuaaaaaugagcaagaucuaaaaaaaaaaaaaaaaaaaaaaaaaaaaaaaaaaaaaaaaaaaaaaaaaaaaaaaaaaaaaaaaugcaucccccccccccccccccccccccccccccccaaaggcucuuuucagagccaccagaauu

SEQ ID NO: 3629 - RNA, 2214 nt, Artificial Sequence
  mRNA product Design d-3 comprising derived and/or modified sequence from HRSV(A2)__F-del_DSCav1_mut3 (opt3)
gggagagggcgcuuggcuugcaaggacccugagcugcggcauugaagcacacccaacccaacucgacugaagucagccucacugaaccggaucugagaaucuucucucucugggcuugccagggcucuccgaaccuagcuagcauccucuucaauuccaacuagaaagcuuaccauggagcugcucauccuuaaggccaacgcuauuaccacaauacugacugcagugacguucugcuuugccagcggccagaauaucaccgaagaguucuaccaauccacauguucugcggucucaaaaggguauuugggagcuuuaagaacugguugguacaccaguguuauuacaaucgaacugagcaacauuaaggagaucaaaugcaauggcaccgacgccaaggugaaacuaauaaagcaggaacucgauaaguauaaaaacgcaguaacugaccugcagcuucugaugcaguccacacccgccaccgggucuggaucggcuaucuguucaggcguggcagucugcaagguguugcaccucgagggugagguuaauaaaauuaagagcgcccugcugaguacgaacaaagcuguggucucccucucuaauggggugagcguauuaacuuuuaagguucuggaucuuaagaacuacaucgacaaacaauugcugccuauucuaaauaagcaguccuguucaaucccaaacauagaaaccgugauugaguuccagcagaaaaauaacaggcuccuggaaaucacacgggaguuuagugucaaugccggagugacuaccccggugagcacauauaugcuuaccaacucugagcuguugucccucauuaaugauaugcccaucacgaacgaccaaaagaaacugaugucaaacaauguccagaucguucgccagcagagcuacaguauuaugugcauaaucaaggaagagguguuagcguauguagugcaacugccucucuacggcgucauugauacuccauguuggaaacuucauacaucuccccugugcaccacuaacacaaaggaaggcuccaauaucuguuugacccgaacggaccgugggugguacugcgauaacgcaggaagcgugucguucuuuccucaggccgagaccuguaagguucagucuaauagaguguucugcgacacaaugaacucccuaacucugccaucagaagucaaucucugcaacguggauauauuuaaucccaaauaugacuguaagauuaugaccaguaaaacagauguaagcuccucuguuaucacuagccugggugcuaucgugucaugcuacggcaagaccaaauguacagccaguaacaagaauagggggauuaucaagaccuucuccaacggaugcgacuaugucagcaauaaaggcguggacacugucucuguggguaacacgcuuuacuguguuaauaagcaagaggggcagucacuguaugugaaaggagagccuauuauaaacuuuuacgauccauugguauucccgagugacgaauuugaugcaagcaucucccaggucaacgagaagauuaaucagucucucgcuuucauccggaaaucggacgaacuguuacacaacgugaaugccggcaagagcacaaccaacaucaugauuacuaccauaaucauuguuaucauugugauccugcuaucccucauagcggucggccugcuuuuguauugcaaggcccgcugaggacuagugaagggaacacccaaauuuaauucagccuuaagcacaauuaauuaagagugaaacguaauuguacaagcaguuggucacccaccauagggcaugaucaacaccgcaaccuuuccuuuuucccccagugauucugaaaaaccccucuucccuucagcuugcuuagauguuccaaauuuaguaagcuuaaggcggccuacagaagaaaaagaaaaaaaaggccacaaaaguucccucucacuuucaguaaauaaaauaaaagcagcaacagaaauaaagaaauaaaugaaauucaaaaugaaauaaauauuguguugugcagcauuaaaaaaucaauaaaaauuaaaaaugagcaagaucuaaaaaaaaaaaaaaaaaaaaaaaaaaaaaaaaaaaaaaaaaaaaaaaaaaaaaaaaaaaaaaaaugcaucccccccccccccccccccccccccccccccaaaggcucuuuucagagccaccagaauu

SEQ ID NO: 3630 - RNA, 2214 nt, Artificial Sequence
  mRNA product Design d-3 comprising derived and/or modified sequence from HRSV(A2)__F-del_DSCav1_mut3 (opt4)
gggagagggcgcuuggcuugcaaggacccugagcugcggcauugaagcacacccaacccaacucgacugaagucagccucacugaaccggaucugagaaucuucucucucugggcuugccagggcucuccgaaccuagcuagcauccucuucaauuccaacuagaaagcuuaccauggagcugcugauccugaaggccaacgccaucaccaccauccugaccgccgugaccuucugcuucgccagcggccagaacaucaccgaggaguucuaccagagcaccugcagcgccgugagcaagggcuaccugggcgcccugagaaccggcugguacaccagcgugaucaccaucgagcugagcaacaucaaggagaucaagugcaacggcaccgacgccaaggugaagcugaucaagcaggagcuggacaaguacaagaacgccgugaccgaccugcagcugcugaugcagagcacccccgccaccggcagcggcagcgccaucugcagcggcguggccgugugcaaggugcugcaccuggagggcgaggugaacaagaucaagagcgcccugcugagcaccaacaaggccguggugagccugagcaacggcgugagcgugcugaccuucaaggugcuggaccugaagaacuacaucgacaagcagcugcugcccauccugaacaagcagagcugcagcauccccaacaucgagaccgugaucgaguuccagcagaagaacaacagacugcuggagaucaccagagaguucagcgugaacgccggcgugaccacccccgugagcaccuacaugcugaccaacagcgagcugcugagccugaucaacgacaugcccaucaccaacgaccagaagaagcugaugagcaacaacgugcagaucgugagacagcagagcuacagcaucaugugcaucaucaaggaggaggugcuggccuacguggugcagcugccccuguacggcgugaucgacacccccugcuggaagcugcacaccagcccccugugcaccaccaacaccaaggagggcagcaacaucugccugaccagaaccgacagaggcugguacugcgacaacgccggcagcgugagcuucuucccccaggccgagaccugcaaggugcagagcaacagaguguucugcgacaccaugaacagccugacccugcccagcgaggugaaccugugcaacguggacaucuucaaccccaaguacgacugcaagaucaugaccagcaagaccgacgugagcagcagcgugaucaccagccugggcgccaucgugagcugcuacggcaagaccaagugcaccgccagcaacaagaacagaggcaucaucaagaccuucagcaacggcugcgacuacgugagcaacaagggcguggacaccgugagcgugggcaacacccuguacugcgugaacaagcaggagggccagagccuguacgugaagggcgagcccaucaucaacuucuacgacccccugguguuccccagcgacgaguucgacgccagcaucagccaggugaacgagaagaucaaccagagccuggccuucaucagaaagagcgacgagcugcugcacaacgugaacgccggcaagagcaccaccaacaucaugaucaccaccaucaucaucgugaucaucgugauccugcugagccugaucgccgugggccugcugcuguacugcaaggccagaugaggacuagugaagggaacacccaaauuuaauucagccuuaagcacaauuaauuaagagugaaacguaauuguacaagcaguuggucacccaccauagggcaugaucaacaccgcaaccuuuccuuuuucccccagugauucugaaaaaccccucuucccuucagcuugcuuagauguuccaaauuuaguaagcuuaaggcggccuacagaagaaaaagaaaaaaaaggccacaaaaguucccucucacuuucaguaaauaaaauaaaagcagcaacagaaauaaagaaauaaaugaaauucaaaaugaaauaaauauuguguugugcagcauuaaaaaaucaauaaaaauuaaaaaugagcaagaucuaaaaaaaaaaaaaaaaaaaaaaaaaaaaaaaaaaaaaaaaaaaaaaaaaaaaaaaaaaaaaaaaugcaucccccccccccccccccccccccccccccccaaaggcucuuuucagagccaccagaauu

SEQ ID NO: 3631 - RNA, 2214 nt, Artificial Sequence
  mRNA product Design d-3 comprising derived and/or modified sequence from HRSV(A2)__F-del_DSCav1_mut3 (opt5)
gggagagggcgcuuggcuugcaaggacccugagcugcggcauugaagcacacccaacccaacucgacugaagucagccucacugaaccggaucugagaaucuucucucucugggcuugccagggcucuccgaaccuagcuagcauccucuucaauuccaacuagaaagcuuaccauggagcugcucauccugaaggccaacgcuauuaccacaauccuuacggccgugaccuucugcuuugcgagcggccagaauauuacagaagaguucuaccaauccaccuguucugcugucagcaaaggguaucugggagcccucagaacaggcugguacaccuccguuaucacaauugaacugucuaacaucaaggagaucaaaugcaaugggaccgacgccaaggugaaacuuauuaagcaggaacuggauaaguauaaaaacgcugugacggaccuccagcugcugaugcagagcacccccgccacaggauccggcucugcuaucuguagcggggucgccgugugcaagguucuccaccuggagggagaggugaauaaaauuaaguccgcgcuucugagcaccaacaaagccgucgugucucucuccaauggcguuagcgugcugacauuuaagguccuugaucugaagaacuacaucgacaaacaacuccugccuauucugaauaagcagucuuguuccaucccgaacauugaaaccgugaucgaguuccagcagaaaaauaaccggcuccuggaaaucacgcgcgaguuuagcgugaaugcuggcgucacaacccccguuucuacauauaugcuuaccaacuccgagcugcucagccugauuaaugauaugccuaucaccaacgaccaaaagaaacuuauguccaacaaugugcagauugugagacagcagucuuacagcaucaugugcauuaucaaggaagagguccuggccuaugugguucaacucccccuguacggggugaucgauacaccuuguuggaaacugcauacgagcccccucugcaccacaaacaccaaggaaggauccaauauuugucugacacggaccgaccgcggcugguacugcgauaacgcugggucugucuccuucuuuccucaggccgagacguguaaggugcagagcaauagaguuuucugcgacacaaugaacucucuuacccugccgagcgaagugaaucucugcaacgucgauaucuuuaaucccaaauaugacuguaagauuaugaccuccaaaacagaugugucuagcuccgucaucaccagccugggagcgauugugucuugcuacggcaagacaaaauguacggccuccaacaagaaucgggggaucaucaagaccuucagcaacggaugcgacuauguuucuaauaaaggcguggacacagucuccgugggcaacacccuuuacuguguuaauaagcaagaggggcagagccuguaugugaaaggagagccuauuaucaacuuuuacgauccccucgucuucccuuccgacgaauuugaugcuucuauuagccaggugaacgagaagaucaaucagucccuggccuucauucgcaaaucugacgaacugcuccacaacgugaaugcuggcaagagcacaaccaacaucaugauuacgaccaucaucauuguuaucauugucauccugcuuucccugauugccguggggcuccugcuguauugcaaggccagaugaggacuagugaagggaacacccaaauuuaauucagccuuaagcacaauuaauuaagagugaaacguaauuguacaagcaguuggucacccaccauagggcaugaucaacaccgcaaccuuuccuuuuucccccagugauucugaaaaaccccucuucccuucagcuugcuuagauguuccaaauuuaguaagcuuaaggcggccuacagaagaaaaagaaaaaaaaggccacaaaaguucccucucacuuucaguaaauaaaauaaaagcagcaacagaaauaaagaaauaaaugaaauucaaaaugaaauaaauauuguguugugcagcauuaaaaaaucaauaaaaauuaaaaaugagcaagaucuaaaaaaaaaaaaaaaaaaaaaaaaaaaaaaaaaaaaaaaaaaaaaaaaaaaaaaaaaaaaaaaaugcaucccccccccccccccccccccccccccccccaaaggcucuuuucagagccaccagaauu

SEQ ID NO: 3632 - RNA, 2214 nt, Artificial Sequence
  mRNA product Design d-3 comprising derived and/or modified sequence from HRSV(A2)__F-del_DSCav1_mut3 (opt6)
gggagagggcgcuuggcuugcaaggacccugagcugcggcauugaagcacacccaacccaacucgacugaagucagccucacugaaccggaucugagaaucuucucucucugggcuugccagggcucuccgaaccuagcuagcauccucuucaauuccaacuagaaagcuuaccauggaauuacuaauccugaaagcaaacgcaauuacuacaauacuaacagcaguaaccuuuugcuuugccucaggacaaaacauaacugaagaauuuuaccaaucaacuugcucagcagucucaaaaggcuaucuaggagcacuacgaacagguugguauacuucagucauaacaauagaauuaucaaacauaaaagaaauuaaauguaacggaacugacgcaaaaguaaaacucaucaaacaagaacucgauaaauacaaaaacgcuguaaccgacuuacaacuacuaaugcaaucaacuccagcaacaggcuccggauccgcaauaugcagugguguagcaguaugcaaaguccuacaccuagaaggagaaguaaauaagauaaaaucugcucuacuaucaacaaauaaagcaguugucucccuaucaaauggagucucaguacucaccuucaaaguauuagaccucaaaaacuacauagacaaacaacuauuaccaauacucaacaaacaauccugcuccaucccuaacauagaaaccguaaucgaauuucaacaaaaaaauaacagacucuuagaaauaacuagagaauuuucaguuaaugcaggcgugacaacaccaguaucaacauauaugcuaacaaacuccgaacuccuaucccuaauaaacgacaugccaaucacaaacgaccaaaaaaaacuaauguccaacaacguacaaaucguaagacaacaaucauacucuauaaugugcauaauaaaagaagaaguacuggccuacguaguacaauuaccacucuacggaguaauagacaccccaugcuggaaacuccauacaucaccccuaugcacaacaaacacaaaagaaggauccaacauaugucucacuagaacagacagaggcugguacugcgacaacgcuggauccgucucauucuucccccaagcagaaacauguaaaguacaaucuaauagaguauuuugugacacaaugaacagccucacacuaccauccgaagucaaccuauguaacguagauauauuuaaucccaaauacgacugcaaaauaaugacauccaaaacagauguaucaucauccguuaucaccucacuaggagccauaguuucaugcuacggaaaaacaaaaugcacugcaucuaacaaaaauagagguauaauaaaaacauuuuccaacggcugcgacuacgucucaaacaaaggcguagacaccguaucaguaggaaauacauuauauugcguaaauaaacaagaaggccaaucccuauacguaaaaggagaacccaucauaaacuucuaugacccacuuguuuuccccucagacgaauuugacgccucaauaucacaaguaaaugaaaaaauaaaccaaucucuugccuucauuagaaaaucagacgaauuacuacacaacgucaacgcaggaaaaucaacaacaaacaucaugauaacaacgauaauaauagucauaauaguaauacuacuaucauuaaucgcagucggacuccuauuauauugcaaagcuagauaaggacuagugaagggaacacccaaauuuaauucagccuuaagcacaauuaauuaagagugaaacguaauuguacaagcaguuggucacccaccauagggcaugaucaacaccgcaaccuuuccuuuuucccccagugauucugaaaaaccccucuucccuucagcuugcuuagauguuccaaauuuaguaagcuuaaggcggccuacagaagaaaaagaaaaaaaaggccacaaaaguucccucucacuuucaguaaauaaaauaaaagcagcaacagaaauaaagaaauaaaugaaauucaaaaugaaauaaauauuguguugugcagcauuaaaaaaucaauaaaaauuaaaaaugagcaagaucuaaaaaaaaaaaaaaaaaaaaaaaaaaaaaaaaaaaaaaaaaaaaaaaaaaaaaaaaaaaaaaaaugcaucccccccccccccccccccccccccccccccaaaggcucuuuucagagccaccagaauu

SEQ ID NO: 3633 - RNA, 2214 nt, Artificial Sequence
  mRNA product Design d-3 comprising derived and/or modified sequence from HRSV(A2)__F-del_DSCav1_mut3 (opt11)
gggagagggcgcuuggcuugcaaggacccugagcugcggcauugaagcacacccaacccaacucgacugaagucagccucacugaaccggaucugagaaucuucucucucugggcuugccagggcucuccgaaccuagcuagcauccucuucaauuccaacuagaaagcuuaccauggaacuacucauacuaaaagccaacgccauaaccaccauccucaccgcaguaacuuucugcuucgcuuccggccaaaacaucaccgaagaauuuuaccaaaguaccugcagcgcagucucaaaaggauaccuaggcgcccuacgcacaggcugguacaccuccgucauuaccaucgaacucuccaacaucaaagaaauuaaaugcaacgguacagacgcaaaagucaaacucaucaaacaagaacucgacaaauacaaaaacgcagucaccgaccuccaacuccucaugcaauccacccccgccacaggcucuggcuccgccaucugcucaggcguagcagucugcaaaguccugcaccucgaaggcgaagucaacaaaaucaagucagcccuccucuccaccaacaaggccgucguaucccucucaaacggaguuagcguccucaccuucaaaguccuagaccucaaaaacuacaucgauaaacaacuacuccccauccuaaacaaacaaucaugcuccaucccaaacaucgaaaccguaaucgaguuccaacaaaagaacaaccgccuccucgaaaucacacgugaguucuccguuaacgccggcgucaccacccccgucucuacauacaugcucaccaacuccgaacuccuuucccucaucaacgacaugccaaucaccaacgaccaaaagaaacucaugucaaacaacguacaaaucguccgacaacaaagcuacuccaucaugugcaucaucaaagaagaaguccuugcauacgucguucaacuaccccucuacggcguaaucgacacucccugcuggaaacuccacaccuccccgcucugcacaaccaacaccaaagaaggcagcaacaucugccucacccgaaccgaccgcggcugguacugcgauaacgccggauccgucuccuucuucccacaagcagaaacuugcaaaguccaauccaaccgcgucuucugcgacaccaugaacucccucacacuccccuccgaagucaaccugugcaacgucgacaucuucaacccaaaauacgacugcaaaaucaugaccucaaaaaccgacgucucaucuucugucaucaccucucucggcgcuaucgucuccugcuauggcaaaaccaaaugcaccgccuccaacaagaaccgcggcauuaucaagaccuucuccaacggcugcgacuacgucuccaauaagggcgucgacaccgucucugucggcaacacccuuuacugcguaaacaaacaagaaggucaaucucucuacgucaaaggagaacccaucaucaacuucuacgacccccuggucuuccccuccgacgaguucgaugcaucaaucucccaagucaacgaaaagaucaaccaaucucucgcuuucauccgcaaauccgacgaacuccuacacaacguaaacgccggcaaauccaccacaaacaucaugaucaccaccauuaucauagucaucaucgucauccuccucuccuuaaucgccguuggccuccuucucuacugcaaagcccgauaaggacuagugaagggaacacccaaauuuaauucagccuuaagcacaauuaauuaagagugaaacguaauuguacaagcaguuggucacccaccauagggcaugaucaacaccgcaaccuuuccuuuuucccccagugauucugaaaaaccccucuucccuucagcuugcuuagauguuccaaauuuaguaagcuuaaggcggccuacagaagaaaaagaaaaaaaaggccacaaaaguucccucucacuuucaguaaauaaaauaaaagcagcaacagaaauaaagaaauaaaugaaauucaaaaugaaauaaauauuguguugugcagcauuaaaaaaucaauaaaaauuaaaaaugagcaagaucuaaaaaaaaaaaaaaaaaaaaaaaaaaaaaaaaaaaaaaaaaaaaaaaaaaaaaaaaaaaaaaaaugcaucccccccccccccccccccccccccccccccaaaggcucuuuucagagccaccagaauu

SEQ ID NO: 3634 - RNA, 1897 nt, Artificial Sequence
  mRNA product Design d-4 comprising derived and/or modified sequence from HRSV(A2)__F-del_DSCav1_mut3 (opt1)
gggagagucccgcagucggcguccagcggcucugcuuguucgugugugugucguugcaggccuuauucaagcuuaccauggagcugcucauccugaaggccaacgccaucaccaccauccugacggcggugaccuucugcuucgccagcggccagaacaucaccgaggaguucuaccaguccacgugcagcgccgucuccaagggguaccucggcgcccugcggaccggcugguacaccuccgugaucaccaucgagcugagcaacaucaaggagaucaagugcaacgggaccgacgccaaggugaagcucaucaagcaggagcuggacaaguacaagaacgcggucacggaccugcagcuccugaugcaguccaccccggcaaccggcuccggcuccgccaucugcagcggcgucgccgugugcaaggugcugcaccucgagggggaggucaacaagaucaagagcgcccugcuguccaccaacaaggccguggugagccucuccaacggcgucagcgugcugaccuucaaggugcuggaccucaagaacuacaucgacaagcagcugcugcccauccugaacaagcagagcugcuccauccccaacaucgagacggugaucgaguuccagcagaagaacaaccggcuccuggagaucacccgcgaguucagcgugaacgccggggucaccacccccguguccacguacaugcugaccaacagcgagcuccugucccugaucaacgacaugccgaucaccaacgaccagaagaagcucaugagcaacaacgugcagaucguccggcagcaguccuacagcaucaugugcaucaucaaggaggaggugcuggcguacgugguccagcugccccucuacggcgugaucgacacccccugcuggaagcugcacacgagcccccugugcaccaccaacaccaaggagggguccaacaucugccucacgcgcaccgaccggggcugguacugcgacaacgccggcagcgucuccuucuucccgcaggccgagaccugcaaggugcagagcaaccgcguguucugcgacaccaugaacucccugacgcugcccagcgagguaaaccucugcaacgucgacaucuucaaccccaaguacgacugcaagaucaugaccuccaagaccgacgugagcuccagcgugaucaccucccugggggccaucgucagcugcuacggcaagacgaagugcaccgccagcaacaagaaccgggggaucaucaagaccuucuccaacggcugcgacuacgugagcaacaagggcguggacaccguguccgucgggaacacccuguacugcgugaacaagcaggagggccagagccucuacgugaagggggagcccaucaucaacuucuacgacccgcuggucuuccccuccgacgaguucgacgcgagcaucucccaggugaacgagaagaucaaccagagccuggccuucauccgcaaguccgacgagcugcuccacaacgugaacgccggcaagagcacgaccaacaucaugaucaccaccaucaucaucgucaucaucgugauccugcugucccucaucgccguggggcugcugcucuacugcaaggcccggugaggacuaguggaagcauuuuccuggcugauuaaaagaaauuacucagcuauggucaucuguuccuguuagaaggcuaugcagcauauuauauacuaugcgcauguuaugaaaugcauaauaaaaaauuuuaaaaaaucuaaaagaucuaaaaaaaaaaaaaaaaaaaaaaaaaaaaaaaaaaaaaaaaaaaaaaaaaaaaaaaaaaaaaaaaugcaucccccccccccccccccccccccccccccccaaaggcucuuuucagagccaccagaauu

SEQ ID NO: 3635 - RNA, 1897 nt, Artificial Sequence
  mRNA product Design d-4 comprising derived and/or modified sequence from HRSV(A2)__F-del_DSCav1_mut3 (opt1)
gggagagucccgcagucggcguccagcggcucugcuuguucgugugugugucguugcaggccuuauucaagcuuaccauggagcugcucauccugaaggccaacgccaucaccaccauccugacggcggugaccuucugcuucgccagcggccagaacaucaccgaggaguucuaccaguccacgugcagcgccgucuccaagggguaccucggcgcccugcgcaccgggugguacaccagcgugaucaccaucgagcuguccaacaucaaggagaucaagugcaacggcaccgacgccaaggugaagcucaucaagcaggagcuggacaaguacaagaacgcggucacggaccugcagcuccugaugcagagcacccccgccaccggguccggcagcgccaucugcuccggcguggccgugugcaagguccugcaccucgagggggaggugaacaagaucaagagcgcgcugcuguccaccaacaaggccguggucagccucuccaacggcgugagcgugcugacguucaagguccuggaccucaagaacuacaucgacaagcagcugcugccgauccucaacaagcaguccugcagcauccccaacaucgagaccgugaucgaguuccagcagaagaacaaccggcugcuggagaucacccgcgaguucuccgugaacgccggggucaccacgcccgugagcaccuacaugcucaccaacuccgagcugcugagccucaucaacgacaugcccaucaccaacgaccagaagaagcugaugagcaacaacgugcagaucguccggcagcaguccuacagcaucaugugcaucaucaaggaggaggugcuggccuacgugguccagcucccgcuguacggcgugaucgacacgcccugcuggaagcugcacaccagcccccucugcaccaccaacacgaaggagggguccaacaucugccugacccgcaccgaccggggcugguacugcgacaacgccggcuccgugagcuucuucccccaggcggagaccugcaagguccaguccaaccgcguguucugcgacacgaugaacagccugacccucccguccgaggucaaccugugcaacguggacaucuucaaccccaaguacgacugcaagaucaugaccagcaagaccgacguguccagcuccgucaucacgagccugggggccaucguguccugcuacggcaagaccaagugcaccgccagcaacaagaaccgggggaucaucaagaccuucuccaacggcugcgacuacgugagcaacaagggcgucgacacgguguccguggggaacacccucuacugcgucaacaagcaggagggccagagccuguacgugaagggggagcccaucaucaacuucuacgacccccugguguucccgagcgacgaguucgacgccuccaucagccaggucaacgagaagaucaaccagucccucgccuucauccgcaagagcgacgagcugcugcacaacgugaacgcgggcaaguccaccaccaacaucaugaucaccacgaucaucaucgugaucaucgucauccuccugagccugaucgccguggggcuccugcuguacugcaaggcccggugaggacuaguggaagcauuuuccuggcugauuaaaagaaauuacucagcuauggucaucuguuccuguuagaaggcuaugcagcauauuauauacuaugcgcauguuaugaaaugcauaauaaaaaauuuuaaaaaaucuaaaagaucuaaaaaaaaaaaaaaaaaaaaaaaaaaaaaaaaaaaaaaaaaaaaaaaaaaaaaaaaaaaaaaaaugcaucccccccccccccccccccccccccccccccaaaggcucuuuucagagccaccagaauu

SEQ ID NO: 3636 - RNA, 1897 nt, Artificial Sequence
  mRNA product Design d-4 comprising derived and/or modified sequence from HRSV(A2)__F-del_DSCav1_mut3 (opt2)
gggagagucccgcagucggcguccagcggcucugcuuguucgugugugugucguugcaggccuuauucaagcuuaccauggagcuccucauccucaaggccaacgccaucaccaccauccucaccgccgucaccuucugcuucgccuccggccagaacaucaccgaggaguucuaccaguccaccugcuccgccgucuccaagggcuaccucggcgcccuccgcaccggcugguacaccuccgucaucaccaucgagcucuccaacaucaaggagaucaagugcaacggcaccgacgccaaggucaagcucaucaagcaggagcucgacaaguacaagaacgccgucaccgaccuccagcuccucaugcaguccacccccgccaccggcuccggcuccgccaucugcuccggcgucgccgucugcaagguccuccaccucgagggcgaggucaacaagaucaaguccgcccuccucuccaccaacaaggccgucgucucccucuccaacggcgucuccguccucaccuucaagguccucgaccucaagaacuacaucgacaagcagcuccuccccauccucaacaagcaguccugcuccauccccaacaucgagaccgucaucgaguuccagcagaagaacaaccgccuccucgagaucacccgcgaguucuccgucaacgccggcgucaccacccccgucuccaccuacaugcucaccaacuccgagcuccucucccucaucaacgacaugcccaucaccaacgaccagaagaagcucauguccaacaacguccagaucguccgccagcaguccuacuccaucaugugcaucaucaaggaggagguccucgccuacgucguccagcucccccucuacggcgucaucgacacccccugcuggaagcuccacaccuccccccucugcaccaccaacaccaaggagggcuccaacaucugccucacccgcaccgaccgcggcugguacugcgacaacgccggcuccgucuccuucuucccccaggccgagaccugcaagguccaguccaaccgcgucuucugcgacaccaugaacucccucacccuccccuccgaggucaaccucugcaacgucgacaucuucaaccccaaguacgacugcaagaucaugaccuccaagaccgacgucuccuccuccgucaucaccucccucggcgccaucgucuccugcuacggcaagaccaagugcaccgccuccaacaagaaccgcggcaucaucaagaccuucuccaacggcugcgacuacgucuccaacaagggcgucgacaccgucuccgucggcaacacccucuacugcgucaacaagcaggagggccagucccucuacgucaagggcgagcccaucaucaacuucuacgacccccucgucuuccccuccgacgaguucgacgccuccaucucccaggucaacgagaagaucaaccagucccucgccuucauccgcaaguccgacgagcuccuccacaacgucaacgccggcaaguccaccaccaacaucaugaucaccaccaucaucaucgucaucaucgucauccuccucucccucaucgccgucggccuccuccucuacugcaaggcccgcugaggacuaguggaagcauuuuccuggcugauuaaaagaaauuacucagcuauggucaucuguuccuguuagaaggcuaugcagcauauuauauacuaugcgcauguuaugaaaugcauaauaaaaaauuuuaaaaaaucuaaaagaucuaaaaaaaaaaaaaaaaaaaaaaaaaaaaaaaaaaaaaaaaaaaaaaaaaaaaaaaaaaaaaaaaugcaucccccccccccccccccccccccccccccccaaaggcucuuuucagagccaccagaauu

SEQ ID NO: 3637 - RNA, 1897 nt, Artificial Sequence
  mRNA product Design d-4 comprising derived and/or modified sequence from HRSV(A2)__F-del_DSCav1_mut3 (opt3)
gggagagucccgcagucggcguccagcggcucugcuuguucgugugugugucguugcaggccuuauucaagcuuaccauggagcugcucauccuuaaggccaacgcuauuaccacaauacugacugcagugacguucugcuuugccagcggccagaauaucaccgaagaguucuaccaauccacauguucugcggucucaaaaggguauuugggagcuuuaagaacugguugguacaccaguguuauuacaaucgaacugagcaacauuaaggagaucaaaugcaauggcaccgacgccaaggugaaacuaauaaagcaggaacucgauaaguauaaaaacgcaguaacugaccugcagcuucugaugcaguccacacccgccaccgggucuggaucggcuaucuguucaggcguggcagucugcaagguguugcaccucgagggugagguuaauaaaauuaagagcgcccugcugaguacgaacaaagcuguggucucccucucuaauggggugagcguauuaacuuuuaagguucuggaucuuaagaacuacaucgacaaacaauugcugccuauucuaaauaagcaguccuguucaaucccaaacauagaaaccgugauugaguuccagcagaaaaauaacaggcuccuggaaaucacacgggaguuuagugucaaugccggagugacuaccccggugagcacauauaugcuuaccaacucugagcuguugucccucauuaaugauaugcccaucacgaacgaccaaaagaaacugaugucaaacaauguccagaucguucgccagcagagcuacaguauuaugugcauaaucaaggaagagguguuagcguauguagugcaacugccucucuacggcgucauugauacuccauguuggaaacuucauacaucuccccugugcaccacuaacacaaaggaaggcuccaauaucuguuugacccgaacggaccgugggugguacugcgauaacgcaggaagcgugucguucuuuccucaggccgagaccuguaagguucagucuaauagaguguucugcgacacaaugaacucccuaacucugccaucagaagucaaucucugcaacguggauauauuuaaucccaaauaugacuguaagauuaugaccaguaaaacagauguaagcuccucuguuaucacuagccugggugcuaucgugucaugcuacggcaagaccaaauguacagccaguaacaagaauagggggauuaucaagaccuucuccaacggaugcgacuaugucagcaauaaaggcguggacacugucucuguggguaacacgcuuuacuguguuaauaagcaagaggggcagucacuguaugugaaaggagagccuauuauaaacuuuuacgauccauugguauucccgagugacgaauuugaugcaagcaucucccaggucaacgagaagauuaaucagucucucgcuuucauccggaaaucggacgaacuguuacacaacgugaaugccggcaagagcacaaccaacaucaugauuacuaccauaaucauuguuaucauugugauccugcuaucccucauagcggucggccugcuuuuguauugcaaggcccgcugaggacuaguggaagcauuuuccuggcugauuaaaagaaauuacucagcuauggucaucuguuccuguuagaaggcuaugcagcauauuauauacuaugcgcauguuaugaaaugcauaauaaaaaauuuuaaaaaaucuaaaagaucuaaaaaaaaaaaaaaaaaaaaaaaaaaaaaaaaaaaaaaaaaaaaaaaaaaaaaaaaaaaaaaaaugcaucccccccccccccccccccccccccccccccaaaggcucuuuucagagccaccagaauu

SEQ ID NO: 3638 - RNA, 1897 nt, Artificial Sequence
  mRNA product Design d-4 comprising derived and/or modified sequence from HRSV(A2)__F-del_DSCav1_mut3 (opt4)
gggagagucccgcagucggcguccagcggcucugcuuguucgugugugugucguugcaggccuuauucaagcuuaccauggagcugcugauccugaaggccaacgccaucaccaccauccugaccgccgugaccuucugcuucgccagcggccagaacaucaccgaggaguucuaccagagcaccugcagcgccgugagcaagggcuaccugggcgcccugagaaccggcugguacaccagcgugaucaccaucgagcugagcaacaucaaggagaucaagugcaacggcaccgacgccaaggugaagcugaucaagcaggagcuggacaaguacaagaacgccgugaccgaccugcagcugcugaugcagagcacccccgccaccggcagcggcagcgccaucugcagcggcguggccgugugcaaggugcugcaccuggagggcgaggugaacaagaucaagagcgcccugcugagcaccaacaaggccguggugagccugagcaacggcgugagcgugcugaccuucaaggugcuggaccugaagaacuacaucgacaagcagcugcugcccauccugaacaagcagagcugcagcauccccaacaucgagaccgugaucgaguuccagcagaagaacaacagacugcuggagaucaccagagaguucagcgugaacgccggcgugaccacccccgugagcaccuacaugcugaccaacagcgagcugcugagccugaucaacgacaugcccaucaccaacgaccagaagaagcugaugagcaacaacgugcagaucgugagacagcagagcuacagcaucaugugcaucaucaaggaggaggugcuggccuacguggugcagcugccccuguacggcgugaucgacacccccugcuggaagcugcacaccagcccccugugcaccaccaacaccaaggagggcagcaacaucugccugaccagaaccgacagaggcugguacugcgacaacgccggcagcgugagcuucuucccccaggccgagaccugcaaggugcagagcaacagaguguucugcgacaccaugaacagccugacccugcccagcgaggugaaccugugcaacguggacaucuucaaccccaaguacgacugcaagaucaugaccagcaagaccgacgugagcagcagcgugaucaccagccugggcgccaucgugagcugcuacggcaagaccaagugcaccgccagcaacaagaacagaggcaucaucaagaccuucagcaacggcugcgacuacgugagcaacaagggcguggacaccgugagcgugggcaacacccuguacugcgugaacaagcaggagggccagagccuguacgugaagggcgagcccaucaucaacuucuacgacccccugguguuccccagcgacgaguucgacgccagcaucagccaggugaacgagaagaucaaccagagccuggccuucaucagaaagagcgacgagcugcugcacaacgugaacgccggcaagagcaccaccaacaucaugaucaccaccaucaucaucgugaucaucgugauccugcugagccugaucgccgugggccugcugcuguacugcaaggccagaugaggacuaguggaagcauuuuccuggcugauuaaaagaaauuacucagcuauggucaucuguuccuguuagaaggcuaugcagcauauuauauacuaugcgcauguuaugaaaugcauaauaaaaaauuuuaaaaaaucuaaaagaucuaaaaaaaaaaaaaaaaaaaaaaaaaaaaaaaaaaaaaaaaaaaaaaaaaaaaaaaaaaaaaaaaugcaucccccccccccccccccccccccccccccccaaaggcucuuuucagagccaccagaauu

SEQ ID NO: 3639 - RNA, 1897 nt, Artificial Sequence
  mRNA product Design d-4 comprising derived and/or modified sequence from HRSV(A2)__F-del_DSCav1_mut3 (opt5)
gggagagucccgcagucggcguccagcggcucugcuuguucgugugugugucguugcaggccuuauucaagcuuaccauggagcugcucauccugaaggccaacgcuauuaccacaauccuuacggccgugaccuucugcuuugcgagcggccagaauauuacagaagaguucuaccaauccaccuguucugcugucagcaaaggguaucugggagcccucagaacaggcugguacaccuccguuaucacaauugaacugucuaacaucaaggagaucaaaugcaaugggaccgacgccaaggugaaacuuauuaagcaggaacuggauaaguauaaaaacgcugugacggaccuccagcugcugaugcagagcacccccgccacaggauccggcucugcuaucuguagcggggucgccgugugcaagguucuccaccuggagggagaggugaauaaaauuaaguccgcgcuucugagcaccaacaaagccgucgugucucucuccaauggcguuagcgugcugacauuuaagguccuugaucugaagaacuacaucgacaaacaacuccugccuauucugaauaagcagucuuguuccaucccgaacauugaaaccgugaucgaguuccagcagaaaaauaaccggcuccuggaaaucacgcgcgaguuuagcgugaaugcuggcgucacaacccccguuucuacauauaugcuuaccaacuccgagcugcucagccugauuaaugauaugccuaucaccaacgaccaaaagaaacuuauguccaacaaugugcagauugugagacagcagucuuacagcaucaugugcauuaucaaggaagagguccuggccuaugugguucaacucccccuguacggggugaucgauacaccuuguuggaaacugcauacgagcccccucugcaccacaaacaccaaggaaggauccaauauuugucugacacggaccgaccgcggcugguacugcgauaacgcugggucugucuccuucuuuccucaggccgagacguguaaggugcagagcaauagaguuuucugcgacacaaugaacucucuuacccugccgagcgaagugaaucucugcaacgucgauaucuuuaaucccaaauaugacuguaagauuaugaccuccaaaacagaugugucuagcuccgucaucaccagccugggagcgauugugucuugcuacggcaagacaaaauguacggccuccaacaagaaucgggggaucaucaagaccuucagcaacggaugcgacuauguuucuaauaaaggcguggacacagucuccgugggcaacacccuuuacuguguuaauaagcaagaggggcagagccuguaugugaaaggagagccuauuaucaacuuuuacgauccccucgucuucccuuccgacgaauuugaugcuucuauuagccaggugaacgagaagaucaaucagucccuggccuucauucgcaaaucugacgaacugcuccacaacgugaaugcuggcaagagcacaaccaacaucaugauuacgaccaucaucauuguuaucauugucauccugcuuucccugauugccguggggcuccugcuguauugcaaggccagaugaggacuaguggaagcauuuuccuggcugauuaaaagaaauuacucagcuauggucaucuguuccuguuagaaggcuaugcagcauauuauauacuaugcgcauguuaugaaaugcauaauaaaaaauuuuaaaaaaucuaaaagaucuaaaaaaaaaaaaaaaaaaaaaaaaaaaaaaaaaaaaaaaaaaaaaaaaaaaaaaaaaaaaaaaaugcaucccccccccccccccccccccccccccccccaaaggcucuuuucagagccaccagaauu

SEQ ID NO: 3640 - RNA, 1897 nt, Artificial Sequence
  mRNA product Design d-4 comprising derived and/or modified sequence from HRSV(A2)__F-del_DSCav1_mut3 (opt6)
gggagagucccgcagucggcguccagcggcucugcuuguucgugugugugucguugcaggccuuauucaagcuuaccauggaauuacuaauccugaaagcaaacgcaauuacuacaauacuaacagcaguaaccuuuugcuuugccucaggacaaaacauaacugaagaauuuuaccaaucaacuugcucagcagucucaaaaggcuaucuaggagcacuacgaacagguugguauacuucagucauaacaauagaauuaucaaacauaaaagaaauuaaauguaacggaacugacgcaaaaguaaaacucaucaaacaagaacucgauaaauacaaaaacgcuguaaccgacuuacaacuacuaaugcaaucaacuccagcaacaggcuccggauccgcaauaugcagugguguagcaguaugcaaaguccuacaccuagaaggagaaguaaauaagauaaaaucugcucuacuaucaacaaauaaagcaguugucucccuaucaaauggagucucaguacucaccuucaaaguauuagaccucaaaaacuacauagacaaacaacuauuaccaauacucaacaaacaauccugcuccaucccuaacauagaaaccguaaucgaauuucaacaaaaaaauaacagacucuuagaaauaacuagagaauuuucaguuaaugcaggcgugacaacaccaguaucaacauauaugcuaacaaacuccgaacuccuaucccuaauaaacgacaugccaaucacaaacgaccaaaaaaaacuaauguccaacaacguacaaaucguaagacaacaaucauacucuauaaugugcauaauaaaagaagaaguacuggccuacguaguacaauuaccacucuacggaguaauagacaccccaugcuggaaacuccauacaucaccccuaugcacaacaaacacaaaagaaggauccaacauaugucucacuagaacagacagaggcugguacugcgacaacgcuggauccgucucauucuucccccaagcagaaacauguaaaguacaaucuaauagaguauuuugugacacaaugaacagccucacacuaccauccgaagucaaccuauguaacguagauauauuuaaucccaaauacgacugcaaaauaaugacauccaaaacagauguaucaucauccguuaucaccucacuaggagccauaguuucaugcuacggaaaaacaaaaugcacugcaucuaacaaaaauagagguauaauaaaaacauuuuccaacggcugcgacuacgucucaaacaaaggcguagacaccguaucaguaggaaauacauuauauugcguaaauaaacaagaaggccaaucccuauacguaaaaggagaacccaucauaaacuucuaugacccacuuguuuuccccucagacgaauuugacgccucaauaucacaaguaaaugaaaaaauaaaccaaucucuugccuucauuagaaaaucagacgaauuacuacacaacgucaacgcaggaaaaucaacaacaaacaucaugauaacaacgauaauaauagucauaauaguaauacuacuaucauuaaucgcagucggacuccuauuauauugcaaagcuagauaaggacuaguggaagcauuuuccuggcugauuaaaagaaauuacucagcuauggucaucuguuccuguuagaaggcuaugcagcauauuauauacuaugcgcauguuaugaaaugcauaauaaaaaauuuuaaaaaaucuaaaagaucuaaaaaaaaaaaaaaaaaaaaaaaaaaaaaaaaaaaaaaaaaaaaaaaaaaaaaaaaaaaaaaaaugcaucccccccccccccccccccccccccccccccaaaggcucuuuucagagccaccagaauu

SEQ ID NO: 3641 - RNA, 1897 nt, Artificial Sequence
  mRNA product Design d-4 comprising derived and/or modified sequence from HRSV(A2)__F-del_DSCav1_mut3 (opt11)
gggagagucccgcagucggcguccagcggcucugcuuguucgugugugugucguugcaggccuuauucaagcuuaccauggaacuacucauacuaaaagccaacgccauaaccaccauccucaccgcaguaacuuucugcuucgcuuccggccaaaacaucaccgaagaauuuuaccaaaguaccugcagcgcagucucaaaaggauaccuaggcgcccuacgcacaggcugguacaccuccgucauuaccaucgaacucuccaacaucaaagaaauuaaaugcaacgguacagacgcaaaagucaaacucaucaaacaagaacucgacaaauacaaaaacgcagucaccgaccuccaacuccucaugcaauccacccccgccacaggcucuggcuccgccaucugcucaggcguagcagucugcaaaguccugcaccucgaaggcgaagucaacaaaaucaagucagcccuccucuccaccaacaaggccgucguaucccucucaaacggaguuagcguccucaccuucaaaguccuagaccucaaaaacuacaucgauaaacaacuacuccccauccuaaacaaacaaucaugcuccaucccaaacaucgaaaccguaaucgaguuccaacaaaagaacaaccgccuccucgaaaucacacgugaguucuccguuaacgccggcgucaccacccccgucucuacauacaugcucaccaacuccgaacuccuuucccucaucaacgacaugccaaucaccaacgaccaaaagaaacucaugucaaacaacguacaaaucguccgacaacaaagcuacuccaucaugugcaucaucaaagaagaaguccuugcauacgucguucaacuaccccucuacggcguaaucgacacucccugcuggaaacuccacaccuccccgcucugcacaaccaacaccaaagaaggcagcaacaucugccucacccgaaccgaccgcggcugguacugcgauaacgccggauccgucuccuucuucccacaagcagaaacuugcaaaguccaauccaaccgcgucuucugcgacaccaugaacucccucacacuccccuccgaagucaaccugugcaacgucgacaucuucaacccaaaauacgacugcaaaaucaugaccucaaaaaccgacgucucaucuucugucaucaccucucucggcgcuaucgucuccugcuauggcaaaaccaaaugcaccgccuccaacaagaaccgcggcauuaucaagaccuucuccaacggcugcgacuacgucuccaauaagggcgucgacaccgucucugucggcaacacccuuuacugcguaaacaaacaagaaggucaaucucucuacgucaaaggagaacccaucaucaacuucuacgacccccuggucuuccccuccgacgaguucgaugcaucaaucucccaagucaacgaaaagaucaaccaaucucucgcuuucauccgcaaauccgacgaacuccuacacaacguaaacgccggcaaauccaccacaaacaucaugaucaccaccauuaucauagucaucaucgucauccuccucuccuuaaucgccguuggccuccuucucuacugcaaagcccgauaaggacuaguggaagcauuuuccuggcugauuaaaagaaauuacucagcuauggucaucuguuccuguuagaaggcuaugcagcauauuauauacuaugcgcauguuaugaaaugcauaauaaaaaauuuuaaaaaaucuaaaagaucuaaaaaaaaaaaaaaaaaaaaaaaaaaaaaaaaaaaaaaaaaaaaaaaaaaaaaaaaaaaaaaaaugcaucccccccccccccccccccccccccccccccaaaggcucuuuucagagccaccagaauu

SEQ ID NO: 3642 - RNA, 1994 nt, Artificial Sequence
  mRNA product Design d-5 comprising derived and/or modified sequence from HRSV(A2)__F-del_DSCav1_mut3 (opt1)
gggagagggcgcuuggcuugcaaggacccugagcugcggcauugaagcacacccaacccaacucgacugaagucagccucacugaaccggaucugagaaucuucucucucugggcuugccagggcucuccgaaccuagcuagcauccucuucaauuccaacuagaaagcuuaccauggagcugcucauccugaaggccaacgccaucaccaccauccugacggcggugaccuucugcuucgccagcggccagaacaucaccgaggaguucuaccaguccacgugcagcgccgucuccaagggguaccucggcgcccugcggaccggcugguacaccuccgugaucaccaucgagcugagcaacaucaaggagaucaagugcaacgggaccgacgccaaggugaagcucaucaagcaggagcuggacaaguacaagaacgcggucacggaccugcagcuccugaugcaguccaccccggcaaccggcuccggcuccgccaucugcagcggcgucgccgugugcaaggugcugcaccucgagggggaggucaacaagaucaagagcgcccugcuguccaccaacaaggccguggugagccucuccaacggcgucagcgugcugaccuucaaggugcuggaccucaagaacuacaucgacaagcagcugcugcccauccugaacaagcagagcugcuccauccccaacaucgagacggugaucgaguuccagcagaagaacaaccggcuccuggagaucacccgcgaguucagcgugaacgccggggucaccacccccguguccacguacaugcugaccaacagcgagcuccugucccugaucaacgacaugccgaucaccaacgaccagaagaagcucaugagcaacaacgugcagaucguccggcagcaguccuacagcaucaugugcaucaucaaggaggaggugcuggcguacgugguccagcugccccucuacggcgugaucgacacccccugcuggaagcugcacacgagcccccugugcaccaccaacaccaaggagggguccaacaucugccucacgcgcaccgaccggggcugguacugcgacaacgccggcagcgucuccuucuucccgcaggccgagaccugcaaggugcagagcaaccgcguguucugcgacaccaugaacucccugacgcugcccagcgagguaaaccucugcaacgucgacaucuucaaccccaaguacgacugcaagaucaugaccuccaagaccgacgugagcuccagcgugaucaccucccugggggccaucgucagcugcuacggcaagacgaagugcaccgccagcaacaagaaccgggggaucaucaagaccuucuccaacggcugcgacuacgugagcaacaagggcguggacaccguguccgucgggaacacccuguacugcgugaacaagcaggagggccagagccucuacgugaagggggagcccaucaucaacuucuacgacccgcuggucuuccccuccgacgaguucgacgcgagcaucucccaggugaacgagaagaucaaccagagccuggccuucauccgcaaguccgacgagcugcuccacaacgugaacgccggcaagagcacgaccaacaucaugaucaccaccaucaucaucgucaucaucgugauccugcugucccucaucgccguggggcugcugcucuacugcaaggcccggugaggacuaguggaagcauuuuccuggcugauuaaaagaaauuacucagcuauggucaucuguuccuguuagaaggcuaugcagcauauuauauacuaugcgcauguuaugaaaugcauaauaaaaaauuuuaaaaaaucuaaaagaucuaaaaaaaaaaaaaaaaaaaaaaaaaaaaaaaaaaaaaaaaaaaaaaaaaaaaaaaaaaaaaaaaugcaucccccccccccccccccccccccccccccccaaaggcucuuuucagagccaccagaauu

SEQ ID NO: 3643 - RNA, 1994 nt, Artificial Sequence
  mRNA product Design d-5 comprising derived and/or modified sequence from HRSV(A2)__F-del_DSCav1_mut3 (opt1)
gggagagggcgcuuggcuugcaaggacccugagcugcggcauugaagcacacccaacccaacucgacugaagucagccucacugaaccggaucugagaaucuucucucucugggcuugccagggcucuccgaaccuagcuagcauccucuucaauuccaacuagaaagcuuaccauggagcugcucauccugaaggccaacgccaucaccaccauccugacggcggugaccuucugcuucgccagcggccagaacaucaccgaggaguucuaccaguccacgugcagcgccgucuccaagggguaccucggcgcccugcgcaccgggugguacaccagcgugaucaccaucgagcuguccaacaucaaggagaucaagugcaacggcaccgacgccaaggugaagcucaucaagcaggagcuggacaaguacaagaacgcggucacggaccugcagcuccugaugcagagcacccccgccaccggguccggcagcgccaucugcuccggcguggccgugugcaagguccugcaccucgagggggaggugaacaagaucaagagcgcgcugcuguccaccaacaaggccguggucagccucuccaacggcgugagcgugcugacguucaagguccuggaccucaagaacuacaucgacaagcagcugcugccgauccucaacaagcaguccugcagcauccccaacaucgagaccgugaucgaguuccagcagaagaacaaccggcugcuggagaucacccgcgaguucuccgugaacgccggggucaccacgcccgugagcaccuacaugcucaccaacuccgagcugcugagccucaucaacgacaugcccaucaccaacgaccagaagaagcugaugagcaacaacgugcagaucguccggcagcaguccuacagcaucaugugcaucaucaaggaggaggugcuggccuacgugguccagcucccgcuguacggcgugaucgacacgcccugcuggaagcugcacaccagcccccucugcaccaccaacacgaaggagggguccaacaucugccugacccgcaccgaccggggcugguacugcgacaacgccggcuccgugagcuucuucccccaggcggagaccugcaagguccaguccaaccgcguguucugcgacacgaugaacagccugacccucccguccgaggucaaccugugcaacguggacaucuucaaccccaaguacgacugcaagaucaugaccagcaagaccgacguguccagcuccgucaucacgagccugggggccaucguguccugcuacggcaagaccaagugcaccgccagcaacaagaaccgggggaucaucaagaccuucuccaacggcugcgacuacgugagcaacaagggcgucgacacgguguccguggggaacacccucuacugcgucaacaagcaggagggccagagccuguacgugaagggggagcccaucaucaacuucuacgacccccugguguucccgagcgacgaguucgacgccuccaucagccaggucaacgagaagaucaaccagucccucgccuucauccgcaagagcgacgagcugcugcacaacgugaacgcgggcaaguccaccaccaacaucaugaucaccacgaucaucaucgugaucaucgucauccuccugagccugaucgccguggggcuccugcuguacugcaaggcccggugaggacuaguggaagcauuuuccuggcugauuaaaagaaauuacucagcuauggucaucuguuccuguuagaaggcuaugcagcauauuauauacuaugcgcauguuaugaaaugcauaauaaaaaauuuuaaaaaaucuaaaagaucuaaaaaaaaaaaaaaaaaaaaaaaaaaaaaaaaaaaaaaaaaaaaaaaaaaaaaaaaaaaaaaaaugcaucccccccccccccccccccccccccccccccaaaggcucuuuucagagccaccagaauu

SEQ ID NO: 3644 - RNA, 1994 nt, Artificial Sequence
  mRNA product Design d-5 comprising derived and/or modified sequence from HRSV(A2)__F-del_DSCav1_mut3 (opt2)
gggagagggcgcuuggcuugcaaggacccugagcugcggcauugaagcacacccaacccaacucgacugaagucagccucacugaaccggaucugagaaucuucucucucugggcuugccagggcucuccgaaccuagcuagcauccucuucaauuccaacuagaaagcuuaccauggagcuccucauccucaaggccaacgccaucaccaccauccucaccgccgucaccuucugcuucgccuccggccagaacaucaccgaggaguucuaccaguccaccugcuccgccgucuccaagggcuaccucggcgcccuccgcaccggcugguacaccuccgucaucaccaucgagcucuccaacaucaaggagaucaagugcaacggcaccgacgccaaggucaagcucaucaagcaggagcucgacaaguacaagaacgccgucaccgaccuccagcuccucaugcaguccacccccgccaccggcuccggcuccgccaucugcuccggcgucgccgucugcaagguccuccaccucgagggcgaggucaacaagaucaaguccgcccuccucuccaccaacaaggccgucgucucccucuccaacggcgucuccguccucaccuucaagguccucgaccucaagaacuacaucgacaagcagcuccuccccauccucaacaagcaguccugcuccauccccaacaucgagaccgucaucgaguuccagcagaagaacaaccgccuccucgagaucacccgcgaguucuccgucaacgccggcgucaccacccccgucuccaccuacaugcucaccaacuccgagcuccucucccucaucaacgacaugcccaucaccaacgaccagaagaagcucauguccaacaacguccagaucguccgccagcaguccuacuccaucaugugcaucaucaaggaggagguccucgccuacgucguccagcucccccucuacggcgucaucgacacccccugcuggaagcuccacaccuccccccucugcaccaccaacaccaaggagggcuccaacaucugccucacccgcaccgaccgcggcugguacugcgacaacgccggcuccgucuccuucuucccccaggccgagaccugcaagguccaguccaaccgcgucuucugcgacaccaugaacucccucacccuccccuccgaggucaaccucugcaacgucgacaucuucaaccccaaguacgacugcaagaucaugaccuccaagaccgacgucuccuccuccgucaucaccucccucggcgccaucgucuccugcuacggcaagaccaagugcaccgccuccaacaagaaccgcggcaucaucaagaccuucuccaacggcugcgacuacgucuccaacaagggcgucgacaccgucuccgucggcaacacccucuacugcgucaacaagcaggagggccagucccucuacgucaagggcgagcccaucaucaacuucuacgacccccucgucuuccccuccgacgaguucgacgccuccaucucccaggucaacgagaagaucaaccagucccucgccuucauccgcaaguccgacgagcuccuccacaacgucaacgccggcaaguccaccaccaacaucaugaucaccaccaucaucaucgucaucaucgucauccuccucucccucaucgccgucggccuccuccucuacugcaaggcccgcugaggacuaguggaagcauuuuccuggcugauuaaaagaaauuacucagcuauggucaucuguuccuguuagaaggcuaugcagcauauuauauacuaugcgcauguuaugaaaugcauaauaaaaaauuuuaaaaaaucuaaaagaucuaaaaaaaaaaaaaaaaaaaaaaaaaaaaaaaaaaaaaaaaaaaaaaaaaaaaaaaaaaaaaaaaugcaucccccccccccccccccccccccccccccccaaaggcucuuuucagagccaccagaauu

SEQ ID NO: 3645 - RNA, 1994 nt, Artificial Sequence
  mRNA product Design d-5 comprising derived and/or modified sequence from HRSV(A2)__F-del_DSCav1_mut3 (opt3)
gggagagggcgcuuggcuugcaaggacccugagcugcggcauugaagcacacccaacccaacucgacugaagucagccucacugaaccggaucugagaaucuucucucucugggcuugccagggcucuccgaaccuagcuagcauccucuucaauuccaacuagaaagcuuaccauggagcugcucauccuuaaggccaacgcuauuaccacaauacugacugcagugacguucugcuuugccagcggccagaauaucaccgaagaguucuaccaauccacauguucugcggucucaaaaggguauuugggagcuuuaagaacugguugguacaccaguguuauuacaaucgaacugagcaacauuaaggagaucaaaugcaauggcaccgacgccaaggugaaacuaauaaagcaggaacucgauaaguauaaaaacgcaguaacugaccugcagcuucugaugcaguccacacccgccaccgggucuggaucggcuaucuguucaggcguggcagucugcaagguguugcaccucgagggugagguuaauaaaauuaagagcgcccugcugaguacgaacaaagcuguggucucccucucuaauggggugagcguauuaacuuuuaagguucuggaucuuaagaacuacaucgacaaacaauugcugccuauucuaaauaagcaguccuguucaaucccaaacauagaaaccgugauugaguuccagcagaaaaauaacaggcuccuggaaaucacacgggaguuuagugucaaugccggagugacuaccccggugagcacauauaugcuuaccaacucugagcuguugucccucauuaaugauaugcccaucacgaacgaccaaaagaaacugaugucaaacaauguccagaucguucgccagcagagcuacaguauuaugugcauaaucaaggaagagguguuagcguauguagugcaacugccucucuacggcgucauugauacuccauguuggaaacuucauacaucuccccugugcaccacuaacacaaaggaaggcuccaauaucuguuugacccgaacggaccgugggugguacugcgauaacgcaggaagcgugucguucuuuccucaggccgagaccuguaagguucagucuaauagaguguucugcgacacaaugaacucccuaacucugccaucagaagucaaucucugcaacguggauauauuuaaucccaaauaugacuguaagauuaugaccaguaaaacagauguaagcuccucuguuaucacuagccugggugcuaucgugucaugcuacggcaagaccaaauguacagccaguaacaagaauagggggauuaucaagaccuucuccaacggaugcgacuaugucagcaauaaaggcguggacacugucucuguggguaacacgcuuuacuguguuaauaagcaagaggggcagucacuguaugugaaaggagagccuauuauaaacuuuuacgauccauugguauucccgagugacgaauuugaugcaagcaucucccaggucaacgagaagauuaaucagucucucgcuuucauccggaaaucggacgaacuguuacacaacgugaaugccggcaagagcacaaccaacaucaugauuacuaccauaaucauuguuaucauugugauccugcuaucccucauagcggucggccugcuuuuguauugcaaggcccgcugaggacuaguggaagcauuuuccuggcugauuaaaagaaauuacucagcuauggucaucuguuccuguuagaaggcuaugcagcauauuauauacuaugcgcauguuaugaaaugcauaauaaaaaauuuuaaaaaaucuaaaagaucuaaaaaaaaaaaaaaaaaaaaaaaaaaaaaaaaaaaaaaaaaaaaaaaaaaaaaaaaaaaaaaaaugcaucccccccccccccccccccccccccccccccaaaggcucuuuucagagccaccagaauu

SEQ ID NO: 3646 - RNA, 1994 nt, Artificial Sequence
  mRNA product Design d-5 comprising derived and/or modified sequence from HRSV(A2)__F-del_DSCav1_mut3 (opt4)
gggagagggcgcuuggcuugcaaggacccugagcugcggcauugaagcacacccaacccaacucgacugaagucagccucacugaaccggaucugagaaucuucucucucugggcuugccagggcucuccgaaccuagcuagcauccucuucaauuccaacuagaaagcuuaccauggagcugcugauccugaaggccaacgccaucaccaccauccugaccgccgugaccuucugcuucgccagcggccagaacaucaccgaggaguucuaccagagcaccugcagcgccgugagcaagggcuaccugggcgcccugagaaccggcugguacaccagcgugaucaccaucgagcugagcaacaucaaggagaucaagugcaacggcaccgacgccaaggugaagcugaucaagcaggagcuggacaaguacaagaacgccgugaccgaccugcagcugcugaugcagagcacccccgccaccggcagcggcagcgccaucugcagcggcguggccgugugcaaggugcugcaccuggagggcgaggugaacaagaucaagagcgcccugcugagcaccaacaaggccguggugagccugagcaacggcgugagcgugcugaccuucaaggugcuggaccugaagaacuacaucgacaagcagcugcugcccauccugaacaagcagagcugcagcauccccaacaucgagaccgugaucgaguuccagcagaagaacaacagacugcuggagaucaccagagaguucagcgugaacgccggcgugaccacccccgugagcaccuacaugcugaccaacagcgagcugcugagccugaucaacgacaugcccaucaccaacgaccagaagaagcugaugagcaacaacgugcagaucgugagacagcagagcuacagcaucaugugcaucaucaaggaggaggugcuggccuacguggugcagcugccccuguacggcgugaucgacacccccugcuggaagcugcacaccagcccccugugcaccaccaacaccaaggagggcagcaacaucugccugaccagaaccgacagaggcugguacugcgacaacgccggcagcgugagcuucuucccccaggccgagaccugcaaggugcagagcaacagaguguucugcgacaccaugaacagccugacccugcccagcgaggugaaccugugcaacguggacaucuucaaccccaaguacgacugcaagaucaugaccagcaagaccgacgugagcagcagcgugaucaccagccugggcgccaucgugagcugcuacggcaagaccaagugcaccgccagcaacaagaacagaggcaucaucaagaccuucagcaacggcugcgacuacgugagcaacaagggcguggacaccgugagcgugggcaacacccuguacugcgugaacaagcaggagggccagagccuguacgugaagggcgagcccaucaucaacuucuacgacccccugguguuccccagcgacgaguucgacgccagcaucagccaggugaacgagaagaucaaccagagccuggccuucaucagaaagagcgacgagcugcugcacaacgugaacgccggcaagagcaccaccaacaucaugaucaccaccaucaucaucgugaucaucgugauccugcugagccugaucgccgugggccugcugcuguacugcaaggccagaugaggacuaguggaagcauuuuccuggcugauuaaaagaaauuacucagcuauggucaucuguuccuguuagaaggcuaugcagcauauuauauacuaugcgcauguuaugaaaugcauaauaaaaaauuuuaaaaaaucuaaaagaucuaaaaaaaaaaaaaaaaaaaaaaaaaaaaaaaaaaaaaaaaaaaaaaaaaaaaaaaaaaaaaaaaugcaucccccccccccccccccccccccccccccccaaaggcucuuuucagagccaccagaauu

SEQ ID NO: 3647 - RNA, 1994 nt, Artificial Sequence
  mRNA product Design d-5 comprising derived and/or modified sequence from HRSV(A2)__F-del_DSCav1_mut3 (opt5)
gggagagggcgcuuggcuugcaaggacccugagcugcggcauugaagcacacccaacccaacucgacugaagucagccucacugaaccggaucugagaaucuucucucucugggcuugccagggcucuccgaaccuagcuagcauccucuucaauuccaacuagaaagcuuaccauggagcugcucauccugaaggccaacgcuauuaccacaauccuuacggccgugaccuucugcuuugcgagcggccagaauauuacagaagaguucuaccaauccaccuguucugcugucagcaaaggguaucugggagcccucagaacaggcugguacaccuccguuaucacaauugaacugucuaacaucaaggagaucaaaugcaaugggaccgacgccaaggugaaacuuauuaagcaggaacuggauaaguauaaaaacgcugugacggaccuccagcugcugaugcagagcacccccgccacaggauccggcucugcuaucuguagcggggucgccgugugcaagguucuccaccuggagggagaggugaauaaaauuaaguccgcgcuucugagcaccaacaaagccgucgugucucucuccaauggcguuagcgugcugacauuuaagguccuugaucugaagaacuacaucgacaaacaacuccugccuauucugaauaagcagucuuguuccaucccgaacauugaaaccgugaucgaguuccagcagaaaaauaaccggcuccuggaaaucacgcgcgaguuuagcgugaaugcuggcgucacaacccccguuucuacauauaugcuuaccaacuccgagcugcucagccugauuaaugauaugccuaucaccaacgaccaaaagaaacuuauguccaacaaugugcagauugugagacagcagucuuacagcaucaugugcauuaucaaggaagagguccuggccuaugugguucaacucccccuguacggggugaucgauacaccuuguuggaaacugcauacgagcccccucugcaccacaaacaccaaggaaggauccaauauuugucugacacggaccgaccgcggcugguacugcgauaacgcugggucugucuccuucuuuccucaggccgagacguguaaggugcagagcaauagaguuuucugcgacacaaugaacucucuuacccugccgagcgaagugaaucucugcaacgucgauaucuuuaaucccaaauaugacuguaagauuaugaccuccaaaacagaugugucuagcuccgucaucaccagccugggagcgauugugucuugcuacggcaagacaaaauguacggccuccaacaagaaucgggggaucaucaagaccuucagcaacggaugcgacuauguuucuaauaaaggcguggacacagucuccgugggcaacacccuuuacuguguuaauaagcaagaggggcagagccuguaugugaaaggagagccuauuaucaacuuuuacgauccccucgucuucccuuccgacgaauuugaugcuucuauuagccaggugaacgagaagaucaaucagucccuggccuucauucgcaaaucugacgaacugcuccacaacgugaaugcuggcaagagcacaaccaacaucaugauuacgaccaucaucauuguuaucauugucauccugcuuucccugauugccguggggcuccugcuguauugcaaggccagaugaggacuaguggaagcauuuuccuggcugauuaaaagaaauuacucagcuauggucaucuguuccuguuagaaggcuaugcagcauauuauauacuaugcgcauguuaugaaaugcauaauaaaaaauuuuaaaaaaucuaaaagaucuaaaaaaaaaaaaaaaaaaaaaaaaaaaaaaaaaaaaaaaaaaaaaaaaaaaaaaaaaaaaaaaaugcaucccccccccccccccccccccccccccccccaaaggcucuuuucagagccaccagaauu

SEQ ID NO: 3648 - RNA, 1994 nt, Artificial Sequence
  mRNA product Design d-5 comprising derived and/or modified sequence from HRSV(A2)__F-del_DSCav1_mut3 (opt6)
gggagagggcgcuuggcuugcaaggacccugagcugcggcauugaagcacacccaacccaacucgacugaagucagccucacugaaccggaucugagaaucuucucucucugggcuugccagggcucuccgaaccuagcuagcauccucuucaauuccaacuagaaagcuuaccauggaauuacuaauccugaaagcaaacgcaauuacuacaauacuaacagcaguaaccuuuugcuuugccucaggacaaaacauaacugaagaauuuuaccaaucaacuugcucagcagucucaaaaggcuaucuaggagcacuacgaacagguugguauacuucagucauaacaauagaauuaucaaacauaaaagaaauuaaauguaacggaacugacgcaaaaguaaaacucaucaaacaagaacucgauaaauacaaaaacgcuguaaccgacuuacaacuacuaaugcaaucaacuccagcaacaggcuccggauccgcaauaugcagugguguagcaguaugcaaaguccuacaccuagaaggagaaguaaauaagauaaaaucugcucuacuaucaacaaauaaagcaguugucucccuaucaaauggagucucaguacucaccuucaaaguauuagaccucaaaaacuacauagacaaacaacuauuaccaauacucaacaaacaauccugcuccaucccuaacauagaaaccguaaucgaauuucaacaaaaaaauaacagacucuuagaaauaacuagagaauuuucaguuaaugcaggcgugacaacaccaguaucaacauauaugcuaacaaacuccgaacuccuaucccuaauaaacgacaugccaaucacaaacgaccaaaaaaaacuaauguccaacaacguacaaaucguaagacaacaaucauacucuauaaugugcauaauaaaagaagaaguacuggccuacguaguacaauuaccacucuacggaguaauagacaccccaugcuggaaacuccauacaucaccccuaugcacaacaaacacaaaagaaggauccaacauaugucucacuagaacagacagaggcugguacugcgacaacgcuggauccgucucauucuucccccaagcagaaacauguaaaguacaaucuaauagaguauuuugugacacaaugaacagccucacacuaccauccgaagucaaccuauguaacguagauauauuuaaucccaaauacgacugcaaaauaaugacauccaaaacagauguaucaucauccguuaucaccucacuaggagccauaguuucaugcuacggaaaaacaaaaugcacugcaucuaacaaaaauagagguauaauaaaaacauuuuccaacggcugcgacuacgucucaaacaaaggcguagacaccguaucaguaggaaauacauuauauugcguaaauaaacaagaaggccaaucccuauacguaaaaggagaacccaucauaaacuucuaugacccacuuguuuuccccucagacgaauuugacgccucaauaucacaaguaaaugaaaaaauaaaccaaucucuugccuucauuagaaaaucagacgaauuacuacacaacgucaacgcaggaaaaucaacaacaaacaucaugauaacaacgauaauaauagucauaauaguaauacuacuaucauuaaucgcagucggacuccuauuauauugcaaagcuagauaaggacuaguggaagcauuuuccuggcugauuaaaagaaauuacucagcuauggucaucuguuccuguuagaaggcuaugcagcauauuauauacuaugcgcauguuaugaaaugcauaauaaaaaauuuuaaaaaaucuaaaagaucuaaaaaaaaaaaaaaaaaaaaaaaaaaaaaaaaaaaaaaaaaaaaaaaaaaaaaaaaaaaaaaaaugcaucccccccccccccccccccccccccccccccaaaggcucuuuucagagccaccagaauu

SEQ ID NO: 3649 - RNA, 1994 nt, Artificial Sequence
  mRNA product Design d-5 comprising derived and/or modified sequence from HRSV(A2)__F-del_DSCav1_mut3 (opt11)
gggagagggcgcuuggcuugcaaggacccugagcugcggcauugaagcacacccaacccaacucgacugaagucagccucacugaaccggaucugagaaucuucucucucugggcuugccagggcucuccgaaccuagcuagcauccucuucaauuccaacuagaaagcuuaccauggaacuacucauacuaaaagccaacgccauaaccaccauccucaccgcaguaacuuucugcuucgcuuccggccaaaacaucaccgaagaauuuuaccaaaguaccugcagcgcagucucaaaaggauaccuaggcgcccuacgcacaggcugguacaccuccgucauuaccaucgaacucuccaacaucaaagaaauuaaaugcaacgguacagacgcaaaagucaaacucaucaaacaagaacucgacaaauacaaaaacgcagucaccgaccuccaacuccucaugcaauccacccccgccacaggcucuggcuccgccaucugcucaggcguagcagucugcaaaguccugcaccucgaaggcgaagucaacaaaaucaagucagcccuccucuccaccaacaaggccgucguaucccucucaaacggaguuagcguccucaccuucaaaguccuagaccucaaaaacuacaucgauaaacaacuacuccccauccuaaacaaacaaucaugcuccaucccaaacaucgaaaccguaaucgaguuccaacaaaagaacaaccgccuccucgaaaucacacgugaguucuccguuaacgccggcgucaccacccccgucucuacauacaugcucaccaacuccgaacuccuuucccucaucaacgacaugccaaucaccaacgaccaaaagaaacucaugucaaacaacguacaaaucguccgacaacaaagcuacuccaucaugugcaucaucaaagaagaaguccuugcauacgucguucaacuaccccucuacggcguaaucgacacucccugcuggaaacuccacaccuccccgcucugcacaaccaacaccaaagaaggcagcaacaucugccucacccgaaccgaccgcggcugguacugcgauaacgccggauccgucuccuucuucccacaagcagaaacuugcaaaguccaauccaaccgcgucuucugcgacaccaugaacucccucacacuccccuccgaagucaaccugugcaacgucgacaucuucaacccaaaauacgacugcaaaaucaugaccucaaaaaccgacgucucaucuucugucaucaccucucucggcgcuaucgucuccugcuauggcaaaaccaaaugcaccgccuccaacaagaaccgcggcauuaucaagaccuucuccaacggcugcgacuacgucuccaauaagggcgucgacaccgucucugucggcaacacccuuuacugcguaaacaaacaagaaggucaaucucucuacgucaaaggagaacccaucaucaacuucuacgacccccuggucuuccccuccgacgaguucgaugcaucaaucucccaagucaacgaaaagaucaaccaaucucucgcuuucauccgcaaauccgacgaacuccuacacaacguaaacgccggcaaauccaccacaaacaucaugaucaccaccauuaucauagucaucaucgucauccuccucuccuuaaucgccguuggccuccuucucuacugcaaagcccgauaaggacuaguggaagcauuuuccuggcugauuaaaagaaauuacucagcuauggucaucuguuccuguuagaaggcuaugcagcauauuauauacuaugcgcauguuaugaaaugcauaauaaaaaauuuuaaaaaaucuaaaagaucuaaaaaaaaaaaaaaaaaaaaaaaaaaaaaaaaaaaaaaaaaaaaaaaaaaaaaaaaaaaaaaaaugcaucccccccccccccccccccccccccccccccaaaggcucuuuucagagccaccagaauu

SEQ ID NO: 3650 - RNA, 1874 nt, Artificial Sequence
  mRNA product Design e-1 comprising derived and/or modified sequence from HRSV(A2)__F-del_DSCav1_mut3 (opt1)
gggagaauauaagcguuggcggagcgucgguuguagcacucugcgcgcccgcucuucugcugcuguuugucuacuuccuccugcuuccccgccgccgccgccgccaucaagcuuaccauggagcugcucauccugaaggccaacgccaucaccaccauccugacggcggugaccuucugcuucgccagcggccagaacaucaccgaggaguucuaccaguccacgugcagcgccgucuccaagggguaccucggcgcccugcggaccggcugguacaccuccgugaucaccaucgagcugagcaacaucaaggagaucaagugcaacgggaccgacgccaaggugaagcucaucaagcaggagcuggacaaguacaagaacgcggucacggaccugcagcuccugaugcaguccaccccggcaaccggcuccggcuccgccaucugcagcggcgucgccgugugcaaggugcugcaccucgagggggaggucaacaagaucaagagcgcccugcuguccaccaacaaggccguggugagccucuccaacggcgucagcgugcugaccuucaaggugcuggaccucaagaacuacaucgacaagcagcugcugcccauccugaacaagcagagcugcuccauccccaacaucgagacggugaucgaguuccagcagaagaacaaccggcuccuggagaucacccgcgaguucagcgugaacgccggggucaccacccccguguccacguacaugcugaccaacagcgagcuccugucccugaucaacgacaugccgaucaccaacgaccagaagaagcucaugagcaacaacgugcagaucguccggcagcaguccuacagcaucaugugcaucaucaaggaggaggugcuggcguacgugguccagcugccccucuacggcgugaucgacacccccugcuggaagcugcacacgagcccccugugcaccaccaacaccaaggagggguccaacaucugccucacgcgcaccgaccggggcugguacugcgacaacgccggcagcgucuccuucuucccgcaggccgagaccugcaaggugcagagcaaccgcguguucugcgacaccaugaacucccugacgcugcccagcgagguaaaccucugcaacgucgacaucuucaaccccaaguacgacugcaagaucaugaccuccaagaccgacgugagcuccagcgugaucaccucccugggggccaucgucagcugcuacggcaagacgaagugcaccgccagcaacaagaaccgggggaucaucaagaccuucuccaacggcugcgacuacgugagcaacaagggcguggacaccguguccgucgggaacacccuguacugcgugaacaagcaggagggccagagccucuacgugaagggggagcccaucaucaacuucuacgacccgcuggucuuccccuccgacgaguucgacgcgagcaucucccaggugaacgagaagaucaaccagagccuggccuucauccgcaaguccgacgagcugcuccacaacgugaacgccggcaagagcacgaccaacaucaugaucaccaccaucaucaucgucaucaucgugauccugcugucccucaucgccguggggcugcugcucuacugcaaggcccggugaggacuaguguccaccugucccuccugggcugcuggauugucucguuuuccugccaaauaaacaggaucagcgcuuuacagaucuaaaaaaaaaaaaaaaaaaaaaaaaaaaaaaaaaaaaaaaaaaaaaaaaaaaaaaaaaaaaaaaaugcaucccccccccccccccccccccccccccccccaaaggcucuuuucagagccaccagaauu

SEQ ID NO: 3651 - RNA, 1874 nt, Artificial Sequence
  mRNA product Design e-1 comprising derived and/or modified sequence from HRSV(A2)__F-del_DSCav1_mut3 (opt1)
gggagaauauaagcguuggcggagcgucgguuguagcacucugcgcgcccgcucuucugcugcuguuugucuacuuccuccugcuuccccgccgccgccgccgccaucaagcuuaccauggagcugcucauccugaaggccaacgccaucaccaccauccugacggcggugaccuucugcuucgccagcggccagaacaucaccgaggaguucuaccaguccacgugcagcgccgucuccaagggguaccucggcgcccugcgcaccgggugguacaccagcgugaucaccaucgagcuguccaacaucaaggagaucaagugcaacggcaccgacgccaaggugaagcucaucaagcaggagcuggacaaguacaagaacgcggucacggaccugcagcuccugaugcagagcacccccgccaccggguccggcagcgccaucugcuccggcguggccgugugcaagguccugcaccucgagggggaggugaacaagaucaagagcgcgcugcuguccaccaacaaggccguggucagccucuccaacggcgugagcgugcugacguucaagguccuggaccucaagaacuacaucgacaagcagcugcugccgauccucaacaagcaguccugcagcauccccaacaucgagaccgugaucgaguuccagcagaagaacaaccggcugcuggagaucacccgcgaguucuccgugaacgccggggucaccacgcccgugagcaccuacaugcucaccaacuccgagcugcugagccucaucaacgacaugcccaucaccaacgaccagaagaagcugaugagcaacaacgugcagaucguccggcagcaguccuacagcaucaugugcaucaucaaggaggaggugcuggccuacgugguccagcucccgcuguacggcgugaucgacacgcccugcuggaagcugcacaccagcccccucugcaccaccaacacgaaggagggguccaacaucugccugacccgcaccgaccggggcugguacugcgacaacgccggcuccgugagcuucuucccccaggcggagaccugcaagguccaguccaaccgcguguucugcgacacgaugaacagccugacccucccguccgaggucaaccugugcaacguggacaucuucaaccccaaguacgacugcaagaucaugaccagcaagaccgacguguccagcuccgucaucacgagccugggggccaucguguccugcuacggcaagaccaagugcaccgccagcaacaagaaccgggggaucaucaagaccuucuccaacggcugcgacuacgugagcaacaagggcgucgacacgguguccguggggaacacccucuacugcgucaacaagcaggagggccagagccuguacgugaagggggagcccaucaucaacuucuacgacccccugguguucccgagcgacgaguucgacgccuccaucagccaggucaacgagaagaucaaccagucccucgccuucauccgcaagagcgacgagcugcugcacaacgugaacgcgggcaaguccaccaccaacaucaugaucaccacgaucaucaucgugaucaucgucauccuccugagccugaucgccguggggcuccugcuguacugcaaggcccggugaggacuaguguccaccugucccuccugggcugcuggauugucucguuuuccugccaaauaaacaggaucagcgcuuuacagaucuaaaaaaaaaaaaaaaaaaaaaaaaaaaaaaaaaaaaaaaaaaaaaaaaaaaaaaaaaaaaaaaaugcaucccccccccccccccccccccccccccccccaaaggcucuuuucagagccaccagaauu

SEQ ID NO: 3652 - RNA, 1874 nt, Artificial Sequence
  mRNA product Design e-1 comprising derived and/or modified sequence from HRSV(A2)__F-del_DSCav1_mut3 (opt2)
gggagaauauaagcguuggcggagcgucgguuguagcacucugcgcgcccgcucuucugcugcuguuugucuacuuccuccugcuuccccgccgccgccgccgccaucaagcuuaccauggagcuccucauccucaaggccaacgccaucaccaccauccucaccgccgucaccuucugcuucgccuccggccagaacaucaccgaggaguucuaccaguccaccugcuccgccgucuccaagggcuaccucggcgcccuccgcaccggcugguacaccuccgucaucaccaucgagcucuccaacaucaaggagaucaagugcaacggcaccgacgccaaggucaagcucaucaagcaggagcucgacaaguacaagaacgccgucaccgaccuccagcuccucaugcaguccacccccgccaccggcuccggcuccgccaucugcuccggcgucgccgucugcaagguccuccaccucgagggcgaggucaacaagaucaaguccgcccuccucuccaccaacaaggccgucgucucccucuccaacggcgucuccguccucaccuucaagguccucgaccucaagaacuacaucgacaagcagcuccuccccauccucaacaagcaguccugcuccauccccaacaucgagaccgucaucgaguuccagcagaagaacaaccgccuccucgagaucacccgcgaguucuccgucaacgccggcgucaccacccccgucuccaccuacaugcucaccaacuccgagcuccucucccucaucaacgacaugcccaucaccaacgaccagaagaagcucauguccaacaacguccagaucguccgccagcaguccuacuccaucaugugcaucaucaaggaggagguccucgccuacgucguccagcucccccucuacggcgucaucgacacccccugcuggaagcuccacaccuccccccucugcaccaccaacaccaaggagggcuccaacaucugccucacccgcaccgaccgcggcugguacugcgacaacgccggcuccgucuccuucuucccccaggccgagaccugcaagguccaguccaaccgcgucuucugcgacaccaugaacucccucacccuccccuccgaggucaaccucugcaacgucgacaucuucaaccccaaguacgacugcaagaucaugaccuccaagaccgacgucuccuccuccgucaucaccucccucggcgccaucgucuccugcuacggcaagaccaagugcaccgccuccaacaagaaccgcggcaucaucaagaccuucuccaacggcugcgacuacgucuccaacaagggcgucgacaccgucuccgucggcaacacccucuacugcgucaacaagcaggagggccagucccucuacgucaagggcgagcccaucaucaacuucuacgacccccucgucuuccccuccgacgaguucgacgccuccaucucccaggucaacgagaagaucaaccagucccucgccuucauccgcaaguccgacgagcuccuccacaacgucaacgccggcaaguccaccaccaacaucaugaucaccaccaucaucaucgucaucaucgucauccuccucucccucaucgccgucggccuccuccucuacugcaaggcccgcugaggacuaguguccaccugucccuccugggcugcuggauugucucguuuuccugccaaauaaacaggaucagcgcuuuacagaucuaaaaaaaaaaaaaaaaaaaaaaaaaaaaaaaaaaaaaaaaaaaaaaaaaaaaaaaaaaaaaaaaugcaucccccccccccccccccccccccccccccccaaaggcucuuuucagagccaccagaauu

SEQ ID NO: 3653 - RNA, 1874 nt, Artificial Sequence
  mRNA product Design e-1 comprising derived and/or modified sequence from HRSV(A2)__F-del_DSCav1_mut3 (opt3)
gggagaauauaagcguuggcggagcgucgguuguagcacucugcgcgcccgcucuucugcugcuguuugucuacuuccuccugcuuccccgccgccgccgccgccaucaagcuuaccauggagcugcucauccuuaaggccaacgcuauuaccacaauacugacugcagugacguucugcuuugccagcggccagaauaucaccgaagaguucuaccaauccacauguucugcggucucaaaaggguauuugggagcuuuaagaacugguugguacaccaguguuauuacaaucgaacugagcaacauuaaggagaucaaaugcaauggcaccgacgccaaggugaaacuaauaaagcaggaacucgauaaguauaaaaacgcaguaacugaccugcagcuucugaugcaguccacacccgccaccgggucuggaucggcuaucuguucaggcguggcagucugcaagguguugcaccucgagggugagguuaauaaaauuaagagcgcccugcugaguacgaacaaagcuguggucucccucucuaauggggugagcguauuaacuuuuaagguucuggaucuuaagaacuacaucgacaaacaauugcugccuauucuaaauaagcaguccuguucaaucccaaacauagaaaccgugauugaguuccagcagaaaaauaacaggcuccuggaaaucacacgggaguuuagugucaaugccggagugacuaccccggugagcacauauaugcuuaccaacucugagcuguugucccucauuaaugauaugcccaucacgaacgaccaaaagaaacugaugucaaacaauguccagaucguucgccagcagagcuacaguauuaugugcauaaucaaggaagagguguuagcguauguagugcaacugccucucuacggcgucauugauacuccauguuggaaacuucauacaucuccccugugcaccacuaacacaaaggaaggcuccaauaucuguuugacccgaacggaccgugggugguacugcgauaacgcaggaagcgugucguucuuuccucaggccgagaccuguaagguucagucuaauagaguguucugcgacacaaugaacucccuaacucugccaucagaagucaaucucugcaacguggauauauuuaaucccaaauaugacuguaagauuaugaccaguaaaacagauguaagcuccucuguuaucacuagccugggugcuaucgugucaugcuacggcaagaccaaauguacagccaguaacaagaauagggggauuaucaagaccuucuccaacggaugcgacuaugucagcaauaaaggcguggacacugucucuguggguaacacgcuuuacuguguuaauaagcaagaggggcagucacuguaugugaaaggagagccuauuauaaacuuuuacgauccauugguauucccgagugacgaauuugaugcaagcaucucccaggucaacgagaagauuaaucagucucucgcuuucauccggaaaucggacgaacuguuacacaacgugaaugccggcaagagcacaaccaacaucaugauuacuaccauaaucauuguuaucauugugauccugcuaucccucauagcggucggccugcuuuuguauugcaaggcccgcugaggacuaguguccaccugucccuccugggcugcuggauugucucguuuuccugccaaauaaacaggaucagcgcuuuacagaucuaaaaaaaaaaaaaaaaaaaaaaaaaaaaaaaaaaaaaaaaaaaaaaaaaaaaaaaaaaaaaaaaugcaucccccccccccccccccccccccccccccccaaaggcucuuuucagagccaccagaauu

SEQ ID NO: 3654 - RNA, 1874 nt, Artificial Sequence
  mRNA product Design e-1 comprising derived and/or modified sequence from HRSV(A2)__F-del_DSCav1_mut3 (opt4)
gggagaauauaagcguuggcggagcgucgguuguagcacucugcgcgcccgcucuucugcugcuguuugucuacuuccuccugcuuccccgccgccgccgccgccaucaagcuuaccauggagcugcugauccugaaggccaacgccaucaccaccauccugaccgccgugaccuucugcuucgccagcggccagaacaucaccgaggaguucuaccagagcaccugcagcgccgugagcaagggcuaccugggcgcccugagaaccggcugguacaccagcgugaucaccaucgagcugagcaacaucaaggagaucaagugcaacggcaccgacgccaaggugaagcugaucaagcaggagcuggacaaguacaagaacgccgugaccgaccugcagcugcugaugcagagcacccccgccaccggcagcggcagcgccaucugcagcggcguggccgugugcaaggugcugcaccuggagggcgaggugaacaagaucaagagcgcccugcugagcaccaacaaggccguggugagccugagcaacggcgugagcgugcugaccuucaaggugcuggaccugaagaacuacaucgacaagcagcugcugcccauccugaacaagcagagcugcagcauccccaacaucgagaccgugaucgaguuccagcagaagaacaacagacugcuggagaucaccagagaguucagcgugaacgccggcgugaccacccccgugagcaccuacaugcugaccaacagcgagcugcugagccugaucaacgacaugcccaucaccaacgaccagaagaagcugaugagcaacaacgugcagaucgugagacagcagagcuacagcaucaugugcaucaucaaggaggaggugcuggccuacguggugcagcugccccuguacggcgugaucgacacccccugcuggaagcugcacaccagcccccugugcaccaccaacaccaaggagggcagcaacaucugccugaccagaaccgacagaggcugguacugcgacaacgccggcagcgugagcuucuucccccaggccgagaccugcaaggugcagagcaacagaguguucugcgacaccaugaacagccugacccugcccagcgaggugaaccugugcaacguggacaucuucaaccccaaguacgacugcaagaucaugaccagcaagaccgacgugagcagcagcgugaucaccagccugggcgccaucgugagcugcuacggcaagaccaagugcaccgccagcaacaagaacagaggcaucaucaagaccuucagcaacggcugcgacuacgugagcaacaagggcguggacaccgugagcgugggcaacacccuguacugcgugaacaagcaggagggccagagccuguacgugaagggcgagcccaucaucaacuucuacgacccccugguguuccccagcgacgaguucgacgccagcaucagccaggugaacgagaagaucaaccagagccuggccuucaucagaaagagcgacgagcugcugcacaacgugaacgccggcaagagcaccaccaacaucaugaucaccaccaucaucaucgugaucaucgugauccugcugagccugaucgccgugggccugcugcuguacugcaaggccagaugaggacuaguguccaccugucccuccugggcugcuggauugucucguuuuccugccaaauaaacaggaucagcgcuuuacagaucuaaaaaaaaaaaaaaaaaaaaaaaaaaaaaaaaaaaaaaaaaaaaaaaaaaaaaaaaaaaaaaaaugcaucccccccccccccccccccccccccccccccaaaggcucuuuucagagccaccagaauu

SEQ ID NO: 3655 - RNA, 1874 nt, Artificial Sequence
  mRNA product Design e-1 comprising derived and/or modified sequence from HRSV(A2)__F-del_DSCav1_mut3 (opt5)
gggagaauauaagcguuggcggagcgucgguuguagcacucugcgcgcccgcucuucugcugcuguuugucuacuuccuccugcuuccccgccgccgccgccgccaucaagcuuaccauggagcugcucauccugaaggccaacgcuauuaccacaauccuuacggccgugaccuucugcuuugcgagcggccagaauauuacagaagaguucuaccaauccaccuguucugcugucagcaaaggguaucugggagcccucagaacaggcugguacaccuccguuaucacaauugaacugucuaacaucaaggagaucaaaugcaaugggaccgacgccaaggugaaacuuauuaagcaggaacuggauaaguauaaaaacgcugugacggaccuccagcugcugaugcagagcacccccgccacaggauccggcucugcuaucuguagcggggucgccgugugcaagguucuccaccuggagggagaggugaauaaaauuaaguccgcgcuucugagcaccaacaaagccgucgugucucucuccaauggcguuagcgugcugacauuuaagguccuugaucugaagaacuacaucgacaaacaacuccugccuauucugaauaagcagucuuguuccaucccgaacauugaaaccgugaucgaguuccagcagaaaaauaaccggcuccuggaaaucacgcgcgaguuuagcgugaaugcuggcgucacaacccccguuucuacauauaugcuuaccaacuccgagcugcucagccugauuaaugauaugccuaucaccaacgaccaaaagaaacuuauguccaacaaugugcagauugugagacagcagucuuacagcaucaugugcauuaucaaggaagagguccuggccuaugugguucaacucccccuguacggggugaucgauacaccuuguuggaaacugcauacgagcccccucugcaccacaaacaccaaggaaggauccaauauuugucugacacggaccgaccgcggcugguacugcgauaacgcugggucugucuccuucuuuccucaggccgagacguguaaggugcagagcaauagaguuuucugcgacacaaugaacucucuuacccugccgagcgaagugaaucucugcaacgucgauaucuuuaaucccaaauaugacuguaagauuaugaccuccaaaacagaugugucuagcuccgucaucaccagccugggagcgauugugucuugcuacggcaagacaaaauguacggccuccaacaagaaucgggggaucaucaagaccuucagcaacggaugcgacuauguuucuaauaaaggcguggacacagucuccgugggcaacacccuuuacuguguuaauaagcaagaggggcagagccuguaugugaaaggagagccuauuaucaacuuuuacgauccccucgucuucccuuccgacgaauuugaugcuucuauuagccaggugaacgagaagaucaaucagucccuggccuucauucgcaaaucugacgaacugcuccacaacgugaaugcuggcaagagcacaaccaacaucaugauuacgaccaucaucauuguuaucauugucauccugcuuucccugauugccguggggcuccugcuguauugcaaggccagaugaggacuaguguccaccugucccuccugggcugcuggauugucucguuuuccugccaaauaaacaggaucagcgcuuuacagaucuaaaaaaaaaaaaaaaaaaaaaaaaaaaaaaaaaaaaaaaaaaaaaaaaaaaaaaaaaaaaaaaaugcaucccccccccccccccccccccccccccccccaaaggcucuuuucagagccaccagaauu

SEQ ID NO: 3656 - RNA, 1874 nt, Artificial Sequence
  mRNA product Design e-1 comprising derived and/or modified sequence from HRSV(A2)__F-del_DSCav1_mut3 (opt6)
gggagaauauaagcguuggcggagcgucgguuguagcacucugcgcgcccgcucuucugcugcuguuugucuacuuccuccugcuuccccgccgccgccgccgccaucaagcuuaccauggaauuacuaauccugaaagcaaacgcaauuacuacaauacuaacagcaguaaccuuuugcuuugccucaggacaaaacauaacugaagaauuuuaccaaucaacuugcucagcagucucaaaaggcuaucuaggagcacuacgaacagguugguauacuucagucauaacaauagaauuaucaaacauaaaagaaauuaaauguaacggaacugacgcaaaaguaaaacucaucaaacaagaacucgauaaauacaaaaacgcuguaaccgacuuacaacuacuaaugcaaucaacuccagcaacaggcuccggauccgcaauaugcagugguguagcaguaugcaaaguccuacaccuagaaggagaaguaaauaagauaaaaucugcucuacuaucaacaaauaaagcaguugucucccuaucaaauggagucucaguacucaccuucaaaguauuagaccucaaaaacuacauagacaaacaacuauuaccaauacucaacaaacaauccugcuccaucccuaacauagaaaccguaaucgaauuucaacaaaaaaauaacagacucuuagaaauaacuagagaauuuucaguuaaugcaggcgugacaacaccaguaucaacauauaugcuaacaaacuccgaacuccuaucccuaauaaacgacaugccaaucacaaacgaccaaaaaaaacuaauguccaacaacguacaaaucguaagacaacaaucauacucuauaaugugcauaauaaaagaagaaguacuggccuacguaguacaauuaccacucuacggaguaauagacaccccaugcuggaaacuccauacaucaccccuaugcacaacaaacacaaaagaaggauccaacauaugucucacuagaacagacagaggcugguacugcgacaacgcuggauccgucucauucuucccccaagcagaaacauguaaaguacaaucuaauagaguauuuugugacacaaugaacagccucacacuaccauccgaagucaaccuauguaacguagauauauuuaaucccaaauacgacugcaaaauaaugacauccaaaacagauguaucaucauccguuaucaccucacuaggagccauaguuucaugcuacggaaaaacaaaaugcacugcaucuaacaaaaauagagguauaauaaaaacauuuuccaacggcugcgacuacgucucaaacaaaggcguagacaccguaucaguaggaaauacauuauauugcguaaauaaacaagaaggccaaucccuauacguaaaaggagaacccaucauaaacuucuaugacccacuuguuuuccccucagacgaauuugacgccucaauaucacaaguaaaugaaaaaauaaaccaaucucuugccuucauuagaaaaucagacgaauuacuacacaacgucaacgcaggaaaaucaacaacaaacaucaugauaacaacgauaauaauagucauaauaguaauacuacuaucauuaaucgcagucggacuccuauuauauugcaaagcuagauaaggacuaguguccaccugucccuccugggcugcuggauugucucguuuuccugccaaauaaacaggaucagcgcuuuacagaucuaaaaaaaaaaaaaaaaaaaaaaaaaaaaaaaaaaaaaaaaaaaaaaaaaaaaaaaaaaaaaaaaugcaucccccccccccccccccccccccccccccccaaaggcucuuuucagagccaccagaauu

SEQ ID NO: 3657 - RNA, 1874 nt, Artificial Sequence
  mRNA product Design e-1 comprising derived and/or modified sequence from HRSV(A2)__F-del_DSCav1_mut3 (opt11)
gggagaauauaagcguuggcggagcgucgguuguagcacucugcgcgcccgcucuucugcugcuguuugucuacuuccuccugcuuccccgccgccgccgccgccaucaagcuuaccauggaacuacucauacuaaaagccaacgccauaaccaccauccucaccgcaguaacuuucugcuucgcuuccggccaaaacaucaccgaagaauuuuaccaaaguaccugcagcgcagucucaaaaggauaccuaggcgcccuacgcacaggcugguacaccuccgucauuaccaucgaacucuccaacaucaaagaaauuaaaugcaacgguacagacgcaaaagucaaacucaucaaacaagaacucgacaaauacaaaaacgcagucaccgaccuccaacuccucaugcaauccacccccgccacaggcucuggcuccgccaucugcucaggcguagcagucugcaaaguccugcaccucgaaggcgaagucaacaaaaucaagucagcccuccucuccaccaacaaggccgucguaucccucucaaacggaguuagcguccucaccuucaaaguccuagaccucaaaaacuacaucgauaaacaacuacuccccauccuaaacaaacaaucaugcuccaucccaaacaucgaaaccguaaucgaguuccaacaaaagaacaaccgccuccucgaaaucacacgugaguucuccguuaacgccggcgucaccacccccgucucuacauacaugcucaccaacuccgaacuccuuucccucaucaacgacaugccaaucaccaacgaccaaaagaaacucaugucaaacaacguacaaaucguccgacaacaaagcuacuccaucaugugcaucaucaaagaagaaguccuugcauacgucguucaacuaccccucuacggcguaaucgacacucccugcuggaaacuccacaccuccccgcucugcacaaccaacaccaaagaaggcagcaacaucugccucacccgaaccgaccgcggcugguacugcgauaacgccggauccgucuccuucuucccacaagcagaaacuugcaaaguccaauccaaccgcgucuucugcgacaccaugaacucccucacacuccccuccgaagucaaccugugcaacgucgacaucuucaacccaaaauacgacugcaaaaucaugaccucaaaaaccgacgucucaucuucugucaucaccucucucggcgcuaucgucuccugcuauggcaaaaccaaaugcaccgccuccaacaagaaccgcggcauuaucaagaccuucuccaacggcugcgacuacgucuccaauaagggcgucgacaccgucucugucggcaacacccuuuacugcguaaacaaacaagaaggucaaucucucuacgucaaaggagaacccaucaucaacuucuacgacccccuggucuuccccuccgacgaguucgaugcaucaaucucccaagucaacgaaaagaucaaccaaucucucgcuuucauccgcaaauccgacgaacuccuacacaacguaaacgccggcaaauccaccacaaacaucaugaucaccaccauuaucauagucaucaucgucauccuccucuccuuaaucgccguuggccuccuucucuacugcaaagcccgauaaggacuaguguccaccugucccuccugggcugcuggauugucucguuuuccugccaaauaaacaggaucagcgcuuuacagaucuaaaaaaaaaaaaaaaaaaaaaaaaaaaaaaaaaaaaaaaaaaaaaaaaaaaaaaaaaaaaaaaaugcaucccccccccccccccccccccccccccccccaaaggcucuuuucagagccaccagaauu

SEQ ID NO: 3658 - RNA, 1856 nt, Artificial Sequence
  mRNA product Design e-2 comprising derived and/or modified sequence from HRSV(A2)__F-del_DSCav1_mut3 (opt1)
gggagacccgugacccggaaguuguacggcuacgcgacuuucccucccacaaacccucgcgcccuuccuuuccuacuugggcccggcagaaagcuuaccauggagcugcucauccugaaggccaacgccaucaccaccauccugacggcggugaccuucugcuucgccagcggccagaacaucaccgaggaguucuaccaguccacgugcagcgccgucuccaagggguaccucggcgcccugcggaccggcugguacaccuccgugaucaccaucgagcugagcaacaucaaggagaucaagugcaacgggaccgacgccaaggugaagcucaucaagcaggagcuggacaaguacaagaacgcggucacggaccugcagcuccugaugcaguccaccccggcaaccggcuccggcuccgccaucugcagcggcgucgccgugugcaaggugcugcaccucgagggggaggucaacaagaucaagagcgcccugcuguccaccaacaaggccguggugagccucuccaacggcgucagcgugcugaccuucaaggugcuggaccucaagaacuacaucgacaagcagcugcugcccauccugaacaagcagagcugcuccauccccaacaucgagacggugaucgaguuccagcagaagaacaaccggcuccuggagaucacccgcgaguucagcgugaacgccggggucaccacccccguguccacguacaugcugaccaacagcgagcuccugucccugaucaacgacaugccgaucaccaacgaccagaagaagcucaugagcaacaacgugcagaucguccggcagcaguccuacagcaucaugugcaucaucaaggaggaggugcuggcguacgugguccagcugccccucuacggcgugaucgacacccccugcuggaagcugcacacgagcccccugugcaccaccaacaccaaggagggguccaacaucugccucacgcgcaccgaccggggcugguacugcgacaacgccggcagcgucuccuucuucccgcaggccgagaccugcaaggugcagagcaaccgcguguucugcgacaccaugaacucccugacgcugcccagcgagguaaaccucugcaacgucgacaucuucaaccccaaguacgacugcaagaucaugaccuccaagaccgacgugagcuccagcgugaucaccucccugggggccaucgucagcugcuacggcaagacgaagugcaccgccagcaacaagaaccgggggaucaucaagaccuucuccaacggcugcgacuacgugagcaacaagggcguggacaccguguccgucgggaacacccuguacugcgugaacaagcaggagggccagagccucuacgugaagggggagcccaucaucaacuucuacgacccgcuggucuuccccuccgacgaguucgacgcgagcaucucccaggugaacgagaagaucaaccagagccuggccuucauccgcaaguccgacgagcugcuccacaacgugaacgccggcaagagcacgaccaacaucaugaucaccaccaucaucaucgucaucaucgugauccugcugucccucaucgccguggggcugcugcucuacugcaaggcccggugaggacuaguguccaccugucccuccugggcugcuggauugucucguuuuccugccaaauaaacaggaucagcgcuuuacagaucuaaaaaaaaaaaaaaaaaaaaaaaaaaaaaaaaaaaaaaaaaaaaaaaaaaaaaaaaaaaaaaaaugcaucccccccccccccccccccccccccccccccaaaggcucuuuucagagccaccagaauu

SEQ ID NO: 3659 - RNA, 1856 nt, Artificial Sequence
  mRNA product Design e-2 comprising derived and/or modified sequence from HRSV(A2)__F-del_DSCav1_mut3 (opt1)
gggagacccgugacccggaaguuguacggcuacgcgacuuucccucccacaaacccucgcgcccuuccuuuccuacuugggcccggcagaaagcuuaccauggagcugcucauccugaaggccaacgccaucaccaccauccugacggcggugaccuucugcuucgccagcggccagaacaucaccgaggaguucuaccaguccacgugcagcgccgucuccaagggguaccucggcgcccugcgcaccgggugguacaccagcgugaucaccaucgagcuguccaacaucaaggagaucaagugcaacggcaccgacgccaaggugaagcucaucaagcaggagcuggacaaguacaagaacgcggucacggaccugcagcuccugaugcagagcacccccgccaccggguccggcagcgccaucugcuccggcguggccgugugcaagguccugcaccucgagggggaggugaacaagaucaagagcgcgcugcuguccaccaacaaggccguggucagccucuccaacggcgugagcgugcugacguucaagguccuggaccucaagaacuacaucgacaagcagcugcugccgauccucaacaagcaguccugcagcauccccaacaucgagaccgugaucgaguuccagcagaagaacaaccggcugcuggagaucacccgcgaguucuccgugaacgccggggucaccacgcccgugagcaccuacaugcucaccaacuccgagcugcugagccucaucaacgacaugcccaucaccaacgaccagaagaagcugaugagcaacaacgugcagaucguccggcagcaguccuacagcaucaugugcaucaucaaggaggaggugcuggccuacgugguccagcucccgcuguacggcgugaucgacacgcccugcuggaagcugcacaccagcccccucugcaccaccaacacgaaggagggguccaacaucugccugacccgcaccgaccggggcugguacugcgacaacgccggcuccgugagcuucuucccccaggcggagaccugcaagguccaguccaaccgcguguucugcgacacgaugaacagccugacccucccguccgaggucaaccugugcaacguggacaucuucaaccccaaguacgacugcaagaucaugaccagcaagaccgacguguccagcuccgucaucacgagccugggggccaucguguccugcuacggcaagaccaagugcaccgccagcaacaagaaccgggggaucaucaagaccuucuccaacggcugcgacuacgugagcaacaagggcgucgacacgguguccguggggaacacccucuacugcgucaacaagcaggagggccagagccuguacgugaagggggagcccaucaucaacuucuacgacccccugguguucccgagcgacgaguucgacgccuccaucagccaggucaacgagaagaucaaccagucccucgccuucauccgcaagagcgacgagcugcugcacaacgugaacgcgggcaaguccaccaccaacaucaugaucaccacgaucaucaucgugaucaucgucauccuccugagccugaucgccguggggcuccugcuguacugcaaggcccggugaggacuaguguccaccugucccuccugggcugcuggauugucucguuuuccugccaaauaaacaggaucagcgcuuuacagaucuaaaaaaaaaaaaaaaaaaaaaaaaaaaaaaaaaaaaaaaaaaaaaaaaaaaaaaaaaaaaaaaaugcaucccccccccccccccccccccccccccccccaaaggcucuuuucagagccaccagaauu

SEQ ID NO: 3660 - RNA, 1856 nt, Artificial Sequence
  mRNA product Design e-2 comprising derived and/or modified sequence from HRSV(A2)__F-del_DSCav1_mut3 (opt2)
gggagacccgugacccggaaguuguacggcuacgcgacuuucccucccacaaacccucgcgcccuuccuuuccuacuugggcccggcagaaagcuuaccauggagcuccucauccucaaggccaacgccaucaccaccauccucaccgccgucaccuucugcuucgccuccggccagaacaucaccgaggaguucuaccaguccaccugcuccgccgucuccaagggcuaccucggcgcccuccgcaccggcugguacaccuccgucaucaccaucgagcucuccaacaucaaggagaucaagugcaacggcaccgacgccaaggucaagcucaucaagcaggagcucgacaaguacaagaacgccgucaccgaccuccagcuccucaugcaguccacccccgccaccggcuccggcuccgccaucugcuccggcgucgccgucugcaagguccuccaccucgagggcgaggucaacaagaucaaguccgcccuccucuccaccaacaaggccgucgucucccucuccaacggcgucuccguccucaccuucaagguccucgaccucaagaacuacaucgacaagcagcuccuccccauccucaacaagcaguccugcuccauccccaacaucgagaccgucaucgaguuccagcagaagaacaaccgccuccucgagaucacccgcgaguucuccgucaacgccggcgucaccacccccgucuccaccuacaugcucaccaacuccgagcuccucucccucaucaacgacaugcccaucaccaacgaccagaagaagcucauguccaacaacguccagaucguccgccagcaguccuacuccaucaugugcaucaucaaggaggagguccucgccuacgucguccagcucccccucuacggcgucaucgacacccccugcuggaagcuccacaccuccccccucugcaccaccaacaccaaggagggcuccaacaucugccucacccgcaccgaccgcggcugguacugcgacaacgccggcuccgucuccuucuucccccaggccgagaccugcaagguccaguccaaccgcgucuucugcgacaccaugaacucccucacccuccccuccgaggucaaccucugcaacgucgacaucuucaaccccaaguacgacugcaagaucaugaccuccaagaccgacgucuccuccuccgucaucaccucccucggcgccaucgucuccugcuacggcaagaccaagugcaccgccuccaacaagaaccgcggcaucaucaagaccuucuccaacggcugcgacuacgucuccaacaagggcgucgacaccgucuccgucggcaacacccucuacugcgucaacaagcaggagggccagucccucuacgucaagggcgagcccaucaucaacuucuacgacccccucgucuuccccuccgacgaguucgacgccuccaucucccaggucaacgagaagaucaaccagucccucgccuucauccgcaaguccgacgagcuccuccacaacgucaacgccggcaaguccaccaccaacaucaugaucaccaccaucaucaucgucaucaucgucauccuccucucccucaucgccgucggccuccuccucuacugcaaggcccgcugaggacuaguguccaccugucccuccugggcugcuggauugucucguuuuccugccaaauaaacaggaucagcgcuuuacagaucuaaaaaaaaaaaaaaaaaaaaaaaaaaaaaaaaaaaaaaaaaaaaaaaaaaaaaaaaaaaaaaaaugcaucccccccccccccccccccccccccccccccaaaggcucuuuucagagccaccagaauu

SEQ ID NO: 3661 - RNA, 1856 nt, Artificial Sequence
  mRNA product Design e-2 comprising derived and/or modified sequence from HRSV(A2)__F-del_DSCav1_mut3 (opt3)
gggagacccgugacccggaaguuguacggcuacgcgacuuucccucccacaaacccucgcgcccuuccuuuccuacuugggcccggcagaaagcuuaccauggagcugcucauccuuaaggccaacgcuauuaccacaauacugacugcagugacguucugcuuugccagcggccagaauaucaccgaagaguucuaccaauccacauguucugcggucucaaaaggguauuugggagcuuuaagaacugguugguacaccaguguuauuacaaucgaacugagcaacauuaaggagaucaaaugcaauggcaccgacgccaaggugaaacuaauaaagcaggaacucgauaaguauaaaaacgcaguaacugaccugcagcuucugaugcaguccacacccgccaccgggucuggaucggcuaucuguucaggcguggcagucugcaagguguugcaccucgagggugagguuaauaaaauuaagagcgcccugcugaguacgaacaaagcuguggucucccucucuaauggggugagcguauuaacuuuuaagguucuggaucuuaagaacuacaucgacaaacaauugcugccuauucuaaauaagcaguccuguucaaucccaaacauagaaaccgugauugaguuccagcagaaaaauaacaggcuccuggaaaucacacgggaguuuagugucaaugccggagugacuaccccggugagcacauauaugcuuaccaacucugagcuguugucccucauuaaugauaugcccaucacgaacgaccaaaagaaacugaugucaaacaauguccagaucguucgccagcagagcuacaguauuaugugcauaaucaaggaagagguguuagcguauguagugcaacugccucucuacggcgucauugauacuccauguuggaaacuucauacaucuccccugugcaccacuaacacaaaggaaggcuccaauaucuguuugacccgaacggaccgugggugguacugcgauaacgcaggaagcgugucguucuuuccucaggccgagaccuguaagguucagucuaauagaguguucugcgacacaaugaacucccuaacucugccaucagaagucaaucucugcaacguggauauauuuaaucccaaauaugacuguaagauuaugaccaguaaaacagauguaagcuccucuguuaucacuagccugggugcuaucgugucaugcuacggcaagaccaaauguacagccaguaacaagaauagggggauuaucaagaccuucuccaacggaugcgacuaugucagcaauaaaggcguggacacugucucuguggguaacacgcuuuacuguguuaauaagcaagaggggcagucacuguaugugaaaggagagccuauuauaaacuuuuacgauccauugguauucccgagugacgaauuugaugcaagcaucucccaggucaacgagaagauuaaucagucucucgcuuucauccggaaaucggacgaacuguuacacaacgugaaugccggcaagagcacaaccaacaucaugauuacuaccauaaucauuguuaucauugugauccugcuaucccucauagcggucggccugcuuuuguauugcaaggcccgcugaggacuaguguccaccugucccuccugggcugcuggauugucucguuuuccugccaaauaaacaggaucagcgcuuuacagaucuaaaaaaaaaaaaaaaaaaaaaaaaaaaaaaaaaaaaaaaaaaaaaaaaaaaaaaaaaaaaaaaaugcaucccccccccccccccccccccccccccccccaaaggcucuuuucagagccaccagaauu

SEQ ID NO: 3662 - RNA, 1856 nt, Artificial Sequence
  mRNA product Design e-2 comprising derived and/or modified sequence from HRSV(A2)__F-del_DSCav1_mut3 (opt4)
gggagacccgugacccggaaguuguacggcuacgcgacuuucccucccacaaacccucgcgcccuuccuuuccuacuugggcccggcagaaagcuuaccauggagcugcugauccugaaggccaacgccaucaccaccauccugaccgccgugaccuucugcuucgccagcggccagaacaucaccgaggaguucuaccagagcaccugcagcgccgugagcaagggcuaccugggcgcccugagaaccggcugguacaccagcgugaucaccaucgagcugagcaacaucaaggagaucaagugcaacggcaccgacgccaaggugaagcugaucaagcaggagcuggacaaguacaagaacgccgugaccgaccugcagcugcugaugcagagcacccccgccaccggcagcggcagcgccaucugcagcggcguggccgugugcaaggugcugcaccuggagggcgaggugaacaagaucaagagcgcccugcugagcaccaacaaggccguggugagccugagcaacggcgugagcgugcugaccuucaaggugcuggaccugaagaacuacaucgacaagcagcugcugcccauccugaacaagcagagcugcagcauccccaacaucgagaccgugaucgaguuccagcagaagaacaacagacugcuggagaucaccagagaguucagcgugaacgccggcgugaccacccccgugagcaccuacaugcugaccaacagcgagcugcugagccugaucaacgacaugcccaucaccaacgaccagaagaagcugaugagcaacaacgugcagaucgugagacagcagagcuacagcaucaugugcaucaucaaggaggaggugcuggccuacguggugcagcugccccuguacggcgugaucgacacccccugcuggaagcugcacaccagcccccugugcaccaccaacaccaaggagggcagcaacaucugccugaccagaaccgacagaggcugguacugcgacaacgccggcagcgugagcuucuucccccaggccgagaccugcaaggugcagagcaacagaguguucugcgacaccaugaacagccugacccugcccagcgaggugaaccugugcaacguggacaucuucaaccccaaguacgacugcaagaucaugaccagcaagaccgacgugagcagcagcgugaucaccagccugggcgccaucgugagcugcuacggcaagaccaagugcaccgccagcaacaagaacagaggcaucaucaagaccuucagcaacggcugcgacuacgugagcaacaagggcguggacaccgugagcgugggcaacacccuguacugcgugaacaagcaggagggccagagccuguacgugaagggcgagcccaucaucaacuucuacgacccccugguguuccccagcgacgaguucgacgccagcaucagccaggugaacgagaagaucaaccagagccuggccuucaucagaaagagcgacgagcugcugcacaacgugaacgccggcaagagcaccaccaacaucaugaucaccaccaucaucaucgugaucaucgugauccugcugagccugaucgccgugggccugcugcuguacugcaaggccagaugaggacuaguguccaccugucccuccugggcugcuggauugucucguuuuccugccaaauaaacaggaucagcgcuuuacagaucuaaaaaaaaaaaaaaaaaaaaaaaaaaaaaaaaaaaaaaaaaaaaaaaaaaaaaaaaaaaaaaaaugcaucccccccccccccccccccccccccccccccaaaggcucuuuucagagccaccagaauu

SEQ ID NO: 3663 - RNA, 1856 nt, Artificial Sequence
  mRNA product Design e-2 comprising derived and/or modified sequence from HRSV(A2)__F-del_DSCav1_mut3 (opt5)
gggagacccgugacccggaaguuguacggcuacgcgacuuucccucccacaaacccucgcgcccuuccuuuccuacuugggcccggcagaaagcuuaccauggagcugcucauccugaaggccaacgcuauuaccacaauccuuacggccgugaccuucugcuuugcgagcggccagaauauuacagaagaguucuaccaauccaccuguucugcugucagcaaaggguaucugggagcccucagaacaggcugguacaccuccguuaucacaauugaacugucuaacaucaaggagaucaaaugcaaugggaccgacgccaaggugaaacuuauuaagcaggaacuggauaaguauaaaaacgcugugacggaccuccagcugcugaugcagagcacccccgccacaggauccggcucugcuaucuguagcggggucgccgugugcaagguucuccaccuggagggagaggugaauaaaauuaaguccgcgcuucugagcaccaacaaagccgucgugucucucuccaauggcguuagcgugcugacauuuaagguccuugaucugaagaacuacaucgacaaacaacuccugccuauucugaauaagcagucuuguuccaucccgaacauugaaaccgugaucgaguuccagcagaaaaauaaccggcuccuggaaaucacgcgcgaguuuagcgugaaugcuggcgucacaacccccguuucuacauauaugcuuaccaacuccgagcugcucagccugauuaaugauaugccuaucaccaacgaccaaaagaaacuuauguccaacaaugugcagauugugagacagcagucuuacagcaucaugugcauuaucaaggaagagguccuggccuaugugguucaacucccccuguacggggugaucgauacaccuuguuggaaacugcauacgagcccccucugcaccacaaacaccaaggaaggauccaauauuugucugacacggaccgaccgcggcugguacugcgauaacgcugggucugucuccuucuuuccucaggccgagacguguaaggugcagagcaauagaguuuucugcgacacaaugaacucucuuacccugccgagcgaagugaaucucugcaacgucgauaucuuuaaucccaaauaugacuguaagauuaugaccuccaaaacagaugugucuagcuccgucaucaccagccugggagcgauugugucuugcuacggcaagacaaaauguacggccuccaacaagaaucgggggaucaucaagaccuucagcaacggaugcgacuauguuucuaauaaaggcguggacacagucuccgugggcaacacccuuuacuguguuaauaagcaagaggggcagagccuguaugugaaaggagagccuauuaucaacuuuuacgauccccucgucuucccuuccgacgaauuugaugcuucuauuagccaggugaacgagaagaucaaucagucccuggccuucauucgcaaaucugacgaacugcuccacaacgugaaugcuggcaagagcacaaccaacaucaugauuacgaccaucaucauuguuaucauugucauccugcuuucccugauugccguggggcuccugcuguauugcaaggccagaugaggacuaguguccaccugucccuccugggcugcuggauugucucguuuuccugccaaauaaacaggaucagcgcuuuacagaucuaaaaaaaaaaaaaaaaaaaaaaaaaaaaaaaaaaaaaaaaaaaaaaaaaaaaaaaaaaaaaaaaugcaucccccccccccccccccccccccccccccccaaaggcucuuuucagagccaccagaauu

SEQ ID NO: 3664 - RNA, 1856 nt, Artificial Sequence
  mRNA product Design e-2 comprising derived and/or modified sequence from HRSV(A2)__F-del_DSCav1_mut3 (opt6)
gggagacccgugacccggaaguuguacggcuacgcgacuuucccucccacaaacccucgcgcccuuccuuuccuacuugggcccggcagaaagcuuaccauggaauuacuaauccugaaagcaaacgcaauuacuacaauacuaacagcaguaaccuuuugcuuugccucaggacaaaacauaacugaagaauuuuaccaaucaacuugcucagcagucucaaaaggcuaucuaggagcacuacgaacagguugguauacuucagucauaacaauagaauuaucaaacauaaaagaaauuaaauguaacggaacugacgcaaaaguaaaacucaucaaacaagaacucgauaaauacaaaaacgcuguaaccgacuuacaacuacuaaugcaaucaacuccagcaacaggcuccggauccgcaauaugcagugguguagcaguaugcaaaguccuacaccuagaaggagaaguaaauaagauaaaaucugcucuacuaucaacaaauaaagcaguugucucccuaucaaauggagucucaguacucaccuucaaaguauuagaccucaaaaacuacauagacaaacaacuauuaccaauacucaacaaacaauccugcuccaucccuaacauagaaaccguaaucgaauuucaacaaaaaaauaacagacucuuagaaauaacuagagaauuuucaguuaaugcaggcgugacaacaccaguaucaacauauaugcuaacaaacuccgaacuccuaucccuaauaaacgacaugccaaucacaaacgaccaaaaaaaacuaauguccaacaacguacaaaucguaagacaacaaucauacucuauaaugugcauaauaaaagaagaaguacuggccuacguaguacaauuaccacucuacggaguaauagacaccccaugcuggaaacuccauacaucaccccuaugcacaacaaacacaaaagaaggauccaacauaugucucacuagaacagacagaggcugguacugcgacaacgcuggauccgucucauucuucccccaagcagaaacauguaaaguacaaucuaauagaguauuuugugacacaaugaacagccucacacuaccauccgaagucaaccuauguaacguagauauauuuaaucccaaauacgacugcaaaauaaugacauccaaaacagauguaucaucauccguuaucaccucacuaggagccauaguuucaugcuacggaaaaacaaaaugcacugcaucuaacaaaaauagagguauaauaaaaacauuuuccaacggcugcgacuacgucucaaacaaaggcguagacaccguaucaguaggaaauacauuauauugcguaaauaaacaagaaggccaaucccuauacguaaaaggagaacccaucauaaacuucuaugacccacuuguuuuccccucagacgaauuugacgccucaauaucacaaguaaaugaaaaaauaaaccaaucucuugccuucauuagaaaaucagacgaauuacuacacaacgucaacgcaggaaaaucaacaacaaacaucaugauaacaacgauaauaauagucauaauaguaauacuacuaucauuaaucgcagucggacuccuauuauauugcaaagcuagauaaggacuaguguccaccugucccuccugggcugcuggauugucucguuuuccugccaaauaaacaggaucagcgcuuuacagaucuaaaaaaaaaaaaaaaaaaaaaaaaaaaaaaaaaaaaaaaaaaaaaaaaaaaaaaaaaaaaaaaaugcaucccccccccccccccccccccccccccccccaaaggcucuuuucagagccaccagaauu

SEQ ID NO: 3665 - RNA, 1856 nt, Artificial Sequence
  mRNA product Design e-2 comprising derived and/or modified sequence from HRSV(A2)__F-del_DSCav1_mut3 (opt11)
gggagacccgugacccggaaguuguacggcuacgcgacuuucccucccacaaacccucgcgcccuuccuuuccuacuugggcccggcagaaagcuuaccauggaacuacucauacuaaaagccaacgccauaaccaccauccucaccgcaguaacuuucugcuucgcuuccggccaaaacaucaccgaagaauuuuaccaaaguaccugcagcgcagucucaaaaggauaccuaggcgcccuacgcacaggcugguacaccuccgucauuaccaucgaacucuccaacaucaaagaaauuaaaugcaacgguacagacgcaaaagucaaacucaucaaacaagaacucgacaaauacaaaaacgcagucaccgaccuccaacuccucaugcaauccacccccgccacaggcucuggcuccgccaucugcucaggcguagcagucugcaaaguccugcaccucgaaggcgaagucaacaaaaucaagucagcccuccucuccaccaacaaggccgucguaucccucucaaacggaguuagcguccucaccuucaaaguccuagaccucaaaaacuacaucgauaaacaacuacuccccauccuaaacaaacaaucaugcuccaucccaaacaucgaaaccguaaucgaguuccaacaaaagaacaaccgccuccucgaaaucacacgugaguucuccguuaacgccggcgucaccacccccgucucuacauacaugcucaccaacuccgaacuccuuucccucaucaacgacaugccaaucaccaacgaccaaaagaaacucaugucaaacaacguacaaaucguccgacaacaaagcuacuccaucaugugcaucaucaaagaagaaguccuugcauacgucguucaacuaccccucuacggcguaaucgacacucccugcuggaaacuccacaccuccccgcucugcacaaccaacaccaaagaaggcagcaacaucugccucacccgaaccgaccgcggcugguacugcgauaacgccggauccgucuccuucuucccacaagcagaaacuugcaaaguccaauccaaccgcgucuucugcgacaccaugaacucccucacacuccccuccgaagucaaccugugcaacgucgacaucuucaacccaaaauacgacugcaaaaucaugaccucaaaaaccgacgucucaucuucugucaucaccucucucggcgcuaucgucuccugcuauggcaaaaccaaaugcaccgccuccaacaagaaccgcggcauuaucaagaccuucuccaacggcugcgacuacgucuccaauaagggcgucgacaccgucucugucggcaacacccuuuacugcguaaacaaacaagaaggucaaucucucuacgucaaaggagaacccaucaucaacuucuacgacccccuggucuuccccuccgacgaguucgaugcaucaaucucccaagucaacgaaaagaucaaccaaucucucgcuuucauccgcaaauccgacgaacuccuacacaacguaaacgccggcaaauccaccacaaacaucaugaucaccaccauuaucauagucaucaucgucauccuccucuccuuaaucgccguuggccuccuucucuacugcaaagcccgauaaggacuaguguccaccugucccuccugggcugcuggauugucucguuuuccugccaaauaaacaggaucagcgcuuuacagaucuaaaaaaaaaaaaaaaaaaaaaaaaaaaaaaaaaaaaaaaaaaaaaaaaaaaaaaaaaaaaaaaaugcaucccccccccccccccccccccccccccccccaaaggcucuuuucagagccaccagaauu

SEQ ID NO: 3666 - RNA, 1826 nt, Artificial Sequence
  mRNA product Design e-3 comprising derived and/or modified sequence from HRSV(A2)__F-del_DSCav1_mut3 (opt1)
gggagacuuucccauucuguagcagaauuugguguugccuguggucuuggucccgcggagaagcuuaccauggagcugcucauccugaaggccaacgccaucaccaccauccugacggcggugaccuucugcuucgccagcggccagaacaucaccgaggaguucuaccaguccacgugcagcgccgucuccaagggguaccucggcgcccugcggaccggcugguacaccuccgugaucaccaucgagcugagcaacaucaaggagaucaagugcaacgggaccgacgccaaggugaagcucaucaagcaggagcuggacaaguacaagaacgcggucacggaccugcagcuccugaugcaguccaccccggcaaccggcuccggcuccgccaucugcagcggcgucgccgugugcaaggugcugcaccucgagggggaggucaacaagaucaagagcgcccugcuguccaccaacaaggccguggugagccucuccaacggcgucagcgugcugaccuucaaggugcuggaccucaagaacuacaucgacaagcagcugcugcccauccugaacaagcagagcugcuccauccccaacaucgagacggugaucgaguuccagcagaagaacaaccggcuccuggagaucacccgcgaguucagcgugaacgccggggucaccacccccguguccacguacaugcugaccaacagcgagcuccugucccugaucaacgacaugccgaucaccaacgaccagaagaagcucaugagcaacaacgugcagaucguccggcagcaguccuacagcaucaugugcaucaucaaggaggaggugcuggcguacgugguccagcugccccucuacggcgugaucgacacccccugcuggaagcugcacacgagcccccugugcaccaccaacaccaaggagggguccaacaucugccucacgcgcaccgaccggggcugguacugcgacaacgccggcagcgucuccuucuucccgcaggccgagaccugcaaggugcagagcaaccgcguguucugcgacaccaugaacucccugacgcugcccagcgagguaaaccucugcaacgucgacaucuucaaccccaaguacgacugcaagaucaugaccuccaagaccgacgugagcuccagcgugaucaccucccugggggccaucgucagcugcuacggcaagacgaagugcaccgccagcaacaagaaccgggggaucaucaagaccuucuccaacggcugcgacuacgugagcaacaagggcguggacaccguguccgucgggaacacccuguacugcgugaacaagcaggagggccagagccucuacgugaagggggagcccaucaucaacuucuacgacccgcuggucuuccccuccgacgaguucgacgcgagcaucucccaggugaacgagaagaucaaccagagccuggccuucauccgcaaguccgacgagcugcuccacaacgugaacgccggcaagagcacgaccaacaucaugaucaccaccaucaucaucgucaucaucgugauccugcugucccucaucgccguggggcugcugcucuacugcaaggcccggugaggacuaguguccaccugucccuccugggcugcuggauugucucguuuuccugccaaauaaacaggaucagcgcuuuacagaucuaaaaaaaaaaaaaaaaaaaaaaaaaaaaaaaaaaaaaaaaaaaaaaaaaaaaaaaaaaaaaaaaugcaucccccccccccccccccccccccccccccccaaaggcucuuuucagagccaccagaauu

SEQ ID NO: 3667 - RNA, 1826 nt, Artificial Sequence
  mRNA product Design e-3 comprising derived and/or modified sequence from HRSV(A2)__F-del_DSCav1_mut3 (opt1)
gggagacuuucccauucuguagcagaauuugguguugccuguggucuuggucccgcggagaagcuuaccauggagcugcucauccugaaggccaacgccaucaccaccauccugacggcggugaccuucugcuucgccagcggccagaacaucaccgaggaguucuaccaguccacgugcagcgccgucuccaagggguaccucggcgcccugcgcaccgggugguacaccagcgugaucaccaucgagcuguccaacaucaaggagaucaagugcaacggcaccgacgccaaggugaagcucaucaagcaggagcuggacaaguacaagaacgcggucacggaccugcagcuccugaugcagagcacccccgccaccggguccggcagcgccaucugcuccggcguggccgugugcaagguccugcaccucgagggggaggugaacaagaucaagagcgcgcugcuguccaccaacaaggccguggucagccucuccaacggcgugagcgugcugacguucaagguccuggaccucaagaacuacaucgacaagcagcugcugccgauccucaacaagcaguccugcagcauccccaacaucgagaccgugaucgaguuccagcagaagaacaaccggcugcuggagaucacccgcgaguucuccgugaacgccggggucaccacgcccgugagcaccuacaugcucaccaacuccgagcugcugagccucaucaacgacaugcccaucaccaacgaccagaagaagcugaugagcaacaacgugcagaucguccggcagcaguccuacagcaucaugugcaucaucaaggaggaggugcuggccuacgugguccagcucccgcuguacggcgugaucgacacgcccugcuggaagcugcacaccagcccccucugcaccaccaacacgaaggagggguccaacaucugccugacccgcaccgaccggggcugguacugcgacaacgccggcuccgugagcuucuucccccaggcggagaccugcaagguccaguccaaccgcguguucugcgacacgaugaacagccugacccucccguccgaggucaaccugugcaacguggacaucuucaaccccaaguacgacugcaagaucaugaccagcaagaccgacguguccagcuccgucaucacgagccugggggccaucguguccugcuacggcaagaccaagugcaccgccagcaacaagaaccgggggaucaucaagaccuucuccaacggcugcgacuacgugagcaacaagggcgucgacacgguguccguggggaacacccucuacugcgucaacaagcaggagggccagagccuguacgugaagggggagcccaucaucaacuucuacgacccccugguguucccgagcgacgaguucgacgccuccaucagccaggucaacgagaagaucaaccagucccucgccuucauccgcaagagcgacgagcugcugcacaacgugaacgcgggcaaguccaccaccaacaucaugaucaccacgaucaucaucgugaucaucgucauccuccugagccugaucgccguggggcuccugcuguacugcaaggcccggugaggacuaguguccaccugucccuccugggcugcuggauugucucguuuuccugccaaauaaacaggaucagcgcuuuacagaucuaaaaaaaaaaaaaaaaaaaaaaaaaaaaaaaaaaaaaaaaaaaaaaaaaaaaaaaaaaaaaaaaugcaucccccccccccccccccccccccccccccccaaaggcucuuuucagagccaccagaauu

SEQ ID NO: 3668 - RNA, 1826 nt, Artificial Sequence
  mRNA product Design e-3 comprising derived and/or modified sequence from HRSV(A2)__F-del_DSCav1_mut3 (opt2)
gggagacuuucccauucuguagcagaauuugguguugccuguggucuuggucccgcggagaagcuuaccauggagcuccucauccucaaggccaacgccaucaccaccauccucaccgccgucaccuucugcuucgccuccggccagaacaucaccgaggaguucuaccaguccaccugcuccgccgucuccaagggcuaccucggcgcccuccgcaccggcugguacaccuccgucaucaccaucgagcucuccaacaucaaggagaucaagugcaacggcaccgacgccaaggucaagcucaucaagcaggagcucgacaaguacaagaacgccgucaccgaccuccagcuccucaugcaguccacccccgccaccggcuccggcuccgccaucugcuccggcgucgccgucugcaagguccuccaccucgagggcgaggucaacaagaucaaguccgcccuccucuccaccaacaaggccgucgucucccucuccaacggcgucuccguccucaccuucaagguccucgaccucaagaacuacaucgacaagcagcuccuccccauccucaacaagcaguccugcuccauccccaacaucgagaccgucaucgaguuccagcagaagaacaaccgccuccucgagaucacccgcgaguucuccgucaacgccggcgucaccacccccgucuccaccuacaugcucaccaacuccgagcuccucucccucaucaacgacaugcccaucaccaacgaccagaagaagcucauguccaacaacguccagaucguccgccagcaguccuacuccaucaugugcaucaucaaggaggagguccucgccuacgucguccagcucccccucuacggcgucaucgacacccccugcuggaagcuccacaccuccccccucugcaccaccaacaccaaggagggcuccaacaucugccucacccgcaccgaccgcggcugguacugcgacaacgccggcuccgucuccuucuucccccaggccgagaccugcaagguccaguccaaccgcgucuucugcgacaccaugaacucccucacccuccccuccgaggucaaccucugcaacgucgacaucuucaaccccaaguacgacugcaagaucaugaccuccaagaccgacgucuccuccuccgucaucaccucccucggcgccaucgucuccugcuacggcaagaccaagugcaccgccuccaacaagaaccgcggcaucaucaagaccuucuccaacggcugcgacuacgucuccaacaagggcgucgacaccgucuccgucggcaacacccucuacugcgucaacaagcaggagggccagucccucuacgucaagggcgagcccaucaucaacuucuacgacccccucgucuuccccuccgacgaguucgacgccuccaucucccaggucaacgagaagaucaaccagucccucgccuucauccgcaaguccgacgagcuccuccacaacgucaacgccggcaaguccaccaccaacaucaugaucaccaccaucaucaucgucaucaucgucauccuccucucccucaucgccgucggccuccuccucuacugcaaggcccgcugaggacuaguguccaccugucccuccugggcugcuggauugucucguuuuccugccaaauaaacaggaucagcgcuuuacagaucuaaaaaaaaaaaaaaaaaaaaaaaaaaaaaaaaaaaaaaaaaaaaaaaaaaaaaaaaaaaaaaaaugcaucccccccccccccccccccccccccccccccaaaggcucuuuucagagccaccagaauu

SEQ ID NO: 3669 - RNA, 1826 nt, Artificial Sequence
  mRNA product Design e-3 comprising derived and/or modified sequence from HRSV(A2)__F-del_DSCav1_mut3 (opt3)
gggagacuuucccauucuguagcagaauuugguguugccuguggucuuggucccgcggagaagcuuaccauggagcugcucauccuuaaggccaacgcuauuaccacaauacugacugcagugacguucugcuuugccagcggccagaauaucaccgaagaguucuaccaauccacauguucugcggucucaaaaggguauuugggagcuuuaagaacugguugguacaccaguguuauuacaaucgaacugagcaacauuaaggagaucaaaugcaauggcaccgacgccaaggugaaacuaauaaagcaggaacucgauaaguauaaaaacgcaguaacugaccugcagcuucugaugcaguccacacccgccaccgggucuggaucggcuaucuguucaggcguggcagucugcaagguguugcaccucgagggugagguuaauaaaauuaagagcgcccugcugaguacgaacaaagcuguggucucccucucuaauggggugagcguauuaacuuuuaagguucuggaucuuaagaacuacaucgacaaacaauugcugccuauucuaaauaagcaguccuguucaaucccaaacauagaaaccgugauugaguuccagcagaaaaauaacaggcuccuggaaaucacacgggaguuuagugucaaugccggagugacuaccccggugagcacauauaugcuuaccaacucugagcuguugucccucauuaaugauaugcccaucacgaacgaccaaaagaaacugaugucaaacaauguccagaucguucgccagcagagcuacaguauuaugugcauaaucaaggaagagguguuagcguauguagugcaacugccucucuacggcgucauugauacuccauguuggaaacuucauacaucuccccugugcaccacuaacacaaaggaaggcuccaauaucuguuugacccgaacggaccgugggugguacugcgauaacgcaggaagcgugucguucuuuccucaggccgagaccuguaagguucagucuaauagaguguucugcgacacaaugaacucccuaacucugccaucagaagucaaucucugcaacguggauauauuuaaucccaaauaugacuguaagauuaugaccaguaaaacagauguaagcuccucuguuaucacuagccugggugcuaucgugucaugcuacggcaagaccaaauguacagccaguaacaagaauagggggauuaucaagaccuucuccaacggaugcgacuaugucagcaauaaaggcguggacacugucucuguggguaacacgcuuuacuguguuaauaagcaagaggggcagucacuguaugugaaaggagagccuauuauaaacuuuuacgauccauugguauucccgagugacgaauuugaugcaagcaucucccaggucaacgagaagauuaaucagucucucgcuuucauccggaaaucggacgaacuguuacacaacgugaaugccggcaagagcacaaccaacaucaugauuacuaccauaaucauuguuaucauugugauccugcuaucccucauagcggucggccugcuuuuguauugcaaggcccgcugaggacuaguguccaccugucccuccugggcugcuggauugucucguuuuccugccaaauaaacaggaucagcgcuuuacagaucuaaaaaaaaaaaaaaaaaaaaaaaaaaaaaaaaaaaaaaaaaaaaaaaaaaaaaaaaaaaaaaaaugcaucccccccccccccccccccccccccccccccaaaggcucuuuucagagccaccagaauu

SEQ ID NO: 3670 - RNA, 1826 nt, Artificial Sequence
  mRNA product Design e-3 comprising derived and/or modified sequence from HRSV(A2)__F-del_DSCav1_mut3 (opt4)
gggagacuuucccauucuguagcagaauuugguguugccuguggucuuggucccgcggagaagcuuaccauggagcugcugauccugaaggccaacgccaucaccaccauccugaccgccgugaccuucugcuucgccagcggccagaacaucaccgaggaguucuaccagagcaccugcagcgccgugagcaagggcuaccugggcgcccugagaaccggcugguacaccagcgugaucaccaucgagcugagcaacaucaaggagaucaagugcaacggcaccgacgccaaggugaagcugaucaagcaggagcuggacaaguacaagaacgccgugaccgaccugcagcugcugaugcagagcacccccgccaccggcagcggcagcgccaucugcagcggcguggccgugugcaaggugcugcaccuggagggcgaggugaacaagaucaagagcgcccugcugagcaccaacaaggccguggugagccugagcaacggcgugagcgugcugaccuucaaggugcuggaccugaagaacuacaucgacaagcagcugcugcccauccugaacaagcagagcugcagcauccccaacaucgagaccgugaucgaguuccagcagaagaacaacagacugcuggagaucaccagagaguucagcgugaacgccggcgugaccacccccgugagcaccuacaugcugaccaacagcgagcugcugagccugaucaacgacaugcccaucaccaacgaccagaagaagcugaugagcaacaacgugcagaucgugagacagcagagcuacagcaucaugugcaucaucaaggaggaggugcuggccuacguggugcagcugccccuguacggcgugaucgacacccccugcuggaagcugcacaccagcccccugugcaccaccaacaccaaggagggcagcaacaucugccugaccagaaccgacagaggcugguacugcgacaacgccggcagcgugagcuucuucccccaggccgagaccugcaaggugcagagcaacagaguguucugcgacaccaugaacagccugacccugcccagcgaggugaaccugugcaacguggacaucuucaaccccaaguacgacugcaagaucaugaccagcaagaccgacgugagcagcagcgugaucaccagccugggcgccaucgugagcugcuacggcaagaccaagugcaccgccagcaacaagaacagaggcaucaucaagaccuucagcaacggcugcgacuacgugagcaacaagggcguggacaccgugagcgugggcaacacccuguacugcgugaacaagcaggagggccagagccuguacgugaagggcgagcccaucaucaacuucuacgacccccugguguuccccagcgacgaguucgacgccagcaucagccaggugaacgagaagaucaaccagagccuggccuucaucagaaagagcgacgagcugcugcacaacgugaacgccggcaagagcaccaccaacaucaugaucaccaccaucaucaucgugaucaucgugauccugcugagccugaucgccgugggccugcugcuguacugcaaggccagaugaggacuaguguccaccugucccuccugggcugcuggauugucucguuuuccugccaaauaaacaggaucagcgcuuuacagaucuaaaaaaaaaaaaaaaaaaaaaaaaaaaaaaaaaaaaaaaaaaaaaaaaaaaaaaaaaaaaaaaaugcaucccccccccccccccccccccccccccccccaaaggcucuuuucagagccaccagaauu

SEQ ID NO: 3671 - RNA, 1826 nt, Artificial Sequence
  mRNA product Design e-3 comprising derived and/or modified sequence from HRSV(A2)__F-del_DSCav1_mut3 (opt5)
gggagacuuucccauucuguagcagaauuugguguugccuguggucuuggucccgcggagaagcuuaccauggagcugcucauccugaaggccaacgcuauuaccacaauccuuacggccgugaccuucugcuuugcgagcggccagaauauuacagaagaguucuaccaauccaccuguucugcugucagcaaaggguaucugggagcccucagaacaggcugguacaccuccguuaucacaauugaacugucuaacaucaaggagaucaaaugcaaugggaccgacgccaaggugaaacuuauuaagcaggaacuggauaaguauaaaaacgcugugacggaccuccagcugcugaugcagagcacccccgccacaggauccggcucugcuaucuguagcggggucgccgugugcaagguucuccaccuggagggagaggugaauaaaauuaaguccgcgcuucugagcaccaacaaagccgucgugucucucuccaauggcguuagcgugcugacauuuaagguccuugaucugaagaacuacaucgacaaacaacuccugccuauucugaauaagcagucuuguuccaucccgaacauugaaaccgugaucgaguuccagcagaaaaauaaccggcuccuggaaaucacgcgcgaguuuagcgugaaugcuggcgucacaacccccguuucuacauauaugcuuaccaacuccgagcugcucagccugauuaaugauaugccuaucaccaacgaccaaaagaaacuuauguccaacaaugugcagauugugagacagcagucuuacagcaucaugugcauuaucaaggaagagguccuggccuaugugguucaacucccccuguacggggugaucgauacaccuuguuggaaacugcauacgagcccccucugcaccacaaacaccaaggaaggauccaauauuugucugacacggaccgaccgcggcugguacugcgauaacgcugggucugucuccuucuuuccucaggccgagacguguaaggugcagagcaauagaguuuucugcgacacaaugaacucucuuacccugccgagcgaagugaaucucugcaacgucgauaucuuuaaucccaaauaugacuguaagauuaugaccuccaaaacagaugugucuagcuccgucaucaccagccugggagcgauugugucuugcuacggcaagacaaaauguacggccuccaacaagaaucgggggaucaucaagaccuucagcaacggaugcgacuauguuucuaauaaaggcguggacacagucuccgugggcaacacccuuuacuguguuaauaagcaagaggggcagagccuguaugugaaaggagagccuauuaucaacuuuuacgauccccucgucuucccuuccgacgaauuugaugcuucuauuagccaggugaacgagaagaucaaucagucccuggccuucauucgcaaaucugacgaacugcuccacaacgugaaugcuggcaagagcacaaccaacaucaugauuacgaccaucaucauuguuaucauugucauccugcuuucccugauugccguggggcuccugcuguauugcaaggccagaugaggacuaguguccaccugucccuccugggcugcuggauugucucguuuuccugccaaauaaacaggaucagcgcuuuacagaucuaaaaaaaaaaaaaaaaaaaaaaaaaaaaaaaaaaaaaaaaaaaaaaaaaaaaaaaaaaaaaaaaugcaucccccccccccccccccccccccccccccccaaaggcucuuuucagagccaccagaauu

SEQ ID NO: 3672 - RNA, 1826 nt, Artificial Sequence
  mRNA product Design e-3 comprising derived and/or modified sequence from HRSV(A2)__F-del_DSCav1_mut3 (opt6)
gggagacuuucccauucuguagcagaauuugguguugccuguggucuuggucccgcggagaagcuuaccauggaauuacuaauccugaaagcaaacgcaauuacuacaauacuaacagcaguaaccuuuugcuuugccucaggacaaaacauaacugaagaauuuuaccaaucaacuugcucagcagucucaaaaggcuaucuaggagcacuacgaacagguugguauacuucagucauaacaauagaauuaucaaacauaaaagaaauuaaauguaacggaacugacgcaaaaguaaaacucaucaaacaagaacucgauaaauacaaaaacgcuguaaccgacuuacaacuacuaaugcaaucaacuccagcaacaggcuccggauccgcaauaugcagugguguagcaguaugcaaaguccuacaccuagaaggagaaguaaauaagauaaaaucugcucuacuaucaacaaauaaagcaguugucucccuaucaaauggagucucaguacucaccuucaaaguauuagaccucaaaaacuacauagacaaacaacuauuaccaauacucaacaaacaauccugcuccaucccuaacauagaaaccguaaucgaauuucaacaaaaaaauaacagacucuuagaaauaacuagagaauuuucaguuaaugcaggcgugacaacaccaguaucaacauauaugcuaacaaacuccgaacuccuaucccuaauaaacgacaugccaaucacaaacgaccaaaaaaaacuaauguccaacaacguacaaaucguaagacaacaaucauacucuauaaugugcauaauaaaagaagaaguacuggccuacguaguacaauuaccacucuacggaguaauagacaccccaugcuggaaacuccauacaucaccccuaugcacaacaaacacaaaagaaggauccaacauaugucucacuagaacagacagaggcugguacugcgacaacgcuggauccgucucauucuucccccaagcagaaacauguaaaguacaaucuaauagaguauuuugugacacaaugaacagccucacacuaccauccgaagucaaccuauguaacguagauauauuuaaucccaaauacgacugcaaaauaaugacauccaaaacagauguaucaucauccguuaucaccucacuaggagccauaguuucaugcuacggaaaaacaaaaugcacugcaucuaacaaaaauagagguauaauaaaaacauuuuccaacggcugcgacuacgucucaaacaaaggcguagacaccguaucaguaggaaauacauuauauugcguaaauaaacaagaaggccaaucccuauacguaaaaggagaacccaucauaaacuucuaugacccacuuguuuuccccucagacgaauuugacgccucaauaucacaaguaaaugaaaaaauaaaccaaucucuugccuucauuagaaaaucagacgaauuacuacacaacgucaacgcaggaaaaucaacaacaaacaucaugauaacaacgauaauaauagucauaauaguaauacuacuaucauuaaucgcagucggacuccuauuauauugcaaagcuagauaaggacuaguguccaccugucccuccugggcugcuggauugucucguuuuccugccaaauaaacaggaucagcgcuuuacagaucuaaaaaaaaaaaaaaaaaaaaaaaaaaaaaaaaaaaaaaaaaaaaaaaaaaaaaaaaaaaaaaaaugcaucccccccccccccccccccccccccccccccaaaggcucuuuucagagccaccagaauu

SEQ ID NO: 3673 - RNA, 1826 nt, Artificial Sequence
  mRNA product Design e-3 comprising derived and/or modified sequence from HRSV(A2)__F-del_DSCav1_mut3 (opt11)
gggagacuuucccauucuguagcagaauuugguguugccuguggucuuggucccgcggagaagcuuaccauggaacuacucauacuaaaagccaacgccauaaccaccauccucaccgcaguaacuuucugcuucgcuuccggccaaaacaucaccgaagaauuuuaccaaaguaccugcagcgcagucucaaaaggauaccuaggcgcccuacgcacaggcugguacaccuccgucauuaccaucgaacucuccaacaucaaagaaauuaaaugcaacgguacagacgcaaaagucaaacucaucaaacaagaacucgacaaauacaaaaacgcagucaccgaccuccaacuccucaugcaauccacccccgccacaggcucuggcuccgccaucugcucaggcguagcagucugcaaaguccugcaccucgaaggcgaagucaacaaaaucaagucagcccuccucuccaccaacaaggccgucguaucccucucaaacggaguuagcguccucaccuucaaaguccuagaccucaaaaacuacaucgauaaacaacuacuccccauccuaaacaaacaaucaugcuccaucccaaacaucgaaaccguaaucgaguuccaacaaaagaacaaccgccuccucgaaaucacacgugaguucuccguuaacgccggcgucaccacccccgucucuacauacaugcucaccaacuccgaacuccuuucccucaucaacgacaugccaaucaccaacgaccaaaagaaacucaugucaaacaacguacaaaucguccgacaacaaagcuacuccaucaugugcaucaucaaagaagaaguccuugcauacgucguucaacuaccccucuacggcguaaucgacacucccugcuggaaacuccacaccuccccgcucugcacaaccaacaccaaagaaggcagcaacaucugccucacccgaaccgaccgcggcugguacugcgauaacgccggauccgucuccuucuucccacaagcagaaacuugcaaaguccaauccaaccgcgucuucugcgacaccaugaacucccucacacuccccuccgaagucaaccugugcaacgucgacaucuucaacccaaaauacgacugcaaaaucaugaccucaaaaaccgacgucucaucuucugucaucaccucucucggcgcuaucgucuccugcuauggcaaaaccaaaugcaccgccuccaacaagaaccgcggcauuaucaagaccuucuccaacggcugcgacuacgucuccaauaagggcgucgacaccgucucugucggcaacacccuuuacugcguaaacaaacaagaaggucaaucucucuacgucaaaggagaacccaucaucaacuucuacgacccccuggucuuccccuccgacgaguucgaugcaucaaucucccaagucaacgaaaagaucaaccaaucucucgcuuucauccgcaaauccgacgaacuccuacacaacguaaacgccggcaaauccaccacaaacaucaugaucaccaccauuaucauagucaucaucgucauccuccucuccuuaaucgccguuggccuccuucucuacugcaaagcccgauaaggacuaguguccaccugucccuccugggcugcuggauugucucguuuuccugccaaauaaacaggaucagcgcuuuacagaucuaaaaaaaaaaaaaaaaaaaaaaaaaaaaaaaaaaaaaaaaaaaaaaaaaaaaaaaaaaaaaaaaugcaucccccccccccccccccccccccccccccccaaaggcucuuuucagagccaccagaauu

SEQ ID NO: 3674 - RNA, 1880 nt, Artificial Sequence
  mRNA product Design e-4 comprising derived and/or modified sequence from HRSV(A2)__F-del_DSCav1_mut3 (opt1)
gggagacuccugucgggcggaaguaggaggaguagaguuuaaaaacaguacucuuuuuccgguucgggacguaguugaagcaacgacaagccggauaaccgcucuugagacaggaagcuuaccauggagcugcucauccugaaggccaacgccaucaccaccauccugacggcggugaccuucugcuucgccagcggccagaacaucaccgaggaguucuaccaguccacgugcagcgccgucuccaagggguaccucggcgcccugcggaccggcugguacaccuccgugaucaccaucgagcugagcaacaucaaggagaucaagugcaacgggaccgacgccaaggugaagcucaucaagcaggagcuggacaaguacaagaacgcggucacggaccugcagcuccugaugcaguccaccccggcaaccggcuccggcuccgccaucugcagcggcgucgccgugugcaaggugcugcaccucgagggggaggucaacaagaucaagagcgcccugcuguccaccaacaaggccguggugagccucuccaacggcgucagcgugcugaccuucaaggugcuggaccucaagaacuacaucgacaagcagcugcugcccauccugaacaagcagagcugcuccauccccaacaucgagacggugaucgaguuccagcagaagaacaaccggcuccuggagaucacccgcgaguucagcgugaacgccggggucaccacccccguguccacguacaugcugaccaacagcgagcuccugucccugaucaacgacaugccgaucaccaacgaccagaagaagcucaugagcaacaacgugcagaucguccggcagcaguccuacagcaucaugugcaucaucaaggaggaggugcuggcguacgugguccagcugccccucuacggcgugaucgacacccccugcuggaagcugcacacgagcccccugugcaccaccaacaccaaggagggguccaacaucugccucacgcgcaccgaccggggcugguacugcgacaacgccggcagcgucuccuucuucccgcaggccgagaccugcaaggugcagagcaaccgcguguucugcgacaccaugaacucccugacgcugcccagcgagguaaaccucugcaacgucgacaucuucaaccccaaguacgacugcaagaucaugaccuccaagaccgacgugagcuccagcgugaucaccucccugggggccaucgucagcugcuacggcaagacgaagugcaccgccagcaacaagaaccgggggaucaucaagaccuucuccaacggcugcgacuacgugagcaacaagggcguggacaccguguccgucgggaacacccuguacugcgugaacaagcaggagggccagagccucuacgugaagggggagcccaucaucaacuucuacgacccgcuggucuuccccuccgacgaguucgacgcgagcaucucccaggugaacgagaagaucaaccagagccuggccuucauccgcaaguccgacgagcugcuccacaacgugaacgccggcaagagcacgaccaacaucaugaucaccaccaucaucaucgucaucaucgugauccugcugucccucaucgccguggggcugcugcucuacugcaaggcccggugaggacuaguguccaccugucccuccugggcugcuggauugucucguuuuccugccaaauaaacaggaucagcgcuuuacagaucuaaaaaaaaaaaaaaaaaaaaaaaaaaaaaaaaaaaaaaaaaaaaaaaaaaaaaaaaaaaaaaaaugcaucccccccccccccccccccccccccccccccaaaggcucuuuucagagccaccagaauu

SEQ ID NO: 3675 - RNA, 1880 nt, Artificial Sequence
  mRNA product Design e-4 comprising derived and/or modified sequence from HRSV(A2)__F-del_DSCav1_mut3 (opt1)
gggagacuccugucgggcggaaguaggaggaguagaguuuaaaaacaguacucuuuuuccgguucgggacguaguugaagcaacgacaagccggauaaccgcucuugagacaggaagcuuaccauggagcugcucauccugaaggccaacgccaucaccaccauccugacggcggugaccuucugcuucgccagcggccagaacaucaccgaggaguucuaccaguccacgugcagcgccgucuccaagggguaccucggcgcccugcgcaccgggugguacaccagcgugaucaccaucgagcuguccaacaucaaggagaucaagugcaacggcaccgacgccaaggugaagcucaucaagcaggagcuggacaaguacaagaacgcggucacggaccugcagcuccugaugcagagcacccccgccaccggguccggcagcgccaucugcuccggcguggccgugugcaagguccugcaccucgagggggaggugaacaagaucaagagcgcgcugcuguccaccaacaaggccguggucagccucuccaacggcgugagcgugcugacguucaagguccuggaccucaagaacuacaucgacaagcagcugcugccgauccucaacaagcaguccugcagcauccccaacaucgagaccgugaucgaguuccagcagaagaacaaccggcugcuggagaucacccgcgaguucuccgugaacgccggggucaccacgcccgugagcaccuacaugcucaccaacuccgagcugcugagccucaucaacgacaugcccaucaccaacgaccagaagaagcugaugagcaacaacgugcagaucguccggcagcaguccuacagcaucaugugcaucaucaaggaggaggugcuggccuacgugguccagcucccgcuguacggcgugaucgacacgcccugcuggaagcugcacaccagcccccucugcaccaccaacacgaaggagggguccaacaucugccugacccgcaccgaccggggcugguacugcgacaacgccggcuccgugagcuucuucccccaggcggagaccugcaagguccaguccaaccgcguguucugcgacacgaugaacagccugacccucccguccgaggucaaccugugcaacguggacaucuucaaccccaaguacgacugcaagaucaugaccagcaagaccgacguguccagcuccgucaucacgagccugggggccaucguguccugcuacggcaagaccaagugcaccgccagcaacaagaaccgggggaucaucaagaccuucuccaacggcugcgacuacgugagcaacaagggcgucgacacgguguccguggggaacacccucuacugcgucaacaagcaggagggccagagccuguacgugaagggggagcccaucaucaacuucuacgacccccugguguucccgagcgacgaguucgacgccuccaucagccaggucaacgagaagaucaaccagucccucgccuucauccgcaagagcgacgagcugcugcacaacgugaacgcgggcaaguccaccaccaacaucaugaucaccacgaucaucaucgugaucaucgucauccuccugagccugaucgccguggggcuccugcuguacugcaaggcccggugaggacuaguguccaccugucccuccugggcugcuggauugucucguuuuccugccaaauaaacaggaucagcgcuuuacagaucuaaaaaaaaaaaaaaaaaaaaaaaaaaaaaaaaaaaaaaaaaaaaaaaaaaaaaaaaaaaaaaaaugcaucccccccccccccccccccccccccccccccaaaggcucuuuucagagccaccagaauu

SEQ ID NO: 3676 - RNA, 1880 nt, Artificial Sequence
  mRNA product Design e-4 comprising derived and/or modified sequence from HRSV(A2)__F-del_DSCav1_mut3 (opt2)
gggagacuccugucgggcggaaguaggaggaguagaguuuaaaaacaguacucuuuuuccgguucgggacguaguugaagcaacgacaagccggauaaccgcucuugagacaggaagcuuaccauggagcuccucauccucaaggccaacgccaucaccaccauccucaccgccgucaccuucugcuucgccuccggccagaacaucaccgaggaguucuaccaguccaccugcuccgccgucuccaagggcuaccucggcgcccuccgcaccggcugguacaccuccgucaucaccaucgagcucuccaacaucaaggagaucaagugcaacggcaccgacgccaaggucaagcucaucaagcaggagcucgacaaguacaagaacgccgucaccgaccuccagcuccucaugcaguccacccccgccaccggcuccggcuccgccaucugcuccggcgucgccgucugcaagguccuccaccucgagggcgaggucaacaagaucaaguccgcccuccucuccaccaacaaggccgucgucucccucuccaacggcgucuccguccucaccuucaagguccucgaccucaagaacuacaucgacaagcagcuccuccccauccucaacaagcaguccugcuccauccccaacaucgagaccgucaucgaguuccagcagaagaacaaccgccuccucgagaucacccgcgaguucuccgucaacgccggcgucaccacccccgucuccaccuacaugcucaccaacuccgagcuccucucccucaucaacgacaugcccaucaccaacgaccagaagaagcucauguccaacaacguccagaucguccgccagcaguccuacuccaucaugugcaucaucaaggaggagguccucgccuacgucguccagcucccccucuacggcgucaucgacacccccugcuggaagcuccacaccuccccccucugcaccaccaacaccaaggagggcuccaacaucugccucacccgcaccgaccgcggcugguacugcgacaacgccggcuccgucuccuucuucccccaggccgagaccugcaagguccaguccaaccgcgucuucugcgacaccaugaacucccucacccuccccuccgaggucaaccucugcaacgucgacaucuucaaccccaaguacgacugcaagaucaugaccuccaagaccgacgucuccuccuccgucaucaccucccucggcgccaucgucuccugcuacggcaagaccaagugcaccgccuccaacaagaaccgcggcaucaucaagaccuucuccaacggcugcgacuacgucuccaacaagggcgucgacaccgucuccgucggcaacacccucuacugcgucaacaagcaggagggccagucccucuacgucaagggcgagcccaucaucaacuucuacgacccccucgucuuccccuccgacgaguucgacgccuccaucucccaggucaacgagaagaucaaccagucccucgccuucauccgcaaguccgacgagcuccuccacaacgucaacgccggcaaguccaccaccaacaucaugaucaccaccaucaucaucgucaucaucgucauccuccucucccucaucgccgucggccuccuccucuacugcaaggcccgcugaggacuaguguccaccugucccuccugggcugcuggauugucucguuuuccugccaaauaaacaggaucagcgcuuuacagaucuaaaaaaaaaaaaaaaaaaaaaaaaaaaaaaaaaaaaaaaaaaaaaaaaaaaaaaaaaaaaaaaaugcaucccccccccccccccccccccccccccccccaaaggcucuuuucagagccaccagaauu

SEQ ID NO: 3677 - RNA, 1880 nt, Artificial Sequence
  mRNA product Design e-4 comprising derived and/or modified sequence from HRSV(A2)__F-del_DSCav1_mut3 (opt3)
gggagacuccugucgggcggaaguaggaggaguagaguuuaaaaacaguacucuuuuuccgguucgggacguaguugaagcaacgacaagccggauaaccgcucuugagacaggaagcuuaccauggagcugcucauccuuaaggccaacgcuauuaccacaauacugacugcagugacguucugcuuugccagcggccagaauaucaccgaagaguucuaccaauccacauguucugcggucucaaaaggguauuugggagcuuuaagaacugguugguacaccaguguuauuacaaucgaacugagcaacauuaaggagaucaaaugcaauggcaccgacgccaaggugaaacuaauaaagcaggaacucgauaaguauaaaaacgcaguaacugaccugcagcuucugaugcaguccacacccgccaccgggucuggaucggcuaucuguucaggcguggcagucugcaagguguugcaccucgagggugagguuaauaaaauuaagagcgcccugcugaguacgaacaaagcuguggucucccucucuaauggggugagcguauuaacuuuuaagguucuggaucuuaagaacuacaucgacaaacaauugcugccuauucuaaauaagcaguccuguucaaucccaaacauagaaaccgugauugaguuccagcagaaaaauaacaggcuccuggaaaucacacgggaguuuagugucaaugccggagugacuaccccggugagcacauauaugcuuaccaacucugagcuguugucccucauuaaugauaugcccaucacgaacgaccaaaagaaacugaugucaaacaauguccagaucguucgccagcagagcuacaguauuaugugcauaaucaaggaagagguguuagcguauguagugcaacugccucucuacggcgucauugauacuccauguuggaaacuucauacaucuccccugugcaccacuaacacaaaggaaggcuccaauaucuguuugacccgaacggaccgugggugguacugcgauaacgcaggaagcgugucguucuuuccucaggccgagaccuguaagguucagucuaauagaguguucugcgacacaaugaacucccuaacucugccaucagaagucaaucucugcaacguggauauauuuaaucccaaauaugacuguaagauuaugaccaguaaaacagauguaagcuccucuguuaucacuagccugggugcuaucgugucaugcuacggcaagaccaaauguacagccaguaacaagaauagggggauuaucaagaccuucuccaacggaugcgacuaugucagcaauaaaggcguggacacugucucuguggguaacacgcuuuacuguguuaauaagcaagaggggcagucacuguaugugaaaggagagccuauuauaaacuuuuacgauccauugguauucccgagugacgaauuugaugcaagcaucucccaggucaacgagaagauuaaucagucucucgcuuucauccggaaaucggacgaacuguuacacaacgugaaugccggcaagagcacaaccaacaucaugauuacuaccauaaucauuguuaucauugugauccugcuaucccucauagcggucggccugcuuuuguauugcaaggcccgcugaggacuaguguccaccugucccuccugggcugcuggauugucucguuuuccugccaaauaaacaggaucagcgcuuuacagaucuaaaaaaaaaaaaaaaaaaaaaaaaaaaaaaaaaaaaaaaaaaaaaaaaaaaaaaaaaaaaaaaaugcaucccccccccccccccccccccccccccccccaaaggcucuuuucagagccaccagaauu

SEQ ID NO: 3678 - RNA, 1880 nt, Artificial Sequence
  mRNA product Design e-4 comprising derived and/or modified sequence from HRSV(A2)__F-del_DSCav1_mut3 (opt4)
gggagacuccugucgggcggaaguaggaggaguagaguuuaaaaacaguacucuuuuuccgguucgggacguaguugaagcaacgacaagccggauaaccgcucuugagacaggaagcuuaccauggagcugcugauccugaaggccaacgccaucaccaccauccugaccgccgugaccuucugcuucgccagcggccagaacaucaccgaggaguucuaccagagcaccugcagcgccgugagcaagggcuaccugggcgcccugagaaccggcugguacaccagcgugaucaccaucgagcugagcaacaucaaggagaucaagugcaacggcaccgacgccaaggugaagcugaucaagcaggagcuggacaaguacaagaacgccgugaccgaccugcagcugcugaugcagagcacccccgccaccggcagcggcagcgccaucugcagcggcguggccgugugcaaggugcugcaccuggagggcgaggugaacaagaucaagagcgcccugcugagcaccaacaaggccguggugagccugagcaacggcgugagcgugcugaccuucaaggugcuggaccugaagaacuacaucgacaagcagcugcugcccauccugaacaagcagagcugcagcauccccaacaucgagaccgugaucgaguuccagcagaagaacaacagacugcuggagaucaccagagaguucagcgugaacgccggcgugaccacccccgugagcaccuacaugcugaccaacagcgagcugcugagccugaucaacgacaugcccaucaccaacgaccagaagaagcugaugagcaacaacgugcagaucgugagacagcagagcuacagcaucaugugcaucaucaaggaggaggugcuggccuacguggugcagcugccccuguacggcgugaucgacacccccugcuggaagcugcacaccagcccccugugcaccaccaacaccaaggagggcagcaacaucugccugaccagaaccgacagaggcugguacugcgacaacgccggcagcgugagcuucuucccccaggccgagaccugcaaggugcagagcaacagaguguucugcgacaccaugaacagccugacccugcccagcgaggugaaccugugcaacguggacaucuucaaccccaaguacgacugcaagaucaugaccagcaagaccgacgugagcagcagcgugaucaccagccugggcgccaucgugagcugcuacggcaagaccaagugcaccgccagcaacaagaacagaggcaucaucaagaccuucagcaacggcugcgacuacgugagcaacaagggcguggacaccgugagcgugggcaacacccuguacugcgugaacaagcaggagggccagagccuguacgugaagggcgagcccaucaucaacuucuacgacccccugguguuccccagcgacgaguucgacgccagcaucagccaggugaacgagaagaucaaccagagccuggccuucaucagaaagagcgacgagcugcugcacaacgugaacgccggcaagagcaccaccaacaucaugaucaccaccaucaucaucgugaucaucgugauccugcugagccugaucgccgugggccugcugcuguacugcaaggccagaugaggacuaguguccaccugucccuccugggcugcuggauugucucguuuuccugccaaauaaacaggaucagcgcuuuacagaucuaaaaaaaaaaaaaaaaaaaaaaaaaaaaaaaaaaaaaaaaaaaaaaaaaaaaaaaaaaaaaaaaugcaucccccccccccccccccccccccccccccccaaaggcucuuuucagagccaccagaauu

SEQ ID NO: 3679 - RNA, 1880 nt, Artificial Sequence
  mRNA product Design e-4 comprising derived and/or modified sequence from HRSV(A2)__F-del_DSCav1_mut3 (opt5)
gggagacuccugucgggcggaaguaggaggaguagaguuuaaaaacaguacucuuuuuccgguucgggacguaguugaagcaacgacaagccggauaaccgcucuugagacaggaagcuuaccauggagcugcucauccugaaggccaacgcuauuaccacaauccuuacggccgugaccuucugcuuugcgagcggccagaauauuacagaagaguucuaccaauccaccuguucugcugucagcaaaggguaucugggagcccucagaacaggcugguacaccuccguuaucacaauugaacugucuaacaucaaggagaucaaaugcaaugggaccgacgccaaggugaaacuuauuaagcaggaacuggauaaguauaaaaacgcugugacggaccuccagcugcugaugcagagcacccccgccacaggauccggcucugcuaucuguagcggggucgccgugugcaagguucuccaccuggagggagaggugaauaaaauuaaguccgcgcuucugagcaccaacaaagccgucgugucucucuccaauggcguuagcgugcugacauuuaagguccuugaucugaagaacuacaucgacaaacaacuccugccuauucugaauaagcagucuuguuccaucccgaacauugaaaccgugaucgaguuccagcagaaaaauaaccggcuccuggaaaucacgcgcgaguuuagcgugaaugcuggcgucacaacccccguuucuacauauaugcuuaccaacuccgagcugcucagccugauuaaugauaugccuaucaccaacgaccaaaagaaacuuauguccaacaaugugcagauugugagacagcagucuuacagcaucaugugcauuaucaaggaagagguccuggccuaugugguucaacucccccuguacggggugaucgauacaccuuguuggaaacugcauacgagcccccucugcaccacaaacaccaaggaaggauccaauauuugucugacacggaccgaccgcggcugguacugcgauaacgcugggucugucuccuucuuuccucaggccgagacguguaaggugcagagcaauagaguuuucugcgacacaaugaacucucuuacccugccgagcgaagugaaucucugcaacgucgauaucuuuaaucccaaauaugacuguaagauuaugaccuccaaaacagaugugucuagcuccgucaucaccagccugggagcgauugugucuugcuacggcaagacaaaauguacggccuccaacaagaaucgggggaucaucaagaccuucagcaacggaugcgacuauguuucuaauaaaggcguggacacagucuccgugggcaacacccuuuacuguguuaauaagcaagaggggcagagccuguaugugaaaggagagccuauuaucaacuuuuacgauccccucgucuucccuuccgacgaauuugaugcuucuauuagccaggugaacgagaagaucaaucagucccuggccuucauucgcaaaucugacgaacugcuccacaacgugaaugcuggcaagagcacaaccaacaucaugauuacgaccaucaucauuguuaucauugucauccugcuuucccugauugccguggggcuccugcuguauugcaaggccagaugaggacuaguguccaccugucccuccugggcugcuggauugucucguuuuccugccaaauaaacaggaucagcgcuuuacagaucuaaaaaaaaaaaaaaaaaaaaaaaaaaaaaaaaaaaaaaaaaaaaaaaaaaaaaaaaaaaaaaaaugcaucccccccccccccccccccccccccccccccaaaggcucuuuucagagccaccagaauu

SEQ ID NO: 3680 - RNA, 1880 nt, Artificial Sequence
  mRNA product Design e-4 comprising derived and/or modified sequence from HRSV(A2)__F-del_DSCav1_mut3 (opt6)
gggagacuccugucgggcggaaguaggaggaguagaguuuaaaaacaguacucuuuuuccgguucgggacguaguugaagcaacgacaagccggauaaccgcucuugagacaggaagcuuaccauggaauuacuaauccugaaagcaaacgcaauuacuacaauacuaacagcaguaaccuuuugcuuugccucaggacaaaacauaacugaagaauuuuaccaaucaacuugcucagcagucucaaaaggcuaucuaggagcacuacgaacagguugguauacuucagucauaacaauagaauuaucaaacauaaaagaaauuaaauguaacggaacugacgcaaaaguaaaacucaucaaacaagaacucgauaaauacaaaaacgcuguaaccgacuuacaacuacuaaugcaaucaacuccagcaacaggcuccggauccgcaauaugcagugguguagcaguaugcaaaguccuacaccuagaaggagaaguaaauaagauaaaaucugcucuacuaucaacaaauaaagcaguugucucccuaucaaauggagucucaguacucaccuucaaaguauuagaccucaaaaacuacauagacaaacaacuauuaccaauacucaacaaacaauccugcuccaucccuaacauagaaaccguaaucgaauuucaacaaaaaaauaacagacucuuagaaauaacuagagaauuuucaguuaaugcaggcgugacaacaccaguaucaacauauaugcuaacaaacuccgaacuccuaucccuaauaaacgacaugccaaucacaaacgaccaaaaaaaacuaauguccaacaacguacaaaucguaagacaacaaucauacucuauaaugugcauaauaaaagaagaaguacuggccuacguaguacaauuaccacucuacggaguaauagacaccccaugcuggaaacuccauacaucaccccuaugcacaacaaacacaaaagaaggauccaacauaugucucacuagaacagacagaggcugguacugcgacaacgcuggauccgucucauucuucccccaagcagaaacauguaaaguacaaucuaauagaguauuuugugacacaaugaacagccucacacuaccauccgaagucaaccuauguaacguagauauauuuaaucccaaauacgacugcaaaauaaugacauccaaaacagauguaucaucauccguuaucaccucacuaggagccauaguuucaugcuacggaaaaacaaaaugcacugcaucuaacaaaaauagagguauaauaaaaacauuuuccaacggcugcgacuacgucucaaacaaaggcguagacaccguaucaguaggaaauacauuauauugcguaaauaaacaagaaggccaaucccuauacguaaaaggagaacccaucauaaacuucuaugacccacuuguuuuccccucagacgaauuugacgccucaauaucacaaguaaaugaaaaaauaaaccaaucucuugccuucauuagaaaaucagacgaauuacuacacaacgucaacgcaggaaaaucaacaacaaacaucaugauaacaacgauaauaauagucauaauaguaauacuacuaucauuaaucgcagucggacuccuauuauauugcaaagcuagauaaggacuaguguccaccugucccuccugggcugcuggauugucucguuuuccugccaaauaaacaggaucagcgcuuuacagaucuaaaaaaaaaaaaaaaaaaaaaaaaaaaaaaaaaaaaaaaaaaaaaaaaaaaaaaaaaaaaaaaaugcaucccccccccccccccccccccccccccccccaaaggcucuuuucagagccaccagaauu

SEQ ID NO: 3681 - RNA, 1880 nt, Artificial Sequence
  mRNA product Design e-4 comprising derived and/or modified sequence from HRSV(A2)__F-del_DSCav1_mut3 (opt11)
gggagacuccugucgggcggaaguaggaggaguagaguuuaaaaacaguacucuuuuuccgguucgggacguaguugaagcaacgacaagccggauaaccgcucuugagacaggaagcuuaccauggaacuacucauacuaaaagccaacgccauaaccaccauccucaccgcaguaacuuucugcuucgcuuccggccaaaacaucaccgaagaauuuuaccaaaguaccugcagcgcagucucaaaaggauaccuaggcgcccuacgcacaggcugguacaccuccgucauuaccaucgaacucuccaacaucaaagaaauuaaaugcaacgguacagacgcaaaagucaaacucaucaaacaagaacucgacaaauacaaaaacgcagucaccgaccuccaacuccucaugcaauccacccccgccacaggcucuggcuccgccaucugcucaggcguagcagucugcaaaguccugcaccucgaaggcgaagucaacaaaaucaagucagcccuccucuccaccaacaaggccgucguaucccucucaaacggaguuagcguccucaccuucaaaguccuagaccucaaaaacuacaucgauaaacaacuacuccccauccuaaacaaacaaucaugcuccaucccaaacaucgaaaccguaaucgaguuccaacaaaagaacaaccgccuccucgaaaucacacgugaguucuccguuaacgccggcgucaccacccccgucucuacauacaugcucaccaacuccgaacuccuuucccucaucaacgacaugccaaucaccaacgaccaaaagaaacucaugucaaacaacguacaaaucguccgacaacaaagcuacuccaucaugugcaucaucaaagaagaaguccuugcauacgucguucaacuaccccucuacggcguaaucgacacucccugcuggaaacuccacaccuccccgcucugcacaaccaacaccaaagaaggcagcaacaucugccucacccgaaccgaccgcggcugguacugcgauaacgccggauccgucuccuucuucccacaagcagaaacuugcaaaguccaauccaaccgcgucuucugcgacaccaugaacucccucacacuccccuccgaagucaaccugugcaacgucgacaucuucaacccaaaauacgacugcaaaaucaugaccucaaaaaccgacgucucaucuucugucaucaccucucucggcgcuaucgucuccugcuauggcaaaaccaaaugcaccgccuccaacaagaaccgcggcauuaucaagaccuucuccaacggcugcgacuacgucuccaauaagggcgucgacaccgucucugucggcaacacccuuuacugcguaaacaaacaagaaggucaaucucucuacgucaaaggagaacccaucaucaacuucuacgacccccuggucuuccccuccgacgaguucgaugcaucaaucucccaagucaacgaaaagaucaaccaaucucucgcuuucauccgcaaauccgacgaacuccuacacaacguaaacgccggcaaauccaccacaaacaucaugaucaccaccauuaucauagucaucaucgucauccuccucuccuuaaucgccguuggccuccuucucuacugcaaagcccgauaaggacuaguguccaccugucccuccugggcugcuggauugucucguuuuccugccaaauaaacaggaucagcgcuuuacagaucuaaaaaaaaaaaaaaaaaaaaaaaaaaaaaaaaaaaaaaaaaaaaaaaaaaaaaaaaaaaaaaaaugcaucccccccccccccccccccccccccccccccaaaggcucuuuucagagccaccagaauu

SEQ ID NO: 3682 - RNA, 1847 nt, Artificial Sequence
  mRNA product Design e-5 comprising derived and/or modified sequence from HRSV(A2)__F-del_DSCav1_mut3 (opt1)
gggagagcggcucggccauuuugucccagucaguccggaggcugcggcugcagaaguaccgccugcggaguaacugcaaagaagcuuaccauggagcugcucauccugaaggccaacgccaucaccaccauccugacggcggugaccuucugcuucgccagcggccagaacaucaccgaggaguucuaccaguccacgugcagcgccgucuccaagggguaccucggcgcccugcggaccggcugguacaccuccgugaucaccaucgagcugagcaacaucaaggagaucaagugcaacgggaccgacgccaaggugaagcucaucaagcaggagcuggacaaguacaagaacgcggucacggaccugcagcuccugaugcaguccaccccggcaaccggcuccggcuccgccaucugcagcggcgucgccgugugcaaggugcugcaccucgagggggaggucaacaagaucaagagcgcccugcuguccaccaacaaggccguggugagccucuccaacggcgucagcgugcugaccuucaaggugcuggaccucaagaacuacaucgacaagcagcugcugcccauccugaacaagcagagcugcuccauccccaacaucgagacggugaucgaguuccagcagaagaacaaccggcuccuggagaucacccgcgaguucagcgugaacgccggggucaccacccccguguccacguacaugcugaccaacagcgagcuccugucccugaucaacgacaugccgaucaccaacgaccagaagaagcucaugagcaacaacgugcagaucguccggcagcaguccuacagcaucaugugcaucaucaaggaggaggugcuggcguacgugguccagcugccccucuacggcgugaucgacacccccugcuggaagcugcacacgagcccccugugcaccaccaacaccaaggagggguccaacaucugccucacgcgcaccgaccggggcugguacugcgacaacgccggcagcgucuccuucuucccgcaggccgagaccugcaaggugcagagcaaccgcguguucugcgacaccaugaacucccugacgcugcccagcgagguaaaccucugcaacgucgacaucuucaaccccaaguacgacugcaagaucaugaccuccaagaccgacgugagcuccagcgugaucaccucccugggggccaucgucagcugcuacggcaagacgaagugcaccgccagcaacaagaaccgggggaucaucaagaccuucuccaacggcugcgacuacgugagcaacaagggcguggacaccguguccgucgggaacacccuguacugcgugaacaagcaggagggccagagccucuacgugaagggggagcccaucaucaacuucuacgacccgcuggucuuccccuccgacgaguucgacgcgagcaucucccaggugaacgagaagaucaaccagagccuggccuucauccgcaaguccgacgagcugcuccacaacgugaacgccggcaagagcacgaccaacaucaugaucaccaccaucaucaucgucaucaucgugauccugcugucccucaucgccguggggcugcugcucuacugcaaggcccggugaggacuaguguccaccugucccuccugggcugcuggauugucucguuuuccugccaaauaaacaggaucagcgcuuuacagaucuaaaaaaaaaaaaaaaaaaaaaaaaaaaaaaaaaaaaaaaaaaaaaaaaaaaaaaaaaaaaaaaaugcaucccccccccccccccccccccccccccccccaaaggcucuuuucagagccaccagaauu

SEQ ID NO: 3683 - RNA, 1847 nt, Artificial Sequence
  mRNA product Design e-5 comprising derived and/or modified sequence from HRSV(A2)__F-del_DSCav1_mut3 (opt1)
gggagagcggcucggccauuuugucccagucaguccggaggcugcggcugcagaaguaccgccugcggaguaacugcaaagaagcuuaccauggagcugcucauccugaaggccaacgccaucaccaccauccugacggcggugaccuucugcuucgccagcggccagaacaucaccgaggaguucuaccaguccacgugcagcgccgucuccaagggguaccucggcgcccugcgcaccgggugguacaccagcgugaucaccaucgagcuguccaacaucaaggagaucaagugcaacggcaccgacgccaaggugaagcucaucaagcaggagcuggacaaguacaagaacgcggucacggaccugcagcuccugaugcagagcacccccgccaccggguccggcagcgccaucugcuccggcguggccgugugcaagguccugcaccucgagggggaggugaacaagaucaagagcgcgcugcuguccaccaacaaggccguggucagccucuccaacggcgugagcgugcugacguucaagguccuggaccucaagaacuacaucgacaagcagcugcugccgauccucaacaagcaguccugcagcauccccaacaucgagaccgugaucgaguuccagcagaagaacaaccggcugcuggagaucacccgcgaguucuccgugaacgccggggucaccacgcccgugagcaccuacaugcucaccaacuccgagcugcugagccucaucaacgacaugcccaucaccaacgaccagaagaagcugaugagcaacaacgugcagaucguccggcagcaguccuacagcaucaugugcaucaucaaggaggaggugcuggccuacgugguccagcucccgcuguacggcgugaucgacacgcccugcuggaagcugcacaccagcccccucugcaccaccaacacgaaggagggguccaacaucugccugacccgcaccgaccggggcugguacugcgacaacgccggcuccgugagcuucuucccccaggcggagaccugcaagguccaguccaaccgcguguucugcgacacgaugaacagccugacccucccguccgaggucaaccugugcaacguggacaucuucaaccccaaguacgacugcaagaucaugaccagcaagaccgacguguccagcuccgucaucacgagccugggggccaucguguccugcuacggcaagaccaagugcaccgccagcaacaagaaccgggggaucaucaagaccuucuccaacggcugcgacuacgugagcaacaagggcgucgacacgguguccguggggaacacccucuacugcgucaacaagcaggagggccagagccuguacgugaagggggagcccaucaucaacuucuacgacccccugguguucccgagcgacgaguucgacgccuccaucagccaggucaacgagaagaucaaccagucccucgccuucauccgcaagagcgacgagcugcugcacaacgugaacgcgggcaaguccaccaccaacaucaugaucaccacgaucaucaucgugaucaucgucauccuccugagccugaucgccguggggcuccugcuguacugcaaggcccggugaggacuaguguccaccugucccuccugggcugcuggauugucucguuuuccugccaaauaaacaggaucagcgcuuuacagaucuaaaaaaaaaaaaaaaaaaaaaaaaaaaaaaaaaaaaaaaaaaaaaaaaaaaaaaaaaaaaaaaaugcaucccccccccccccccccccccccccccccccaaaggcucuuuucagagccaccagaauu

SEQ ID NO: 3684 - RNA, 1847 nt, Artificial Sequence
  mRNA product Design e-5 comprising derived and/or modified sequence from HRSV(A2)__F-del_DSCav1_mut3 (opt2)
gggagagcggcucggccauuuugucccagucaguccggaggcugcggcugcagaaguaccgccugcggaguaacugcaaagaagcuuaccauggagcuccucauccucaaggccaacgccaucaccaccauccucaccgccgucaccuucugcuucgccuccggccagaacaucaccgaggaguucuaccaguccaccugcuccgccgucuccaagggcuaccucggcgcccuccgcaccggcugguacaccuccgucaucaccaucgagcucuccaacaucaaggagaucaagugcaacggcaccgacgccaaggucaagcucaucaagcaggagcucgacaaguacaagaacgccgucaccgaccuccagcuccucaugcaguccacccccgccaccggcuccggcuccgccaucugcuccggcgucgccgucugcaagguccuccaccucgagggcgaggucaacaagaucaaguccgcccuccucuccaccaacaaggccgucgucucccucuccaacggcgucuccguccucaccuucaagguccucgaccucaagaacuacaucgacaagcagcuccuccccauccucaacaagcaguccugcuccauccccaacaucgagaccgucaucgaguuccagcagaagaacaaccgccuccucgagaucacccgcgaguucuccgucaacgccggcgucaccacccccgucuccaccuacaugcucaccaacuccgagcuccucucccucaucaacgacaugcccaucaccaacgaccagaagaagcucauguccaacaacguccagaucguccgccagcaguccuacuccaucaugugcaucaucaaggaggagguccucgccuacgucguccagcucccccucuacggcgucaucgacacccccugcuggaagcuccacaccuccccccucugcaccaccaacaccaaggagggcuccaacaucugccucacccgcaccgaccgcggcugguacugcgacaacgccggcuccgucuccuucuucccccaggccgagaccugcaagguccaguccaaccgcgucuucugcgacaccaugaacucccucacccuccccuccgaggucaaccucugcaacgucgacaucuucaaccccaaguacgacugcaagaucaugaccuccaagaccgacgucuccuccuccgucaucaccucccucggcgccaucgucuccugcuacggcaagaccaagugcaccgccuccaacaagaaccgcggcaucaucaagaccuucuccaacggcugcgacuacgucuccaacaagggcgucgacaccgucuccgucggcaacacccucuacugcgucaacaagcaggagggccagucccucuacgucaagggcgagcccaucaucaacuucuacgacccccucgucuuccccuccgacgaguucgacgccuccaucucccaggucaacgagaagaucaaccagucccucgccuucauccgcaaguccgacgagcuccuccacaacgucaacgccggcaaguccaccaccaacaucaugaucaccaccaucaucaucgucaucaucgucauccuccucucccucaucgccgucggccuccuccucuacugcaaggcccgcugaggacuaguguccaccugucccuccugggcugcuggauugucucguuuuccugccaaauaaacaggaucagcgcuuuacagaucuaaaaaaaaaaaaaaaaaaaaaaaaaaaaaaaaaaaaaaaaaaaaaaaaaaaaaaaaaaaaaaaaugcaucccccccccccccccccccccccccccccccaaaggcucuuuucagagccaccagaauu

SEQ ID NO: 3685 - RNA, 1847 nt, Artificial Sequence
  mRNA product Design e-5 comprising derived and/or modified sequence from HRSV(A2)__F-del_DSCav1_mut3 (opt3)
gggagagcggcucggccauuuugucccagucaguccggaggcugcggcugcagaaguaccgccugcggaguaacugcaaagaagcuuaccauggagcugcucauccuuaaggccaacgcuauuaccacaauacugacugcagugacguucugcuuugccagcggccagaauaucaccgaagaguucuaccaauccacauguucugcggucucaaaaggguauuugggagcuuuaagaacugguugguacaccaguguuauuacaaucgaacugagcaacauuaaggagaucaaaugcaauggcaccgacgccaaggugaaacuaauaaagcaggaacucgauaaguauaaaaacgcaguaacugaccugcagcuucugaugcaguccacacccgccaccgggucuggaucggcuaucuguucaggcguggcagucugcaagguguugcaccucgagggugagguuaauaaaauuaagagcgcccugcugaguacgaacaaagcuguggucucccucucuaauggggugagcguauuaacuuuuaagguucuggaucuuaagaacuacaucgacaaacaauugcugccuauucuaaauaagcaguccuguucaaucccaaacauagaaaccgugauugaguuccagcagaaaaauaacaggcuccuggaaaucacacgggaguuuagugucaaugccggagugacuaccccggugagcacauauaugcuuaccaacucugagcuguugucccucauuaaugauaugcccaucacgaacgaccaaaagaaacugaugucaaacaauguccagaucguucgccagcagagcuacaguauuaugugcauaaucaaggaagagguguuagcguauguagugcaacugccucucuacggcgucauugauacuccauguuggaaacuucauacaucuccccugugcaccacuaacacaaaggaaggcuccaauaucuguuugacccgaacggaccgugggugguacugcgauaacgcaggaagcgugucguucuuuccucaggccgagaccuguaagguucagucuaauagaguguucugcgacacaaugaacucccuaacucugccaucagaagucaaucucugcaacguggauauauuuaaucccaaauaugacuguaagauuaugaccaguaaaacagauguaagcuccucuguuaucacuagccugggugcuaucgugucaugcuacggcaagaccaaauguacagccaguaacaagaauagggggauuaucaagaccuucuccaacggaugcgacuaugucagcaauaaaggcguggacacugucucuguggguaacacgcuuuacuguguuaauaagcaagaggggcagucacuguaugugaaaggagagccuauuauaaacuuuuacgauccauugguauucccgagugacgaauuugaugcaagcaucucccaggucaacgagaagauuaaucagucucucgcuuucauccggaaaucggacgaacuguuacacaacgugaaugccggcaagagcacaaccaacaucaugauuacuaccauaaucauuguuaucauugugauccugcuaucccucauagcggucggccugcuuuuguauugcaaggcccgcugaggacuaguguccaccugucccuccugggcugcuggauugucucguuuuccugccaaauaaacaggaucagcgcuuuacagaucuaaaaaaaaaaaaaaaaaaaaaaaaaaaaaaaaaaaaaaaaaaaaaaaaaaaaaaaaaaaaaaaaugcaucccccccccccccccccccccccccccccccaaaggcucuuuucagagccaccagaauu

SEQ ID NO: 3686 - RNA, 1847 nt, Artificial Sequence
  mRNA product Design e-5 comprising derived and/or modified sequence from HRSV(A2)__F-del_DSCav1_mut3 (opt4)
gggagagcggcucggccauuuugucccagucaguccggaggcugcggcugcagaaguaccgccugcggaguaacugcaaagaagcuuaccauggagcugcugauccugaaggccaacgccaucaccaccauccugaccgccgugaccuucugcuucgccagcggccagaacaucaccgaggaguucuaccagagcaccugcagcgccgugagcaagggcuaccugggcgcccugagaaccggcugguacaccagcgugaucaccaucgagcugagcaacaucaaggagaucaagugcaacggcaccgacgccaaggugaagcugaucaagcaggagcuggacaaguacaagaacgccgugaccgaccugcagcugcugaugcagagcacccccgccaccggcagcggcagcgccaucugcagcggcguggccgugugcaaggugcugcaccuggagggcgaggugaacaagaucaagagcgcccugcugagcaccaacaaggccguggugagccugagcaacggcgugagcgugcugaccuucaaggugcuggaccugaagaacuacaucgacaagcagcugcugcccauccugaacaagcagagcugcagcauccccaacaucgagaccgugaucgaguuccagcagaagaacaacagacugcuggagaucaccagagaguucagcgugaacgccggcgugaccacccccgugagcaccuacaugcugaccaacagcgagcugcugagccugaucaacgacaugcccaucaccaacgaccagaagaagcugaugagcaacaacgugcagaucgugagacagcagagcuacagcaucaugugcaucaucaaggaggaggugcuggccuacguggugcagcugccccuguacggcgugaucgacacccccugcuggaagcugcacaccagcccccugugcaccaccaacaccaaggagggcagcaacaucugccugaccagaaccgacagaggcugguacugcgacaacgccggcagcgugagcuucuucccccaggccgagaccugcaaggugcagagcaacagaguguucugcgacaccaugaacagccugacccugcccagcgaggugaaccugugcaacguggacaucuucaaccccaaguacgacugcaagaucaugaccagcaagaccgacgugagcagcagcgugaucaccagccugggcgccaucgugagcugcuacggcaagaccaagugcaccgccagcaacaagaacagaggcaucaucaagaccuucagcaacggcugcgacuacgugagcaacaagggcguggacaccgugagcgugggcaacacccuguacugcgugaacaagcaggagggccagagccuguacgugaagggcgagcccaucaucaacuucuacgacccccugguguuccccagcgacgaguucgacgccagcaucagccaggugaacgagaagaucaaccagagccuggccuucaucagaaagagcgacgagcugcugcacaacgugaacgccggcaagagcaccaccaacaucaugaucaccaccaucaucaucgugaucaucgugauccugcugagccugaucgccgugggccugcugcuguacugcaaggccagaugaggacuaguguccaccugucccuccugggcugcuggauugucucguuuuccugccaaauaaacaggaucagcgcuuuacagaucuaaaaaaaaaaaaaaaaaaaaaaaaaaaaaaaaaaaaaaaaaaaaaaaaaaaaaaaaaaaaaaaaugcaucccccccccccccccccccccccccccccccaaaggcucuuuucagagccaccagaauu

SEQ ID NO: 3687 - RNA, 1847 nt, Artificial Sequence
  mRNA product Design e-5 comprising derived and/or modified sequence from HRSV(A2)__F-del_DSCav1_mut3 (opt5)
gggagagcggcucggccauuuugucccagucaguccggaggcugcggcugcagaaguaccgccugcggaguaacugcaaagaagcuuaccauggagcugcucauccugaaggccaacgcuauuaccacaauccuuacggccgugaccuucugcuuugcgagcggccagaauauuacagaagaguucuaccaauccaccuguucugcugucagcaaaggguaucugggagcccucagaacaggcugguacaccuccguuaucacaauugaacugucuaacaucaaggagaucaaaugcaaugggaccgacgccaaggugaaacuuauuaagcaggaacuggauaaguauaaaaacgcugugacggaccuccagcugcugaugcagagcacccccgccacaggauccggcucugcuaucuguagcggggucgccgugugcaagguucuccaccuggagggagaggugaauaaaauuaaguccgcgcuucugagcaccaacaaagccgucgugucucucuccaauggcguuagcgugcugacauuuaagguccuugaucugaagaacuacaucgacaaacaacuccugccuauucugaauaagcagucuuguuccaucccgaacauugaaaccgugaucgaguuccagcagaaaaauaaccggcuccuggaaaucacgcgcgaguuuagcgugaaugcuggcgucacaacccccguuucuacauauaugcuuaccaacuccgagcugcucagccugauuaaugauaugccuaucaccaacgaccaaaagaaacuuauguccaacaaugugcagauugugagacagcagucuuacagcaucaugugcauuaucaaggaagagguccuggccuaugugguucaacucccccuguacggggugaucgauacaccuuguuggaaacugcauacgagcccccucugcaccacaaacaccaaggaaggauccaauauuugucugacacggaccgaccgcggcugguacugcgauaacgcugggucugucuccuucuuuccucaggccgagacguguaaggugcagagcaauagaguuuucugcgacacaaugaacucucuuacccugccgagcgaagugaaucucugcaacgucgauaucuuuaaucccaaauaugacuguaagauuaugaccuccaaaacagaugugucuagcuccgucaucaccagccugggagcgauugugucuugcuacggcaagacaaaauguacggccuccaacaagaaucgggggaucaucaagaccuucagcaacggaugcgacuauguuucuaauaaaggcguggacacagucuccgugggcaacacccuuuacuguguuaauaagcaagaggggcagagccuguaugugaaaggagagccuauuaucaacuuuuacgauccccucgucuucccuuccgacgaauuugaugcuucuauuagccaggugaacgagaagaucaaucagucccuggccuucauucgcaaaucugacgaacugcuccacaacgugaaugcuggcaagagcacaaccaacaucaugauuacgaccaucaucauuguuaucauugucauccugcuuucccugauugccguggggcuccugcuguauugcaaggccagaugaggacuaguguccaccugucccuccugggcugcuggauugucucguuuuccugccaaauaaacaggaucagcgcuuuacagaucuaaaaaaaaaaaaaaaaaaaaaaaaaaaaaaaaaaaaaaaaaaaaaaaaaaaaaaaaaaaaaaaaugcaucccccccccccccccccccccccccccccccaaaggcucuuuucagagccaccagaauu

SEQ ID NO: 3688 - RNA, 1847 nt, Artificial Sequence
  mRNA product Design e-5 comprising derived and/or modified sequence from HRSV(A2)__F-del_DSCav1_mut3 (opt6)
gggagagcggcucggccauuuugucccagucaguccggaggcugcggcugcagaaguaccgccugcggaguaacugcaaagaagcuuaccauggaauuacuaauccugaaagcaaacgcaauuacuacaauacuaacagcaguaaccuuuugcuuugccucaggacaaaacauaacugaagaauuuuaccaaucaacuugcucagcagucucaaaaggcuaucuaggagcacuacgaacagguugguauacuucagucauaacaauagaauuaucaaacauaaaagaaauuaaauguaacggaacugacgcaaaaguaaaacucaucaaacaagaacucgauaaauacaaaaacgcuguaaccgacuuacaacuacuaaugcaaucaacuccagcaacaggcuccggauccgcaauaugcagugguguagcaguaugcaaaguccuacaccuagaaggagaaguaaauaagauaaaaucugcucuacuaucaacaaauaaagcaguugucucccuaucaaauggagucucaguacucaccuucaaaguauuagaccucaaaaacuacauagacaaacaacuauuaccaauacucaacaaacaauccugcuccaucccuaacauagaaaccguaaucgaauuucaacaaaaaaauaacagacucuuagaaauaacuagagaauuuucaguuaaugcaggcgugacaacaccaguaucaacauauaugcuaacaaacuccgaacuccuaucccuaauaaacgacaugccaaucacaaacgaccaaaaaaaacuaauguccaacaacguacaaaucguaagacaacaaucauacucuauaaugugcauaauaaaagaagaaguacuggccuacguaguacaauuaccacucuacggaguaauagacaccccaugcuggaaacuccauacaucaccccuaugcacaacaaacacaaaagaaggauccaacauaugucucacuagaacagacagaggcugguacugcgacaacgcuggauccgucucauucuucccccaagcagaaacauguaaaguacaaucuaauagaguauuuugugacacaaugaacagccucacacuaccauccgaagucaaccuauguaacguagauauauuuaaucccaaauacgacugcaaaauaaugacauccaaaacagauguaucaucauccguuaucaccucacuaggagccauaguuucaugcuacggaaaaacaaaaugcacugcaucuaacaaaaauagagguauaauaaaaacauuuuccaacggcugcgacuacgucucaaacaaaggcguagacaccguaucaguaggaaauacauuauauugcguaaauaaacaagaaggccaaucccuauacguaaaaggagaacccaucauaaacuucuaugacccacuuguuuuccccucagacgaauuugacgccucaauaucacaaguaaaugaaaaaauaaaccaaucucuugccuucauuagaaaaucagacgaauuacuacacaacgucaacgcaggaaaaucaacaacaaacaucaugauaacaacgauaauaauagucauaauaguaauacuacuaucauuaaucgcagucggacuccuauuauauugcaaagcuagauaaggacuaguguccaccugucccuccugggcugcuggauugucucguuuuccugccaaauaaacaggaucagcgcuuuacagaucuaaaaaaaaaaaaaaaaaaaaaaaaaaaaaaaaaaaaaaaaaaaaaaaaaaaaaaaaaaaaaaaaugcaucccccccccccccccccccccccccccccccaaaggcucuuuucagagccaccagaauu

SEQ ID NO: 3689 - RNA, 1847 nt, Artificial Sequence
  mRNA product Design e-5 comprising derived and/or modified sequence from HRSV(A2)__F-del_DSCav1_mut3 (opt11)
gggagagcggcucggccauuuugucccagucaguccggaggcugcggcugcagaaguaccgccugcggaguaacugcaaagaagcuuaccauggaacuacucauacuaaaagccaacgccauaaccaccauccucaccgcaguaacuuucugcuucgcuuccggccaaaacaucaccgaagaauuuuaccaaaguaccugcagcgcagucucaaaaggauaccuaggcgcccuacgcacaggcugguacaccuccgucauuaccaucgaacucuccaacaucaaagaaauuaaaugcaacgguacagacgcaaaagucaaacucaucaaacaagaacucgacaaauacaaaaacgcagucaccgaccuccaacuccucaugcaauccacccccgccacaggcucuggcuccgccaucugcucaggcguagcagucugcaaaguccugcaccucgaaggcgaagucaacaaaaucaagucagcccuccucuccaccaacaaggccgucguaucccucucaaacggaguuagcguccucaccuucaaaguccuagaccucaaaaacuacaucgauaaacaacuacuccccauccuaaacaaacaaucaugcuccaucccaaacaucgaaaccguaaucgaguuccaacaaaagaacaaccgccuccucgaaaucacacgugaguucuccguuaacgccggcgucaccacccccgucucuacauacaugcucaccaacuccgaacuccuuucccucaucaacgacaugccaaucaccaacgaccaaaagaaacucaugucaaacaacguacaaaucguccgacaacaaagcuacuccaucaugugcaucaucaaagaagaaguccuugcauacgucguucaacuaccccucuacggcguaaucgacacucccugcuggaaacuccacaccuccccgcucugcacaaccaacaccaaagaaggcagcaacaucugccucacccgaaccgaccgcggcugguacugcgauaacgccggauccgucuccuucuucccacaagcagaaacuugcaaaguccaauccaaccgcgucuucugcgacaccaugaacucccucacacuccccuccgaagucaaccugugcaacgucgacaucuucaacccaaaauacgacugcaaaaucaugaccucaaaaaccgacgucucaucuucugucaucaccucucucggcgcuaucgucuccugcuauggcaaaaccaaaugcaccgccuccaacaagaaccgcggcauuaucaagaccuucuccaacggcugcgacuacgucuccaauaagggcgucgacaccgucucugucggcaacacccuuuacugcguaaacaaacaagaaggucaaucucucuacgucaaaggagaacccaucaucaacuucuacgacccccuggucuuccccuccgacgaguucgaugcaucaaucucccaagucaacgaaaagaucaaccaaucucucgcuuucauccgcaaauccgacgaacuccuacacaacguaaacgccggcaaauccaccacaaacaucaugaucaccaccauuaucauagucaucaucgucauccuccucuccuuaaucgccguuggccuccuucucuacugcaaagcccgauaaggacuaguguccaccugucccuccugggcugcuggauugucucguuuuccugccaaauaaacaggaucagcgcuuuacagaucuaaaaaaaaaaaaaaaaaaaaaaaaaaaaaaaaaaaaaaaaaaaaaaaaaaaaaaaaaaaaaaaaugcaucccccccccccccccccccccccccccccccaaaggcucuuuucagagccaccagaauu

SEQ ID NO: 3690 - RNA, 1914 nt, Artificial Sequence
  mRNA product Design e-6 comprising derived and/or modified sequence from HRSV(A2)__F-del_DSCav1_mut3 (opt1)
gggagagcggcucggccauuuugucccagucaguccggaggcugcggcugcagaaguaccgccugcggaguaacugcaaagaagcuuaccauggagcugcucauccugaaggccaacgccaucaccaccauccugacggcggugaccuucugcuucgccagcggccagaacaucaccgaggaguucuaccaguccacgugcagcgccgucuccaagggguaccucggcgcccugcggaccggcugguacaccuccgugaucaccaucgagcugagcaacaucaaggagaucaagugcaacgggaccgacgccaaggugaagcucaucaagcaggagcuggacaaguacaagaacgcggucacggaccugcagcuccugaugcaguccaccccggcaaccggcuccggcuccgccaucugcagcggcgucgccgugugcaaggugcugcaccucgagggggaggucaacaagaucaagagcgcccugcuguccaccaacaaggccguggugagccucuccaacggcgucagcgugcugaccuucaaggugcuggaccucaagaacuacaucgacaagcagcugcugcccauccugaacaagcagagcugcuccauccccaacaucgagacggugaucgaguuccagcagaagaacaaccggcuccuggagaucacccgcgaguucagcgugaacgccggggucaccacccccguguccacguacaugcugaccaacagcgagcuccugucccugaucaacgacaugccgaucaccaacgaccagaagaagcucaugagcaacaacgugcagaucguccggcagcaguccuacagcaucaugugcaucaucaaggaggaggugcuggcguacgugguccagcugccccucuacggcgugaucgacacccccugcuggaagcugcacacgagcccccugugcaccaccaacaccaaggagggguccaacaucugccucacgcgcaccgaccggggcugguacugcgacaacgccggcagcgucuccuucuucccgcaggccgagaccugcaaggugcagagcaaccgcguguucugcgacaccaugaacucccugacgcugcccagcgagguaaaccucugcaacgucgacaucuucaaccccaaguacgacugcaagaucaugaccuccaagaccgacgugagcuccagcgugaucaccucccugggggccaucgucagcugcuacggcaagacgaagugcaccgccagcaacaagaaccgggggaucaucaagaccuucuccaacggcugcgacuacgugagcaacaagggcguggacaccguguccgucgggaacacccuguacugcgugaacaagcaggagggccagagccucuacgugaagggggagcccaucaucaacuucuacgacccgcuggucuuccccuccgacgaguucgacgcgagcaucucccaggugaacgagaagaucaaccagagccuggccuucauccgcaaguccgacgagcugcuccacaacgugaacgccggcaagagcacgaccaacaucaugaucaccaccaucaucaucgucaucaucgugauccugcugucccucaucgccguggggcugcugcucuacugcaaggcccggugaggacuaguacuggcugcaucucccuuuccucuguccuccauccuucucccaggauggugaagggggaccugguacccagugauccccaccccaggauccuaaaucaugacuuaccugcuaauaaaaacucauuggaaaagugagaagaucuaaaaaaaaaaaaaaaaaaaaaaaaaaaaaaaaaaaaaaaaaaaaaaaaaaaaaaaaaaaaaaaaugcaucccccccccccccccccccccccccccccccaaaggcucuuuucagagccaccagaauu

SEQ ID NO: 3691 - RNA, 1914 nt, Artificial Sequence
  mRNA product Design e-6 comprising derived and/or modified sequence from HRSV(A2)__F-del_DSCav1_mut3 (opt1)
gggagagcggcucggccauuuugucccagucaguccggaggcugcggcugcagaaguaccgccugcggaguaacugcaaagaagcuuaccauggagcugcucauccugaaggccaacgccaucaccaccauccugacggcggugaccuucugcuucgccagcggccagaacaucaccgaggaguucuaccaguccacgugcagcgccgucuccaagggguaccucggcgcccugcgcaccgggugguacaccagcgugaucaccaucgagcuguccaacaucaaggagaucaagugcaacggcaccgacgccaaggugaagcucaucaagcaggagcuggacaaguacaagaacgcggucacggaccugcagcuccugaugcagagcacccccgccaccggguccggcagcgccaucugcuccggcguggccgugugcaagguccugcaccucgagggggaggugaacaagaucaagagcgcgcugcuguccaccaacaaggccguggucagccucuccaacggcgugagcgugcugacguucaagguccuggaccucaagaacuacaucgacaagcagcugcugccgauccucaacaagcaguccugcagcauccccaacaucgagaccgugaucgaguuccagcagaagaacaaccggcugcuggagaucacccgcgaguucuccgugaacgccggggucaccacgcccgugagcaccuacaugcucaccaacuccgagcugcugagccucaucaacgacaugcccaucaccaacgaccagaagaagcugaugagcaacaacgugcagaucguccggcagcaguccuacagcaucaugugcaucaucaaggaggaggugcuggccuacgugguccagcucccgcuguacggcgugaucgacacgcccugcuggaagcugcacaccagcccccucugcaccaccaacacgaaggagggguccaacaucugccugacccgcaccgaccggggcugguacugcgacaacgccggcuccgugagcuucuucccccaggcggagaccugcaagguccaguccaaccgcguguucugcgacacgaugaacagccugacccucccguccgaggucaaccugugcaacguggacaucuucaaccccaaguacgacugcaagaucaugaccagcaagaccgacguguccagcuccgucaucacgagccugggggccaucguguccugcuacggcaagaccaagugcaccgccagcaacaagaaccgggggaucaucaagaccuucuccaacggcugcgacuacgugagcaacaagggcgucgacacgguguccguggggaacacccucuacugcgucaacaagcaggagggccagagccuguacgugaagggggagcccaucaucaacuucuacgacccccugguguucccgagcgacgaguucgacgccuccaucagccaggucaacgagaagaucaaccagucccucgccuucauccgcaagagcgacgagcugcugcacaacgugaacgcgggcaaguccaccaccaacaucaugaucaccacgaucaucaucgugaucaucgucauccuccugagccugaucgccguggggcuccugcuguacugcaaggcccggugaggacuaguacuggcugcaucucccuuuccucuguccuccauccuucucccaggauggugaagggggaccugguacccagugauccccaccccaggauccuaaaucaugacuuaccugcuaauaaaaacucauuggaaaagugagaagaucuaaaaaaaaaaaaaaaaaaaaaaaaaaaaaaaaaaaaaaaaaaaaaaaaaaaaaaaaaaaaaaaaugcaucccccccccccccccccccccccccccccccaaaggcucuuuucagagccaccagaauu

SEQ ID NO: 3692 - RNA, 1914 nt, Artificial Sequence
  mRNA product Design e-6 comprising derived and/or modified sequence from HRSV(A2)__F-del_DSCav1_mut3 (opt2)
gggagagcggcucggccauuuugucccagucaguccggaggcugcggcugcagaaguaccgccugcggaguaacugcaaagaagcuuaccauggagcuccucauccucaaggccaacgccaucaccaccauccucaccgccgucaccuucugcuucgccuccggccagaacaucaccgaggaguucuaccaguccaccugcuccgccgucuccaagggcuaccucggcgcccuccgcaccggcugguacaccuccgucaucaccaucgagcucuccaacaucaaggagaucaagugcaacggcaccgacgccaaggucaagcucaucaagcaggagcucgacaaguacaagaacgccgucaccgaccuccagcuccucaugcaguccacccccgccaccggcuccggcuccgccaucugcuccggcgucgccgucugcaagguccuccaccucgagggcgaggucaacaagaucaaguccgcccuccucuccaccaacaaggccgucgucucccucuccaacggcgucuccguccucaccuucaagguccucgaccucaagaacuacaucgacaagcagcuccuccccauccucaacaagcaguccugcuccauccccaacaucgagaccgucaucgaguuccagcagaagaacaaccgccuccucgagaucacccgcgaguucuccgucaacgccggcgucaccacccccgucuccaccuacaugcucaccaacuccgagcuccucucccucaucaacgacaugcccaucaccaacgaccagaagaagcucauguccaacaacguccagaucguccgccagcaguccuacuccaucaugugcaucaucaaggaggagguccucgccuacgucguccagcucccccucuacggcgucaucgacacccccugcuggaagcuccacaccuccccccucugcaccaccaacaccaaggagggcuccaacaucugccucacccgcaccgaccgcggcugguacugcgacaacgccggcuccgucuccuucuucccccaggccgagaccugcaagguccaguccaaccgcgucuucugcgacaccaugaacucccucacccuccccuccgaggucaaccucugcaacgucgacaucuucaaccccaaguacgacugcaagaucaugaccuccaagaccgacgucuccuccuccgucaucaccucccucggcgccaucgucuccugcuacggcaagaccaagugcaccgccuccaacaagaaccgcggcaucaucaagaccuucuccaacggcugcgacuacgucuccaacaagggcgucgacaccgucuccgucggcaacacccucuacugcgucaacaagcaggagggccagucccucuacgucaagggcgagcccaucaucaacuucuacgacccccucgucuuccccuccgacgaguucgacgccuccaucucccaggucaacgagaagaucaaccagucccucgccuucauccgcaaguccgacgagcuccuccacaacgucaacgccggcaaguccaccaccaacaucaugaucaccaccaucaucaucgucaucaucgucauccuccucucccucaucgccgucggccuccuccucuacugcaaggcccgcugaggacuaguacuggcugcaucucccuuuccucuguccuccauccuucucccaggauggugaagggggaccugguacccagugauccccaccccaggauccuaaaucaugacuuaccugcuaauaaaaacucauuggaaaagugagaagaucuaaaaaaaaaaaaaaaaaaaaaaaaaaaaaaaaaaaaaaaaaaaaaaaaaaaaaaaaaaaaaaaaugcaucccccccccccccccccccccccccccccccaaaggcucuuuucagagccaccagaauu

SEQ ID NO: 3693 - RNA, 1914 nt, Artificial Sequence
  mRNA product Design e-6 comprising derived and/or modified sequence from HRSV(A2)__F-del_DSCav1_mut3 (opt3)
gggagagcggcucggccauuuugucccagucaguccggaggcugcggcugcagaaguaccgccugcggaguaacugcaaagaagcuuaccauggagcugcucauccuuaaggccaacgcuauuaccacaauacugacugcagugacguucugcuuugccagcggccagaauaucaccgaagaguucuaccaauccacauguucugcggucucaaaaggguauuugggagcuuuaagaacugguugguacaccaguguuauuacaaucgaacugagcaacauuaaggagaucaaaugcaauggcaccgacgccaaggugaaacuaauaaagcaggaacucgauaaguauaaaaacgcaguaacugaccugcagcuucugaugcaguccacacccgccaccgggucuggaucggcuaucuguucaggcguggcagucugcaagguguugcaccucgagggugagguuaauaaaauuaagagcgcccugcugaguacgaacaaagcuguggucucccucucuaauggggugagcguauuaacuuuuaagguucuggaucuuaagaacuacaucgacaaacaauugcugccuauucuaaauaagcaguccuguucaaucccaaacauagaaaccgugauugaguuccagcagaaaaauaacaggcuccuggaaaucacacgggaguuuagugucaaugccggagugacuaccccggugagcacauauaugcuuaccaacucugagcuguugucccucauuaaugauaugcccaucacgaacgaccaaaagaaacugaugucaaacaauguccagaucguucgccagcagagcuacaguauuaugugcauaaucaaggaagagguguuagcguauguagugcaacugccucucuacggcgucauugauacuccauguuggaaacuucauacaucuccccugugcaccacuaacacaaaggaaggcuccaauaucuguuugacccgaacggaccgugggugguacugcgauaacgcaggaagcgugucguucuuuccucaggccgagaccuguaagguucagucuaauagaguguucugcgacacaaugaacucccuaacucugccaucagaagucaaucucugcaacguggauauauuuaaucccaaauaugacuguaagauuaugaccaguaaaacagauguaagcuccucuguuaucacuagccugggugcuaucgugucaugcuacggcaagaccaaauguacagccaguaacaagaauagggggauuaucaagaccuucuccaacggaugcgacuaugucagcaauaaaggcguggacacugucucuguggguaacacgcuuuacuguguuaauaagcaagaggggcagucacuguaugugaaaggagagccuauuauaaacuuuuacgauccauugguauucccgagugacgaauuugaugcaagcaucucccaggucaacgagaagauuaaucagucucucgcuuucauccggaaaucggacgaacuguuacacaacgugaaugccggcaagagcacaaccaacaucaugauuacuaccauaaucauuguuaucauugugauccugcuaucccucauagcggucggccugcuuuuguauugcaaggcccgcugaggacuaguacuggcugcaucucccuuuccucuguccuccauccuucucccaggauggugaagggggaccugguacccagugauccccaccccaggauccuaaaucaugacuuaccugcuaauaaaaacucauuggaaaagugagaagaucuaaaaaaaaaaaaaaaaaaaaaaaaaaaaaaaaaaaaaaaaaaaaaaaaaaaaaaaaaaaaaaaaugcaucccccccccccccccccccccccccccccccaaaggcucuuuucagagccaccagaauu

SEQ ID NO: 3694 - RNA, 1914 nt, Artificial Sequence
  mRNA product Design e-6 comprising derived and/or modified sequence from HRSV(A2)__F-del_DSCav1_mut3 (opt4)
gggagagcggcucggccauuuugucccagucaguccggaggcugcggcugcagaaguaccgccugcggaguaacugcaaagaagcuuaccauggagcugcugauccugaaggccaacgccaucaccaccauccugaccgccgugaccuucugcuucgccagcggccagaacaucaccgaggaguucuaccagagcaccugcagcgccgugagcaagggcuaccugggcgcccugagaaccggcugguacaccagcgugaucaccaucgagcugagcaacaucaaggagaucaagugcaacggcaccgacgccaaggugaagcugaucaagcaggagcuggacaaguacaagaacgccgugaccgaccugcagcugcugaugcagagcacccccgccaccggcagcggcagcgccaucugcagcggcguggccgugugcaaggugcugcaccuggagggcgaggugaacaagaucaagagcgcccugcugagcaccaacaaggccguggugagccugagcaacggcgugagcgugcugaccuucaaggugcuggaccugaagaacuacaucgacaagcagcugcugcccauccugaacaagcagagcugcagcauccccaacaucgagaccgugaucgaguuccagcagaagaacaacagacugcuggagaucaccagagaguucagcgugaacgccggcgugaccacccccgugagcaccuacaugcugaccaacagcgagcugcugagccugaucaacgacaugcccaucaccaacgaccagaagaagcugaugagcaacaacgugcagaucgugagacagcagagcuacagcaucaugugcaucaucaaggaggaggugcuggccuacguggugcagcugccccuguacggcgugaucgacacccccugcuggaagcugcacaccagcccccugugcaccaccaacaccaaggagggcagcaacaucugccugaccagaaccgacagaggcugguacugcgacaacgccggcagcgugagcuucuucccccaggccgagaccugcaaggugcagagcaacagaguguucugcgacaccaugaacagccugacccugcccagcgaggugaaccugugcaacguggacaucuucaaccccaaguacgacugcaagaucaugaccagcaagaccgacgugagcagcagcgugaucaccagccugggcgccaucgugagcugcuacggcaagaccaagugcaccgccagcaacaagaacagaggcaucaucaagaccuucagcaacggcugcgacuacgugagcaacaagggcguggacaccgugagcgugggcaacacccuguacugcgugaacaagcaggagggccagagccuguacgugaagggcgagcccaucaucaacuucuacgacccccugguguuccccagcgacgaguucgacgccagcaucagccaggugaacgagaagaucaaccagagccuggccuucaucagaaagagcgacgagcugcugcacaacgugaacgccggcaagagcaccaccaacaucaugaucaccaccaucaucaucgugaucaucgugauccugcugagccugaucgccgugggccugcugcuguacugcaaggccagaugaggacuaguacuggcugcaucucccuuuccucuguccuccauccuucucccaggauggugaagggggaccugguacccagugauccccaccccaggauccuaaaucaugacuuaccugcuaauaaaaacucauuggaaaagugagaagaucuaaaaaaaaaaaaaaaaaaaaaaaaaaaaaaaaaaaaaaaaaaaaaaaaaaaaaaaaaaaaaaaaugcaucccccccccccccccccccccccccccccccaaaggcucuuuucagagccaccagaauu

SEQ ID NO: 3695 - RNA, 1914 nt, Artificial Sequence
  mRNA product Design e-6 comprising derived and/or modified sequence from HRSV(A2)__F-del_DSCav1_mut3 (opt5)
gggagagcggcucggccauuuugucccagucaguccggaggcugcggcugcagaaguaccgccugcggaguaacugcaaagaagcuuaccauggagcugcucauccugaaggccaacgcuauuaccacaauccuuacggccgugaccuucugcuuugcgagcggccagaauauuacagaagaguucuaccaauccaccuguucugcugucagcaaaggguaucugggagcccucagaacaggcugguacaccuccguuaucacaauugaacugucuaacaucaaggagaucaaaugcaaugggaccgacgccaaggugaaacuuauuaagcaggaacuggauaaguauaaaaacgcugugacggaccuccagcugcugaugcagagcacccccgccacaggauccggcucugcuaucuguagcggggucgccgugugcaagguucuccaccuggagggagaggugaauaaaauuaaguccgcgcuucugagcaccaacaaagccgucgugucucucuccaauggcguuagcgugcugacauuuaagguccuugaucugaagaacuacaucgacaaacaacuccugccuauucugaauaagcagucuuguuccaucccgaacauugaaaccgugaucgaguuccagcagaaaaauaaccggcuccuggaaaucacgcgcgaguuuagcgugaaugcuggcgucacaacccccguuucuacauauaugcuuaccaacuccgagcugcucagccugauuaaugauaugccuaucaccaacgaccaaaagaaacuuauguccaacaaugugcagauugugagacagcagucuuacagcaucaugugcauuaucaaggaagagguccuggccuaugugguucaacucccccuguacggggugaucgauacaccuuguuggaaacugcauacgagcccccucugcaccacaaacaccaaggaaggauccaauauuugucugacacggaccgaccgcggcugguacugcgauaacgcugggucugucuccuucuuuccucaggccgagacguguaaggugcagagcaauagaguuuucugcgacacaaugaacucucuuacccugccgagcgaagugaaucucugcaacgucgauaucuuuaaucccaaauaugacuguaagauuaugaccuccaaaacagaugugucuagcuccgucaucaccagccugggagcgauugugucuugcuacggcaagacaaaauguacggccuccaacaagaaucgggggaucaucaagaccuucagcaacggaugcgacuauguuucuaauaaaggcguggacacagucuccgugggcaacacccuuuacuguguuaauaagcaagaggggcagagccuguaugugaaaggagagccuauuaucaacuuuuacgauccccucgucuucccuuccgacgaauuugaugcuucuauuagccaggugaacgagaagaucaaucagucccuggccuucauucgcaaaucugacgaacugcuccacaacgugaaugcuggcaagagcacaaccaacaucaugauuacgaccaucaucauuguuaucauugucauccugcuuucccugauugccguggggcuccugcuguauugcaaggccagaugaggacuaguacuggcugcaucucccuuuccucuguccuccauccuucucccaggauggugaagggggaccugguacccagugauccccaccccaggauccuaaaucaugacuuaccugcuaauaaaaacucauuggaaaagugagaagaucuaaaaaaaaaaaaaaaaaaaaaaaaaaaaaaaaaaaaaaaaaaaaaaaaaaaaaaaaaaaaaaaaugcaucccccccccccccccccccccccccccccccaaaggcucuuuucagagccaccagaauu

SEQ ID NO: 3696 - RNA, 1914 nt, Artificial Sequence
  mRNA product Design e-6 comprising derived and/or modified sequence from HRSV(A2)__F-del_DSCav1_mut3 (opt6)
gggagagcggcucggccauuuugucccagucaguccggaggcugcggcugcagaaguaccgccugcggaguaacugcaaagaagcuuaccauggaauuacuaauccugaaagcaaacgcaauuacuacaauacuaacagcaguaaccuuuugcuuugccucaggacaaaacauaacugaagaauuuuaccaaucaacuugcucagcagucucaaaaggcuaucuaggagcacuacgaacagguugguauacuucagucauaacaauagaauuaucaaacauaaaagaaauuaaauguaacggaacugacgcaaaaguaaaacucaucaaacaagaacucgauaaauacaaaaacgcuguaaccgacuuacaacuacuaaugcaaucaacuccagcaacaggcuccggauccgcaauaugcagugguguagcaguaugcaaaguccuacaccuagaaggagaaguaaauaagauaaaaucugcucuacuaucaacaaauaaagcaguugucucccuaucaaauggagucucaguacucaccuucaaaguauuagaccucaaaaacuacauagacaaacaacuauuaccaauacucaacaaacaauccugcuccaucccuaacauagaaaccguaaucgaauuucaacaaaaaaauaacagacucuuagaaauaacuagagaauuuucaguuaaugcaggcgugacaacaccaguaucaacauauaugcuaacaaacuccgaacuccuaucccuaauaaacgacaugccaaucacaaacgaccaaaaaaaacuaauguccaacaacguacaaaucguaagacaacaaucauacucuauaaugugcauaauaaaagaagaaguacuggccuacguaguacaauuaccacucuacggaguaauagacaccccaugcuggaaacuccauacaucaccccuaugcacaacaaacacaaaagaaggauccaacauaugucucacuagaacagacagaggcugguacugcgacaacgcuggauccgucucauucuucccccaagcagaaacauguaaaguacaaucuaauagaguauuuugugacacaaugaacagccucacacuaccauccgaagucaaccuauguaacguagauauauuuaaucccaaauacgacugcaaaauaaugacauccaaaacagauguaucaucauccguuaucaccucacuaggagccauaguuucaugcuacggaaaaacaaaaugcacugcaucuaacaaaaauagagguauaauaaaaacauuuuccaacggcugcgacuacgucucaaacaaaggcguagacaccguaucaguaggaaauacauuauauugcguaaauaaacaagaaggccaaucccuauacguaaaaggagaacccaucauaaacuucuaugacccacuuguuuuccccucagacgaauuugacgccucaauaucacaaguaaaugaaaaaauaaaccaaucucuugccuucauuagaaaaucagacgaauuacuacacaacgucaacgcaggaaaaucaacaacaaacaucaugauaacaacgauaauaauagucauaauaguaauacuacuaucauuaaucgcagucggacuccuauuauauugcaaagcuagauaaggacuaguacuggcugcaucucccuuuccucuguccuccauccuucucccaggauggugaagggggaccugguacccagugauccccaccccaggauccuaaaucaugacuuaccugcuaauaaaaacucauuggaaaagugagaagaucuaaaaaaaaaaaaaaaaaaaaaaaaaaaaaaaaaaaaaaaaaaaaaaaaaaaaaaaaaaaaaaaaugcaucccccccccccccccccccccccccccccccaaaggcucuuuucagagccaccagaauu

SEQ ID NO: 3697 - RNA, 1914 nt, Artificial Sequence
  mRNA product Design e-6 comprising derived and/or modified sequence from HRSV(A2)__F-del_DSCav1_mut3 (opt11)
gggagagcggcucggccauuuugucccagucaguccggaggcugcggcugcagaaguaccgccugcggaguaacugcaaagaagcuuaccauggaacuacucauacuaaaagccaacgccauaaccaccauccucaccgcaguaacuuucugcuucgcuuccggccaaaacaucaccgaagaauuuuaccaaaguaccugcagcgcagucucaaaaggauaccuaggcgcccuacgcacaggcugguacaccuccgucauuaccaucgaacucuccaacaucaaagaaauuaaaugcaacgguacagacgcaaaagucaaacucaucaaacaagaacucgacaaauacaaaaacgcagucaccgaccuccaacuccucaugcaauccacccccgccacaggcucuggcuccgccaucugcucaggcguagcagucugcaaaguccugcaccucgaaggcgaagucaacaaaaucaagucagcccuccucuccaccaacaaggccgucguaucccucucaaacggaguuagcguccucaccuucaaaguccuagaccucaaaaacuacaucgauaaacaacuacuccccauccuaaacaaacaaucaugcuccaucccaaacaucgaaaccguaaucgaguuccaacaaaagaacaaccgccuccucgaaaucacacgugaguucuccguuaacgccggcgucaccacccccgucucuacauacaugcucaccaacuccgaacuccuuucccucaucaacgacaugccaaucaccaacgaccaaaagaaacucaugucaaacaacguacaaaucguccgacaacaaagcuacuccaucaugugcaucaucaaagaagaaguccuugcauacgucguucaacuaccccucuacggcguaaucgacacucccugcuggaaacuccacaccuccccgcucugcacaaccaacaccaaagaaggcagcaacaucugccucacccgaaccgaccgcggcugguacugcgauaacgccggauccgucuccuucuucccacaagcagaaacuugcaaaguccaauccaaccgcgucuucugcgacaccaugaacucccucacacuccccuccgaagucaaccugugcaacgucgacaucuucaacccaaaauacgacugcaaaaucaugaccucaaaaaccgacgucucaucuucugucaucaccucucucggcgcuaucgucuccugcuauggcaaaaccaaaugcaccgccuccaacaagaaccgcggcauuaucaagaccuucuccaacggcugcgacuacgucuccaauaagggcgucgacaccgucucugucggcaacacccuuuacugcguaaacaaacaagaaggucaaucucucuacgucaaaggagaacccaucaucaacuucuacgacccccuggucuuccccuccgacgaguucgaugcaucaaucucccaagucaacgaaaagaucaaccaaucucucgcuuucauccgcaaauccgacgaacuccuacacaacguaaacgccggcaaauccaccacaaacaucaugaucaccaccauuaucauagucaucaucgucauccuccucuccuuaaucgccguuggccuccuucucuacugcaaagcccgauaaggacuaguacuggcugcaucucccuuuccucuguccuccauccuucucccaggauggugaagggggaccugguacccagugauccccaccccaggauccuaaaucaugacuuaccugcuaauaaaaacucauuggaaaagugagaagaucuaaaaaaaaaaaaaaaaaaaaaaaaaaaaaaaaaaaaaaaaaaaaaaaaaaaaaaaaaaaaaaaaugcaucccccccccccccccccccccccccccccccaaaggcucuuuucagagccaccagaauu

SEQ ID NO: 3698 - RNA, 2130 nt, Artificial Sequence
  mRNA product Design f-1 comprising derived and/or modified sequence from HRSV(A2)__F-del_DSCav1_mut3 (opt1)
gggagagcggcucggccauuuugucccagucaguccggaggcugcggcugcagaaguaccgccugcggaguaacugcaaagaagcuuaccauggagcugcucauccugaaggccaacgccaucaccaccauccugacggcggugaccuucugcuucgccagcggccagaacaucaccgaggaguucuaccaguccacgugcagcgccgucuccaagggguaccucggcgcccugcggaccggcugguacaccuccgugaucaccaucgagcugagcaacaucaaggagaucaagugcaacgggaccgacgccaaggugaagcucaucaagcaggagcuggacaaguacaagaacgcggucacggaccugcagcuccugaugcaguccaccccggcaaccggcuccggcuccgccaucugcagcggcgucgccgugugcaaggugcugcaccucgagggggaggucaacaagaucaagagcgcccugcuguccaccaacaaggccguggugagccucuccaacggcgucagcgugcugaccuucaaggugcuggaccucaagaacuacaucgacaagcagcugcugcccauccugaacaagcagagcugcuccauccccaacaucgagacggugaucgaguuccagcagaagaacaaccggcuccuggagaucacccgcgaguucagcgugaacgccggggucaccacccccguguccacguacaugcugaccaacagcgagcuccugucccugaucaacgacaugccgaucaccaacgaccagaagaagcucaugagcaacaacgugcagaucguccggcagcaguccuacagcaucaugugcaucaucaaggaggaggugcuggcguacgugguccagcugccccucuacggcgugaucgacacccccugcuggaagcugcacacgagcccccugugcaccaccaacaccaaggagggguccaacaucugccucacgcgcaccgaccggggcugguacugcgacaacgccggcagcgucuccuucuucccgcaggccgagaccugcaaggugcagagcaaccgcguguucugcgacaccaugaacucccugacgcugcccagcgagguaaaccucugcaacgucgacaucuucaaccccaaguacgacugcaagaucaugaccuccaagaccgacgugagcuccagcgugaucaccucccugggggccaucgucagcugcuacggcaagacgaagugcaccgccagcaacaagaaccgggggaucaucaagaccuucuccaacggcugcgacuacgugagcaacaagggcguggacaccguguccgucgggaacacccuguacugcgugaacaagcaggagggccagagccucuacgugaagggggagcccaucaucaacuucuacgacccgcuggucuuccccuccgacgaguucgacgcgagcaucucccaggugaacgagaagaucaaccagagccuggccuucauccgcaaguccgacgagcugcuccacaacgugaacgccggcaagagcacgaccaacaucaugaucaccaccaucaucaucgucaucaucgugauccugcugucccucaucgccguggggcugcugcucuacugcaaggcccggugaggacuagugaagggaacacccaaauuuaauucagccuuaagcacaauuaauuaagagugaaacguaauuguacaagcaguuggucacccaccauagggcaugaucaacaccgcaaccuuuccuuuuucccccagugauucugaaaaaccccucuucccuucagcuugcuuagauguuccaaauuuaguaagcuuaaggcggccuacagaagaaaaagaaaaaaaaggccacaaaaguucccucucacuuucaguaaauaaaauaaaagcagcaacagaaauaaagaaauaaaugaaauucaaaaugaaauaaauauuguguugugcagcauuaaaaaaucaauaaaaauuaaaaaugagcaagaucuaaaaaaaaaaaaaaaaaaaaaaaaaaaaaaaaaaaaaaaaaaaaaaaaaaaaaaaaaaaaaaaaugcaucccccccccccccccccccccccccccccccaaaggcucuuuucagagccaccagaauu

SEQ ID NO: 3699 - RNA, 2130 nt, Artificial Sequence
  mRNA product Design f-1 comprising derived and/or modified sequence from HRSV(A2)__F-del_DSCav1_mut3 (opt1)
gggagagcggcucggccauuuugucccagucaguccggaggcugcggcugcagaaguaccgccugcggaguaacugcaaagaagcuuaccauggagcugcucauccugaaggccaacgccaucaccaccauccugacggcggugaccuucugcuucgccagcggccagaacaucaccgaggaguucuaccaguccacgugcagcgccgucuccaagggguaccucggcgcccugcgcaccgggugguacaccagcgugaucaccaucgagcuguccaacaucaaggagaucaagugcaacggcaccgacgccaaggugaagcucaucaagcaggagcuggacaaguacaagaacgcggucacggaccugcagcuccugaugcagagcacccccgccaccggguccggcagcgccaucugcuccggcguggccgugugcaagguccugcaccucgagggggaggugaacaagaucaagagcgcgcugcuguccaccaacaaggccguggucagccucuccaacggcgugagcgugcugacguucaagguccuggaccucaagaacuacaucgacaagcagcugcugccgauccucaacaagcaguccugcagcauccccaacaucgagaccgugaucgaguuccagcagaagaacaaccggcugcuggagaucacccgcgaguucuccgugaacgccggggucaccacgcccgugagcaccuacaugcucaccaacuccgagcugcugagccucaucaacgacaugcccaucaccaacgaccagaagaagcugaugagcaacaacgugcagaucguccggcagcaguccuacagcaucaugugcaucaucaaggaggaggugcuggccuacgugguccagcucccgcuguacggcgugaucgacacgcccugcuggaagcugcacaccagcccccucugcaccaccaacacgaaggagggguccaacaucugccugacccgcaccgaccggggcugguacugcgacaacgccggcuccgugagcuucuucccccaggcggagaccugcaagguccaguccaaccgcguguucugcgacacgaugaacagccugacccucccguccgaggucaaccugugcaacguggacaucuucaaccccaaguacgacugcaagaucaugaccagcaagaccgacguguccagcuccgucaucacgagccugggggccaucguguccugcuacggcaagaccaagugcaccgccagcaacaagaaccgggggaucaucaagaccuucuccaacggcugcgacuacgugagcaacaagggcgucgacacgguguccguggggaacacccucuacugcgucaacaagcaggagggccagagccuguacgugaagggggagcccaucaucaacuucuacgacccccugguguucccgagcgacgaguucgacgccuccaucagccaggucaacgagaagaucaaccagucccucgccuucauccgcaagagcgacgagcugcugcacaacgugaacgcgggcaaguccaccaccaacaucaugaucaccacgaucaucaucgugaucaucgucauccuccugagccugaucgccguggggcuccugcuguacugcaaggcccggugaggacuagugaagggaacacccaaauuuaauucagccuuaagcacaauuaauuaagagugaaacguaauuguacaagcaguuggucacccaccauagggcaugaucaacaccgcaaccuuuccuuuuucccccagugauucugaaaaaccccucuucccuucagcuugcuuagauguuccaaauuuaguaagcuuaaggcggccuacagaagaaaaagaaaaaaaaggccacaaaaguucccucucacuuucaguaaauaaaauaaaagcagcaacagaaauaaagaaauaaaugaaauucaaaaugaaauaaauauuguguugugcagcauuaaaaaaucaauaaaaauuaaaaaugagcaagaucuaaaaaaaaaaaaaaaaaaaaaaaaaaaaaaaaaaaaaaaaaaaaaaaaaaaaaaaaaaaaaaaaugcaucccccccccccccccccccccccccccccccaaaggcucuuuucagagccaccagaauu

SEQ ID NO: 3700 - RNA, 2130 nt, Artificial Sequence
  mRNA product Design f-1 comprising derived and/or modified sequence from HRSV(A2)__F-del_DSCav1_mut3 (opt2)
gggagagcggcucggccauuuugucccagucaguccggaggcugcggcugcagaaguaccgccugcggaguaacugcaaagaagcuuaccauggagcuccucauccucaaggccaacgccaucaccaccauccucaccgccgucaccuucugcuucgccuccggccagaacaucaccgaggaguucuaccaguccaccugcuccgccgucuccaagggcuaccucggcgcccuccgcaccggcugguacaccuccgucaucaccaucgagcucuccaacaucaaggagaucaagugcaacggcaccgacgccaaggucaagcucaucaagcaggagcucgacaaguacaagaacgccgucaccgaccuccagcuccucaugcaguccacccccgccaccggcuccggcuccgccaucugcuccggcgucgccgucugcaagguccuccaccucgagggcgaggucaacaagaucaaguccgcccuccucuccaccaacaaggccgucgucucccucuccaacggcgucuccguccucaccuucaagguccucgaccucaagaacuacaucgacaagcagcuccuccccauccucaacaagcaguccugcuccauccccaacaucgagaccgucaucgaguuccagcagaagaacaaccgccuccucgagaucacccgcgaguucuccgucaacgccggcgucaccacccccgucuccaccuacaugcucaccaacuccgagcuccucucccucaucaacgacaugcccaucaccaacgaccagaagaagcucauguccaacaacguccagaucguccgccagcaguccuacuccaucaugugcaucaucaaggaggagguccucgccuacgucguccagcucccccucuacggcgucaucgacacccccugcuggaagcuccacaccuccccccucugcaccaccaacaccaaggagggcuccaacaucugccucacccgcaccgaccgcggcugguacugcgacaacgccggcuccgucuccuucuucccccaggccgagaccugcaagguccaguccaaccgcgucuucugcgacaccaugaacucccucacccuccccuccgaggucaaccucugcaacgucgacaucuucaaccccaaguacgacugcaagaucaugaccuccaagaccgacgucuccuccuccgucaucaccucccucggcgccaucgucuccugcuacggcaagaccaagugcaccgccuccaacaagaaccgcggcaucaucaagaccuucuccaacggcugcgacuacgucuccaacaagggcgucgacaccgucuccgucggcaacacccucuacugcgucaacaagcaggagggccagucccucuacgucaagggcgagcccaucaucaacuucuacgacccccucgucuuccccuccgacgaguucgacgccuccaucucccaggucaacgagaagaucaaccagucccucgccuucauccgcaaguccgacgagcuccuccacaacgucaacgccggcaaguccaccaccaacaucaugaucaccaccaucaucaucgucaucaucgucauccuccucucccucaucgccgucggccuccuccucuacugcaaggcccgcugaggacuagugaagggaacacccaaauuuaauucagccuuaagcacaauuaauuaagagugaaacguaauuguacaagcaguuggucacccaccauagggcaugaucaacaccgcaaccuuuccuuuuucccccagugauucugaaaaaccccucuucccuucagcuugcuuagauguuccaaauuuaguaagcuuaaggcggccuacagaagaaaaagaaaaaaaaggccacaaaaguucccucucacuuucaguaaauaaaauaaaagcagcaacagaaauaaagaaauaaaugaaauucaaaaugaaauaaauauuguguugugcagcauuaaaaaaucaauaaaaauuaaaaaugagcaagaucuaaaaaaaaaaaaaaaaaaaaaaaaaaaaaaaaaaaaaaaaaaaaaaaaaaaaaaaaaaaaaaaaugcaucccccccccccccccccccccccccccccccaaaggcucuuuucagagccaccagaauu

SEQ ID NO: 3701 - RNA, 2130 nt, Artificial Sequence
  mRNA product Design f-1 comprising derived and/or modified sequence from HRSV(A2)__F-del_DSCav1_mut3 (opt3)
gggagagcggcucggccauuuugucccagucaguccggaggcugcggcugcagaaguaccgccugcggaguaacugcaaagaagcuuaccauggagcugcucauccuuaaggccaacgcuauuaccacaauacugacugcagugacguucugcuuugccagcggccagaauaucaccgaagaguucuaccaauccacauguucugcggucucaaaaggguauuugggagcuuuaagaacugguugguacaccaguguuauuacaaucgaacugagcaacauuaaggagaucaaaugcaauggcaccgacgccaaggugaaacuaauaaagcaggaacucgauaaguauaaaaacgcaguaacugaccugcagcuucugaugcaguccacacccgccaccgggucuggaucggcuaucuguucaggcguggcagucugcaagguguugcaccucgagggugagguuaauaaaauuaagagcgcccugcugaguacgaacaaagcuguggucucccucucuaauggggugagcguauuaacuuuuaagguucuggaucuuaagaacuacaucgacaaacaauugcugccuauucuaaauaagcaguccuguucaaucccaaacauagaaaccgugauugaguuccagcagaaaaauaacaggcuccuggaaaucacacgggaguuuagugucaaugccggagugacuaccccggugagcacauauaugcuuaccaacucugagcuguugucccucauuaaugauaugcccaucacgaacgaccaaaagaaacugaugucaaacaauguccagaucguucgccagcagagcuacaguauuaugugcauaaucaaggaagagguguuagcguauguagugcaacugccucucuacggcgucauugauacuccauguuggaaacuucauacaucuccccugugcaccacuaacacaaaggaaggcuccaauaucuguuugacccgaacggaccgugggugguacugcgauaacgcaggaagcgugucguucuuuccucaggccgagaccuguaagguucagucuaauagaguguucugcgacacaaugaacucccuaacucugccaucagaagucaaucucugcaacguggauauauuuaaucccaaauaugacuguaagauuaugaccaguaaaacagauguaagcuccucuguuaucacuagccugggugcuaucgugucaugcuacggcaagaccaaauguacagccaguaacaagaauagggggauuaucaagaccuucuccaacggaugcgacuaugucagcaauaaaggcguggacacugucucuguggguaacacgcuuuacuguguuaauaagcaagaggggcagucacuguaugugaaaggagagccuauuauaaacuuuuacgauccauugguauucccgagugacgaauuugaugcaagcaucucccaggucaacgagaagauuaaucagucucucgcuuucauccggaaaucggacgaacuguuacacaacgugaaugccggcaagagcacaaccaacaucaugauuacuaccauaaucauuguuaucauugugauccugcuaucccucauagcggucggccugcuuuuguauugcaaggcccgcugaggacuagugaagggaacacccaaauuuaauucagccuuaagcacaauuaauuaagagugaaacguaauuguacaagcaguuggucacccaccauagggcaugaucaacaccgcaaccuuuccuuuuucccccagugauucugaaaaaccccucuucccuucagcuugcuuagauguuccaaauuuaguaagcuuaaggcggccuacagaagaaaaagaaaaaaaaggccacaaaaguucccucucacuuucaguaaauaaaauaaaagcagcaacagaaauaaagaaauaaaugaaauucaaaaugaaauaaauauuguguugugcagcauuaaaaaaucaauaaaaauuaaaaaugagcaagaucuaaaaaaaaaaaaaaaaaaaaaaaaaaaaaaaaaaaaaaaaaaaaaaaaaaaaaaaaaaaaaaaaugcaucccccccccccccccccccccccccccccccaaaggcucuuuucagagccaccagaauu

SEQ ID NO: 3702 - RNA, 2130 nt, Artificial Sequence
  mRNA product Design f-1 comprising derived and/or modified sequence from HRSV(A2)__F-del_DSCav1_mut3 (opt4)
gggagagcggcucggccauuuugucccagucaguccggaggcugcggcugcagaaguaccgccugcggaguaacugcaaagaagcuuaccauggagcugcugauccugaaggccaacgccaucaccaccauccugaccgccgugaccuucugcuucgccagcggccagaacaucaccgaggaguucuaccagagcaccugcagcgccgugagcaagggcuaccugggcgcccugagaaccggcugguacaccagcgugaucaccaucgagcugagcaacaucaaggagaucaagugcaacggcaccgacgccaaggugaagcugaucaagcaggagcuggacaaguacaagaacgccgugaccgaccugcagcugcugaugcagagcacccccgccaccggcagcggcagcgccaucugcagcggcguggccgugugcaaggugcugcaccuggagggcgaggugaacaagaucaagagcgcccugcugagcaccaacaaggccguggugagccugagcaacggcgugagcgugcugaccuucaaggugcuggaccugaagaacuacaucgacaagcagcugcugcccauccugaacaagcagagcugcagcauccccaacaucgagaccgugaucgaguuccagcagaagaacaacagacugcuggagaucaccagagaguucagcgugaacgccggcgugaccacccccgugagcaccuacaugcugaccaacagcgagcugcugagccugaucaacgacaugcccaucaccaacgaccagaagaagcugaugagcaacaacgugcagaucgugagacagcagagcuacagcaucaugugcaucaucaaggaggaggugcuggccuacguggugcagcugccccuguacggcgugaucgacacccccugcuggaagcugcacaccagcccccugugcaccaccaacaccaaggagggcagcaacaucugccugaccagaaccgacagaggcugguacugcgacaacgccggcagcgugagcuucuucccccaggccgagaccugcaaggugcagagcaacagaguguucugcgacaccaugaacagccugacccugcccagcgaggugaaccugugcaacguggacaucuucaaccccaaguacgacugcaagaucaugaccagcaagaccgacgugagcagcagcgugaucaccagccugggcgccaucgugagcugcuacggcaagaccaagugcaccgccagcaacaagaacagaggcaucaucaagaccuucagcaacggcugcgacuacgugagcaacaagggcguggacaccgugagcgugggcaacacccuguacugcgugaacaagcaggagggccagagccuguacgugaagggcgagcccaucaucaacuucuacgacccccugguguuccccagcgacgaguucgacgccagcaucagccaggugaacgagaagaucaaccagagccuggccuucaucagaaagagcgacgagcugcugcacaacgugaacgccggcaagagcaccaccaacaucaugaucaccaccaucaucaucgugaucaucgugauccugcugagccugaucgccgugggccugcugcuguacugcaaggccagaugaggacuagugaagggaacacccaaauuuaauucagccuuaagcacaauuaauuaagagugaaacguaauuguacaagcaguuggucacccaccauagggcaugaucaacaccgcaaccuuuccuuuuucccccagugauucugaaaaaccccucuucccuucagcuugcuuagauguuccaaauuuaguaagcuuaaggcggccuacagaagaaaaagaaaaaaaaggccacaaaaguucccucucacuuucaguaaauaaaauaaaagcagcaacagaaauaaagaaauaaaugaaauucaaaaugaaauaaauauuguguugugcagcauuaaaaaaucaauaaaaauuaaaaaugagcaagaucuaaaaaaaaaaaaaaaaaaaaaaaaaaaaaaaaaaaaaaaaaaaaaaaaaaaaaaaaaaaaaaaaugcaucccccccccccccccccccccccccccccccaaaggcucuuuucagagccaccagaauu

SEQ ID NO: 3703 - RNA, 2130 nt, Artificial Sequence
  mRNA product Design f-1 comprising derived and/or modified sequence from HRSV(A2)__F-del_DSCav1_mut3 (opt5)
gggagagcggcucggccauuuugucccagucaguccggaggcugcggcugcagaaguaccgccugcggaguaacugcaaagaagcuuaccauggagcugcucauccugaaggccaacgcuauuaccacaauccuuacggccgugaccuucugcuuugcgagcggccagaauauuacagaagaguucuaccaauccaccuguucugcugucagcaaaggguaucugggagcccucagaacaggcugguacaccuccguuaucacaauugaacugucuaacaucaaggagaucaaaugcaaugggaccgacgccaaggugaaacuuauuaagcaggaacuggauaaguauaaaaacgcugugacggaccuccagcugcugaugcagagcacccccgccacaggauccggcucugcuaucuguagcggggucgccgugugcaagguucuccaccuggagggagaggugaauaaaauuaaguccgcgcuucugagcaccaacaaagccgucgugucucucuccaauggcguuagcgugcugacauuuaagguccuugaucugaagaacuacaucgacaaacaacuccugccuauucugaauaagcagucuuguuccaucccgaacauugaaaccgugaucgaguuccagcagaaaaauaaccggcuccuggaaaucacgcgcgaguuuagcgugaaugcuggcgucacaacccccguuucuacauauaugcuuaccaacuccgagcugcucagccugauuaaugauaugccuaucaccaacgaccaaaagaaacuuauguccaacaaugugcagauugugagacagcagucuuacagcaucaugugcauuaucaaggaagagguccuggccuaugugguucaacucccccuguacggggugaucgauacaccuuguuggaaacugcauacgagcccccucugcaccacaaacaccaaggaaggauccaauauuugucugacacggaccgaccgcggcugguacugcgauaacgcugggucugucuccuucuuuccucaggccgagacguguaaggugcagagcaauagaguuuucugcgacacaaugaacucucuuacccugccgagcgaagugaaucucugcaacgucgauaucuuuaaucccaaauaugacuguaagauuaugaccuccaaaacagaugugucuagcuccgucaucaccagccugggagcgauugugucuugcuacggcaagacaaaauguacggccuccaacaagaaucgggggaucaucaagaccuucagcaacggaugcgacuauguuucuaauaaaggcguggacacagucuccgugggcaacacccuuuacuguguuaauaagcaagaggggcagagccuguaugugaaaggagagccuauuaucaacuuuuacgauccccucgucuucccuuccgacgaauuugaugcuucuauuagccaggugaacgagaagaucaaucagucccuggccuucauucgcaaaucugacgaacugcuccacaacgugaaugcuggcaagagcacaaccaacaucaugauuacgaccaucaucauuguuaucauugucauccugcuuucccugauugccguggggcuccugcuguauugcaaggccagaugaggacuagugaagggaacacccaaauuuaauucagccuuaagcacaauuaauuaagagugaaacguaauuguacaagcaguuggucacccaccauagggcaugaucaacaccgcaaccuuuccuuuuucccccagugauucugaaaaaccccucuucccuucagcuugcuuagauguuccaaauuuaguaagcuuaaggcggccuacagaagaaaaagaaaaaaaaggccacaaaaguucccucucacuuucaguaaauaaaauaaaagcagcaacagaaauaaagaaauaaaugaaauucaaaaugaaauaaauauuguguugugcagcauuaaaaaaucaauaaaaauuaaaaaugagcaagaucuaaaaaaaaaaaaaaaaaaaaaaaaaaaaaaaaaaaaaaaaaaaaaaaaaaaaaaaaaaaaaaaaugcaucccccccccccccccccccccccccccccccaaaggcucuuuucagagccaccagaauu

SEQ ID NO: 3704 - RNA, 2130 nt, Artificial Sequence
  mRNA product Design f-1 comprising derived and/or modified sequence from HRSV(A2)__F-del_DSCav1_mut3 (opt6)
gggagagcggcucggccauuuugucccagucaguccggaggcugcggcugcagaaguaccgccugcggaguaacugcaaagaagcuuaccauggaauuacuaauccugaaagcaaacgcaauuacuacaauacuaacagcaguaaccuuuugcuuugccucaggacaaaacauaacugaagaauuuuaccaaucaacuugcucagcagucucaaaaggcuaucuaggagcacuacgaacagguugguauacuucagucauaacaauagaauuaucaaacauaaaagaaauuaaauguaacggaacugacgcaaaaguaaaacucaucaaacaagaacucgauaaauacaaaaacgcuguaaccgacuuacaacuacuaaugcaaucaacuccagcaacaggcuccggauccgcaauaugcagugguguagcaguaugcaaaguccuacaccuagaaggagaaguaaauaagauaaaaucugcucuacuaucaacaaauaaagcaguugucucccuaucaaauggagucucaguacucaccuucaaaguauuagaccucaaaaacuacauagacaaacaacuauuaccaauacucaacaaacaauccugcuccaucccuaacauagaaaccguaaucgaauuucaacaaaaaaauaacagacucuuagaaauaacuagagaauuuucaguuaaugcaggcgugacaacaccaguaucaacauauaugcuaacaaacuccgaacuccuaucccuaauaaacgacaugccaaucacaaacgaccaaaaaaaacuaauguccaacaacguacaaaucguaagacaacaaucauacucuauaaugugcauaauaaaagaagaaguacuggccuacguaguacaauuaccacucuacggaguaauagacaccccaugcuggaaacuccauacaucaccccuaugcacaacaaacacaaaagaaggauccaacauaugucucacuagaacagacagaggcugguacugcgacaacgcuggauccgucucauucuucccccaagcagaaacauguaaaguacaaucuaauagaguauuuugugacacaaugaacagccucacacuaccauccgaagucaaccuauguaacguagauauauuuaaucccaaauacgacugcaaaauaaugacauccaaaacagauguaucaucauccguuaucaccucacuaggagccauaguuucaugcuacggaaaaacaaaaugcacugcaucuaacaaaaauagagguauaauaaaaacauuuuccaacggcugcgacuacgucucaaacaaaggcguagacaccguaucaguaggaaauacauuauauugcguaaauaaacaagaaggccaaucccuauacguaaaaggagaacccaucauaaacuucuaugacccacuuguuuuccccucagacgaauuugacgccucaauaucacaaguaaaugaaaaaauaaaccaaucucuugccuucauuagaaaaucagacgaauuacuacacaacgucaacgcaggaaaaucaacaacaaacaucaugauaacaacgauaauaauagucauaauaguaauacuacuaucauuaaucgcagucggacuccuauuauauugcaaagcuagauaaggacuagugaagggaacacccaaauuuaauucagccuuaagcacaauuaauuaagagugaaacguaauuguacaagcaguuggucacccaccauagggcaugaucaacaccgcaaccuuuccuuuuucccccagugauucugaaaaaccccucuucccuucagcuugcuuagauguuccaaauuuaguaagcuuaaggcggccuacagaagaaaaagaaaaaaaaggccacaaaaguucccucucacuuucaguaaauaaaauaaaagcagcaacagaaauaaagaaauaaaugaaauucaaaaugaaauaaauauuguguugugcagcauuaaaaaaucaauaaaaauuaaaaaugagcaagaucuaaaaaaaaaaaaaaaaaaaaaaaaaaaaaaaaaaaaaaaaaaaaaaaaaaaaaaaaaaaaaaaaugcaucccccccccccccccccccccccccccccccaaaggcucuuuucagagccaccagaauu

SEQ ID NO: 3705 - RNA, 2130 nt, Artificial Sequence
  mRNA product Design f-1 comprising derived and/or modified sequence from HRSV(A2)__F-del_DSCav1_mut3 (opt11)
gggagagcggcucggccauuuugucccagucaguccggaggcugcggcugcagaaguaccgccugcggaguaacugcaaagaagcuuaccauggaacuacucauacuaaaagccaacgccauaaccaccauccucaccgcaguaacuuucugcuucgcuuccggccaaaacaucaccgaagaauuuuaccaaaguaccugcagcgcagucucaaaaggauaccuaggcgcccuacgcacaggcugguacaccuccgucauuaccaucgaacucuccaacaucaaagaaauuaaaugcaacgguacagacgcaaaagucaaacucaucaaacaagaacucgacaaauacaaaaacgcagucaccgaccuccaacuccucaugcaauccacccccgccacaggcucuggcuccgccaucugcucaggcguagcagucugcaaaguccugcaccucgaaggcgaagucaacaaaaucaagucagcccuccucuccaccaacaaggccgucguaucccucucaaacggaguuagcguccucaccuucaaaguccuagaccucaaaaacuacaucgauaaacaacuacuccccauccuaaacaaacaaucaugcuccaucccaaacaucgaaaccguaaucgaguuccaacaaaagaacaaccgccuccucgaaaucacacgugaguucuccguuaacgccggcgucaccacccccgucucuacauacaugcucaccaacuccgaacuccuuucccucaucaacgacaugccaaucaccaacgaccaaaagaaacucaugucaaacaacguacaaaucguccgacaacaaagcuacuccaucaugugcaucaucaaagaagaaguccuugcauacgucguucaacuaccccucuacggcguaaucgacacucccugcuggaaacuccacaccuccccgcucugcacaaccaacaccaaagaaggcagcaacaucugccucacccgaaccgaccgcggcugguacugcgauaacgccggauccgucuccuucuucccacaagcagaaacuugcaaaguccaauccaaccgcgucuucugcgacaccaugaacucccucacacuccccuccgaagucaaccugugcaacgucgacaucuucaacccaaaauacgacugcaaaaucaugaccucaaaaaccgacgucucaucuucugucaucaccucucucggcgcuaucgucuccugcuauggcaaaaccaaaugcaccgccuccaacaagaaccgcggcauuaucaagaccuucuccaacggcugcgacuacgucuccaauaagggcgucgacaccgucucugucggcaacacccuuuacugcguaaacaaacaagaaggucaaucucucuacgucaaaggagaacccaucaucaacuucuacgacccccuggucuuccccuccgacgaguucgaugcaucaaucucccaagucaacgaaaagaucaaccaaucucucgcuuucauccgcaaauccgacgaacuccuacacaacguaaacgccggcaaauccaccacaaacaucaugaucaccaccauuaucauagucaucaucgucauccuccucuccuuaaucgccguuggccuccuucucuacugcaaagcccgauaaggacuagugaagggaacacccaaauuuaauucagccuuaagcacaauuaauuaagagugaaacguaauuguacaagcaguuggucacccaccauagggcaugaucaacaccgcaaccuuuccuuuuucccccagugauucugaaaaaccccucuucccuucagcuugcuuagauguuccaaauuuaguaagcuuaaggcggccuacagaagaaaaagaaaaaaaaggccacaaaaguucccucucacuuucaguaaauaaaauaaaagcagcaacagaaauaaagaaauaaaugaaauucaaaaugaaauaaauauuguguugugcagcauuaaaaaaucaauaaaaauuaaaaaugagcaagaucuaaaaaaaaaaaaaaaaaaaaaaaaaaaaaaaaaaaaaaaaaaaaaaaaaaaaaaaaaaaaaaaaugcaucccccccccccccccccccccccccccccccaaaggcucuuuucagagccaccagaauu

SEQ ID NO: 3706 - RNA, 1910 nt, Artificial Sequence
  mRNA product Design f-2 comprising derived and/or modified sequence from HRSV(A2)__F-del_DSCav1_mut3 (opt1)
gggagagcggcucggccauuuugucccagucaguccggaggcugcggcugcagaaguaccgccugcggaguaacugcaaagaagcuuaccauggagcugcucauccugaaggccaacgccaucaccaccauccugacggcggugaccuucugcuucgccagcggccagaacaucaccgaggaguucuaccaguccacgugcagcgccgucuccaagggguaccucggcgcccugcggaccggcugguacaccuccgugaucaccaucgagcugagcaacaucaaggagaucaagugcaacgggaccgacgccaaggugaagcucaucaagcaggagcuggacaaguacaagaacgcggucacggaccugcagcuccugaugcaguccaccccggcaaccggcuccggcuccgccaucugcagcggcgucgccgugugcaaggugcugcaccucgagggggaggucaacaagaucaagagcgcccugcuguccaccaacaaggccguggugagccucuccaacggcgucagcgugcugaccuucaaggugcuggaccucaagaacuacaucgacaagcagcugcugcccauccugaacaagcagagcugcuccauccccaacaucgagacggugaucgaguuccagcagaagaacaaccggcuccuggagaucacccgcgaguucagcgugaacgccggggucaccacccccguguccacguacaugcugaccaacagcgagcuccugucccugaucaacgacaugccgaucaccaacgaccagaagaagcucaugagcaacaacgugcagaucguccggcagcaguccuacagcaucaugugcaucaucaaggaggaggugcuggcguacgugguccagcugccccucuacggcgugaucgacacccccugcuggaagcugcacacgagcccccugugcaccaccaacaccaaggagggguccaacaucugccucacgcgcaccgaccggggcugguacugcgacaacgccggcagcgucuccuucuucccgcaggccgagaccugcaaggugcagagcaaccgcguguucugcgacaccaugaacucccugacgcugcccagcgagguaaaccucugcaacgucgacaucuucaaccccaaguacgacugcaagaucaugaccuccaagaccgacgugagcuccagcgugaucaccucccugggggccaucgucagcugcuacggcaagacgaagugcaccgccagcaacaagaaccgggggaucaucaagaccuucuccaacggcugcgacuacgugagcaacaagggcguggacaccguguccgucgggaacacccuguacugcgugaacaagcaggagggccagagccucuacgugaagggggagcccaucaucaacuucuacgacccgcuggucuuccccuccgacgaguucgacgcgagcaucucccaggugaacgagaagaucaaccagagccuggccuucauccgcaaguccgacgagcugcuccacaacgugaacgccggcaagagcacgaccaacaucaugaucaccaccaucaucaucgucaucaucgugauccugcugucccucaucgccguggggcugcugcucuacugcaaggcccggugaggacuaguggaagcauuuuccuggcugauuaaaagaaauuacucagcuauggucaucuguuccuguuagaaggcuaugcagcauauuauauacuaugcgcauguuaugaaaugcauaauaaaaaauuuuaaaaaaucuaaaagaucuaaaaaaaaaaaaaaaaaaaaaaaaaaaaaaaaaaaaaaaaaaaaaaaaaaaaaaaaaaaaaaaaugcaucccccccccccccccccccccccccccccccaaaggcucuuuucagagccaccagaauu

SEQ ID NO: 3707 - RNA, 1910 nt, Artificial Sequence
  mRNA product Design f-2 comprising derived and/or modified sequence from HRSV(A2)__F-del_DSCav1_mut3 (opt1)
gggagagcggcucggccauuuugucccagucaguccggaggcugcggcugcagaaguaccgccugcggaguaacugcaaagaagcuuaccauggagcugcucauccugaaggccaacgccaucaccaccauccugacggcggugaccuucugcuucgccagcggccagaacaucaccgaggaguucuaccaguccacgugcagcgccgucuccaagggguaccucggcgcccugcgcaccgggugguacaccagcgugaucaccaucgagcuguccaacaucaaggagaucaagugcaacggcaccgacgccaaggugaagcucaucaagcaggagcuggacaaguacaagaacgcggucacggaccugcagcuccugaugcagagcacccccgccaccggguccggcagcgccaucugcuccggcguggccgugugcaagguccugcaccucgagggggaggugaacaagaucaagagcgcgcugcuguccaccaacaaggccguggucagccucuccaacggcgugagcgugcugacguucaagguccuggaccucaagaacuacaucgacaagcagcugcugccgauccucaacaagcaguccugcagcauccccaacaucgagaccgugaucgaguuccagcagaagaacaaccggcugcuggagaucacccgcgaguucuccgugaacgccggggucaccacgcccgugagcaccuacaugcucaccaacuccgagcugcugagccucaucaacgacaugcccaucaccaacgaccagaagaagcugaugagcaacaacgugcagaucguccggcagcaguccuacagcaucaugugcaucaucaaggaggaggugcuggccuacgugguccagcucccgcuguacggcgugaucgacacgcccugcuggaagcugcacaccagcccccucugcaccaccaacacgaaggagggguccaacaucugccugacccgcaccgaccggggcugguacugcgacaacgccggcuccgugagcuucuucccccaggcggagaccugcaagguccaguccaaccgcguguucugcgacacgaugaacagccugacccucccguccgaggucaaccugugcaacguggacaucuucaaccccaaguacgacugcaagaucaugaccagcaagaccgacguguccagcuccgucaucacgagccugggggccaucguguccugcuacggcaagaccaagugcaccgccagcaacaagaaccgggggaucaucaagaccuucuccaacggcugcgacuacgugagcaacaagggcgucgacacgguguccguggggaacacccucuacugcgucaacaagcaggagggccagagccuguacgugaagggggagcccaucaucaacuucuacgacccccugguguucccgagcgacgaguucgacgccuccaucagccaggucaacgagaagaucaaccagucccucgccuucauccgcaagagcgacgagcugcugcacaacgugaacgcgggcaaguccaccaccaacaucaugaucaccacgaucaucaucgugaucaucgucauccuccugagccugaucgccguggggcuccugcuguacugcaaggcccggugaggacuaguggaagcauuuuccuggcugauuaaaagaaauuacucagcuauggucaucuguuccuguuagaaggcuaugcagcauauuauauacuaugcgcauguuaugaaaugcauaauaaaaaauuuuaaaaaaucuaaaagaucuaaaaaaaaaaaaaaaaaaaaaaaaaaaaaaaaaaaaaaaaaaaaaaaaaaaaaaaaaaaaaaaaugcaucccccccccccccccccccccccccccccccaaaggcucuuuucagagccaccagaauu

SEQ ID NO: 3708 - RNA, 1910 nt, Artificial Sequence
  mRNA product Design f-2 comprising derived and/or modified sequence from HRSV(A2)__F-del_DSCav1_mut3 (opt2)
gggagagcggcucggccauuuugucccagucaguccggaggcugcggcugcagaaguaccgccugcggaguaacugcaaagaagcuuaccauggagcuccucauccucaaggccaacgccaucaccaccauccucaccgccgucaccuucugcuucgccuccggccagaacaucaccgaggaguucuaccaguccaccugcuccgccgucuccaagggcuaccucggcgcccuccgcaccggcugguacaccuccgucaucaccaucgagcucuccaacaucaaggagaucaagugcaacggcaccgacgccaaggucaagcucaucaagcaggagcucgacaaguacaagaacgccgucaccgaccuccagcuccucaugcaguccacccccgccaccggcuccggcuccgccaucugcuccggcgucgccgucugcaagguccuccaccucgagggcgaggucaacaagaucaaguccgcccuccucuccaccaacaaggccgucgucucccucuccaacggcgucuccguccucaccuucaagguccucgaccucaagaacuacaucgacaagcagcuccuccccauccucaacaagcaguccugcuccauccccaacaucgagaccgucaucgaguuccagcagaagaacaaccgccuccucgagaucacccgcgaguucuccgucaacgccggcgucaccacccccgucuccaccuacaugcucaccaacuccgagcuccucucccucaucaacgacaugcccaucaccaacgaccagaagaagcucauguccaacaacguccagaucguccgccagcaguccuacuccaucaugugcaucaucaaggaggagguccucgccuacgucguccagcucccccucuacggcgucaucgacacccccugcuggaagcuccacaccuccccccucugcaccaccaacaccaaggagggcuccaacaucugccucacccgcaccgaccgcggcugguacugcgacaacgccggcuccgucuccuucuucccccaggccgagaccugcaagguccaguccaaccgcgucuucugcgacaccaugaacucccucacccuccccuccgaggucaaccucugcaacgucgacaucuucaaccccaaguacgacugcaagaucaugaccuccaagaccgacgucuccuccuccgucaucaccucccucggcgccaucgucuccugcuacggcaagaccaagugcaccgccuccaacaagaaccgcggcaucaucaagaccuucuccaacggcugcgacuacgucuccaacaagggcgucgacaccgucuccgucggcaacacccucuacugcgucaacaagcaggagggccagucccucuacgucaagggcgagcccaucaucaacuucuacgacccccucgucuuccccuccgacgaguucgacgccuccaucucccaggucaacgagaagaucaaccagucccucgccuucauccgcaaguccgacgagcuccuccacaacgucaacgccggcaaguccaccaccaacaucaugaucaccaccaucaucaucgucaucaucgucauccuccucucccucaucgccgucggccuccuccucuacugcaaggcccgcugaggacuaguggaagcauuuuccuggcugauuaaaagaaauuacucagcuauggucaucuguuccuguuagaaggcuaugcagcauauuauauacuaugcgcauguuaugaaaugcauaauaaaaaauuuuaaaaaaucuaaaagaucuaaaaaaaaaaaaaaaaaaaaaaaaaaaaaaaaaaaaaaaaaaaaaaaaaaaaaaaaaaaaaaaaugcaucccccccccccccccccccccccccccccccaaaggcucuuuucagagccaccagaauu

SEQ ID NO: 3709 - RNA, 1910 nt, Artificial Sequence
  mRNA product Design f-2 comprising derived and/or modified sequence from HRSV(A2)__F-del_DSCav1_mut3 (opt3)
gggagagcggcucggccauuuugucccagucaguccggaggcugcggcugcagaaguaccgccugcggaguaacugcaaagaagcuuaccauggagcugcucauccuuaaggccaacgcuauuaccacaauacugacugcagugacguucugcuuugccagcggccagaauaucaccgaagaguucuaccaauccacauguucugcggucucaaaaggguauuugggagcuuuaagaacugguugguacaccaguguuauuacaaucgaacugagcaacauuaaggagaucaaaugcaauggcaccgacgccaaggugaaacuaauaaagcaggaacucgauaaguauaaaaacgcaguaacugaccugcagcuucugaugcaguccacacccgccaccgggucuggaucggcuaucuguucaggcguggcagucugcaagguguugcaccucgagggugagguuaauaaaauuaagagcgcccugcugaguacgaacaaagcuguggucucccucucuaauggggugagcguauuaacuuuuaagguucuggaucuuaagaacuacaucgacaaacaauugcugccuauucuaaauaagcaguccuguucaaucccaaacauagaaaccgugauugaguuccagcagaaaaauaacaggcuccuggaaaucacacgggaguuuagugucaaugccggagugacuaccccggugagcacauauaugcuuaccaacucugagcuguugucccucauuaaugauaugcccaucacgaacgaccaaaagaaacugaugucaaacaauguccagaucguucgccagcagagcuacaguauuaugugcauaaucaaggaagagguguuagcguauguagugcaacugccucucuacggcgucauugauacuccauguuggaaacuucauacaucuccccugugcaccacuaacacaaaggaaggcuccaauaucuguuugacccgaacggaccgugggugguacugcgauaacgcaggaagcgugucguucuuuccucaggccgagaccuguaagguucagucuaauagaguguucugcgacacaaugaacucccuaacucugccaucagaagucaaucucugcaacguggauauauuuaaucccaaauaugacuguaagauuaugaccaguaaaacagauguaagcuccucuguuaucacuagccugggugcuaucgugucaugcuacggcaagaccaaauguacagccaguaacaagaauagggggauuaucaagaccuucuccaacggaugcgacuaugucagcaauaaaggcguggacacugucucuguggguaacacgcuuuacuguguuaauaagcaagaggggcagucacuguaugugaaaggagagccuauuauaaacuuuuacgauccauugguauucccgagugacgaauuugaugcaagcaucucccaggucaacgagaagauuaaucagucucucgcuuucauccggaaaucggacgaacuguuacacaacgugaaugccggcaagagcacaaccaacaucaugauuacuaccauaaucauuguuaucauugugauccugcuaucccucauagcggucggccugcuuuuguauugcaaggcccgcugaggacuaguggaagcauuuuccuggcugauuaaaagaaauuacucagcuauggucaucuguuccuguuagaaggcuaugcagcauauuauauacuaugcgcauguuaugaaaugcauaauaaaaaauuuuaaaaaaucuaaaagaucuaaaaaaaaaaaaaaaaaaaaaaaaaaaaaaaaaaaaaaaaaaaaaaaaaaaaaaaaaaaaaaaaugcaucccccccccccccccccccccccccccccccaaaggcucuuuucagagccaccagaauu

SEQ ID NO: 3710 - RNA, 1910 nt, Artificial Sequence
  mRNA product Design f-2 comprising derived and/or modified sequence from HRSV(A2)__F-del_DSCav1_mut3 (opt4)
gggagagcggcucggccauuuugucccagucaguccggaggcugcggcugcagaaguaccgccugcggaguaacugcaaagaagcuuaccauggagcugcugauccugaaggccaacgccaucaccaccauccugaccgccgugaccuucugcuucgccagcggccagaacaucaccgaggaguucuaccagagcaccugcagcgccgugagcaagggcuaccugggcgcccugagaaccggcugguacaccagcgugaucaccaucgagcugagcaacaucaaggagaucaagugcaacggcaccgacgccaaggugaagcugaucaagcaggagcuggacaaguacaagaacgccgugaccgaccugcagcugcugaugcagagcacccccgccaccggcagcggcagcgccaucugcagcggcguggccgugugcaaggugcugcaccuggagggcgaggugaacaagaucaagagcgcccugcugagcaccaacaaggccguggugagccugagcaacggcgugagcgugcugaccuucaaggugcuggaccugaagaacuacaucgacaagcagcugcugcccauccugaacaagcagagcugcagcauccccaacaucgagaccgugaucgaguuccagcagaagaacaacagacugcuggagaucaccagagaguucagcgugaacgccggcgugaccacccccgugagcaccuacaugcugaccaacagcgagcugcugagccugaucaacgacaugcccaucaccaacgaccagaagaagcugaugagcaacaacgugcagaucgugagacagcagagcuacagcaucaugugcaucaucaaggaggaggugcuggccuacguggugcagcugccccuguacggcgugaucgacacccccugcuggaagcugcacaccagcccccugugcaccaccaacaccaaggagggcagcaacaucugccugaccagaaccgacagaggcugguacugcgacaacgccggcagcgugagcuucuucccccaggccgagaccugcaaggugcagagcaacagaguguucugcgacaccaugaacagccugacccugcccagcgaggugaaccugugcaacguggacaucuucaaccccaaguacgacugcaagaucaugaccagcaagaccgacgugagcagcagcgugaucaccagccugggcgccaucgugagcugcuacggcaagaccaagugcaccgccagcaacaagaacagaggcaucaucaagaccuucagcaacggcugcgacuacgugagcaacaagggcguggacaccgugagcgugggcaacacccuguacugcgugaacaagcaggagggccagagccuguacgugaagggcgagcccaucaucaacuucuacgacccccugguguuccccagcgacgaguucgacgccagcaucagccaggugaacgagaagaucaaccagagccuggccuucaucagaaagagcgacgagcugcugcacaacgugaacgccggcaagagcaccaccaacaucaugaucaccaccaucaucaucgugaucaucgugauccugcugagccugaucgccgugggccugcugcuguacugcaaggccagaugaggacuaguggaagcauuuuccuggcugauuaaaagaaauuacucagcuauggucaucuguuccuguuagaaggcuaugcagcauauuauauacuaugcgcauguuaugaaaugcauaauaaaaaauuuuaaaaaaucuaaaagaucuaaaaaaaaaaaaaaaaaaaaaaaaaaaaaaaaaaaaaaaaaaaaaaaaaaaaaaaaaaaaaaaaugcaucccccccccccccccccccccccccccccccaaaggcucuuuucagagccaccagaauu

SEQ ID NO: 3711 - RNA, 1910 nt, Artificial Sequence
  mRNA product Design f-2 comprising derived and/or modified sequence from HRSV(A2)__F-del_DSCav1_mut3 (opt5)
gggagagcggcucggccauuuugucccagucaguccggaggcugcggcugcagaaguaccgccugcggaguaacugcaaagaagcuuaccauggagcugcucauccugaaggccaacgcuauuaccacaauccuuacggccgugaccuucugcuuugcgagcggccagaauauuacagaagaguucuaccaauccaccuguucugcugucagcaaaggguaucugggagcccucagaacaggcugguacaccuccguuaucacaauugaacugucuaacaucaaggagaucaaaugcaaugggaccgacgccaaggugaaacuuauuaagcaggaacuggauaaguauaaaaacgcugugacggaccuccagcugcugaugcagagcacccccgccacaggauccggcucugcuaucuguagcggggucgccgugugcaagguucuccaccuggagggagaggugaauaaaauuaaguccgcgcuucugagcaccaacaaagccgucgugucucucuccaauggcguuagcgugcugacauuuaagguccuugaucugaagaacuacaucgacaaacaacuccugccuauucugaauaagcagucuuguuccaucccgaacauugaaaccgugaucgaguuccagcagaaaaauaaccggcuccuggaaaucacgcgcgaguuuagcgugaaugcuggcgucacaacccccguuucuacauauaugcuuaccaacuccgagcugcucagccugauuaaugauaugccuaucaccaacgaccaaaagaaacuuauguccaacaaugugcagauugugagacagcagucuuacagcaucaugugcauuaucaaggaagagguccuggccuaugugguucaacucccccuguacggggugaucgauacaccuuguuggaaacugcauacgagcccccucugcaccacaaacaccaaggaaggauccaauauuugucugacacggaccgaccgcggcugguacugcgauaacgcugggucugucuccuucuuuccucaggccgagacguguaaggugcagagcaauagaguuuucugcgacacaaugaacucucuuacccugccgagcgaagugaaucucugcaacgucgauaucuuuaaucccaaauaugacuguaagauuaugaccuccaaaacagaugugucuagcuccgucaucaccagccugggagcgauugugucuugcuacggcaagacaaaauguacggccuccaacaagaaucgggggaucaucaagaccuucagcaacggaugcgacuauguuucuaauaaaggcguggacacagucuccgugggcaacacccuuuacuguguuaauaagcaagaggggcagagccuguaugugaaaggagagccuauuaucaacuuuuacgauccccucgucuucccuuccgacgaauuugaugcuucuauuagccaggugaacgagaagaucaaucagucccuggccuucauucgcaaaucugacgaacugcuccacaacgugaaugcuggcaagagcacaaccaacaucaugauuacgaccaucaucauuguuaucauugucauccugcuuucccugauugccguggggcuccugcuguauugcaaggccagaugaggacuaguggaagcauuuuccuggcugauuaaaagaaauuacucagcuauggucaucuguuccuguuagaaggcuaugcagcauauuauauacuaugcgcauguuaugaaaugcauaauaaaaaauuuuaaaaaaucuaaaagaucuaaaaaaaaaaaaaaaaaaaaaaaaaaaaaaaaaaaaaaaaaaaaaaaaaaaaaaaaaaaaaaaaugcaucccccccccccccccccccccccccccccccaaaggcucuuuucagagccaccagaauu

SEQ ID NO: 3712 - RNA, 1910 nt, Artificial Sequence
  mRNA product Design f-2 comprising derived and/or modified sequence from HRSV(A2)__F-del_DSCav1_mut3 (opt6)
gggagagcggcucggccauuuugucccagucaguccggaggcugcggcugcagaaguaccgccugcggaguaacugcaaagaagcuuaccauggaauuacuaauccugaaagcaaacgcaauuacuacaauacuaacagcaguaaccuuuugcuuugccucaggacaaaacauaacugaagaauuuuaccaaucaacuugcucagcagucucaaaaggcuaucuaggagcacuacgaacagguugguauacuucagucauaacaauagaauuaucaaacauaaaagaaauuaaauguaacggaacugacgcaaaaguaaaacucaucaaacaagaacucgauaaauacaaaaacgcuguaaccgacuuacaacuacuaaugcaaucaacuccagcaacaggcuccggauccgcaauaugcagugguguagcaguaugcaaaguccuacaccuagaaggagaaguaaauaagauaaaaucugcucuacuaucaacaaauaaagcaguugucucccuaucaaauggagucucaguacucaccuucaaaguauuagaccucaaaaacuacauagacaaacaacuauuaccaauacucaacaaacaauccugcuccaucccuaacauagaaaccguaaucgaauuucaacaaaaaaauaacagacucuuagaaauaacuagagaauuuucaguuaaugcaggcgugacaacaccaguaucaacauauaugcuaacaaacuccgaacuccuaucccuaauaaacgacaugccaaucacaaacgaccaaaaaaaacuaauguccaacaacguacaaaucguaagacaacaaucauacucuauaaugugcauaauaaaagaagaaguacuggccuacguaguacaauuaccacucuacggaguaauagacaccccaugcuggaaacuccauacaucaccccuaugcacaacaaacacaaaagaaggauccaacauaugucucacuagaacagacagaggcugguacugcgacaacgcuggauccgucucauucuucccccaagcagaaacauguaaaguacaaucuaauagaguauuuugugacacaaugaacagccucacacuaccauccgaagucaaccuauguaacguagauauauuuaaucccaaauacgacugcaaaauaaugacauccaaaacagauguaucaucauccguuaucaccucacuaggagccauaguuucaugcuacggaaaaacaaaaugcacugcaucuaacaaaaauagagguauaauaaaaacauuuuccaacggcugcgacuacgucucaaacaaaggcguagacaccguaucaguaggaaauacauuauauugcguaaauaaacaagaaggccaaucccuauacguaaaaggagaacccaucauaaacuucuaugacccacuuguuuuccccucagacgaauuugacgccucaauaucacaaguaaaugaaaaaauaaaccaaucucuugccuucauuagaaaaucagacgaauuacuacacaacgucaacgcaggaaaaucaacaacaaacaucaugauaacaacgauaauaauagucauaauaguaauacuacuaucauuaaucgcagucggacuccuauuauauugcaaagcuagauaaggacuaguggaagcauuuuccuggcugauuaaaagaaauuacucagcuauggucaucuguuccuguuagaaggcuaugcagcauauuauauacuaugcgcauguuaugaaaugcauaauaaaaaauuuuaaaaaaucuaaaagaucuaaaaaaaaaaaaaaaaaaaaaaaaaaaaaaaaaaaaaaaaaaaaaaaaaaaaaaaaaaaaaaaaugcaucccccccccccccccccccccccccccccccaaaggcucuuuucagagccaccagaauu

SEQ ID NO: 3713 - RNA, 1910 nt, Artificial Sequence
  mRNA product Design f-2 comprising derived and/or modified sequence from HRSV(A2)__F-del_DSCav1_mut3 (opt11)
gggagagcggcucggccauuuugucccagucaguccggaggcugcggcugcagaaguaccgccugcggaguaacugcaaagaagcuuaccauggaacuacucauacuaaaagccaacgccauaaccaccauccucaccgcaguaacuuucugcuucgcuuccggccaaaacaucaccgaagaauuuuaccaaaguaccugcagcgcagucucaaaaggauaccuaggcgcccuacgcacaggcugguacaccuccgucauuaccaucgaacucuccaacaucaaagaaauuaaaugcaacgguacagacgcaaaagucaaacucaucaaacaagaacucgacaaauacaaaaacgcagucaccgaccuccaacuccucaugcaauccacccccgccacaggcucuggcuccgccaucugcucaggcguagcagucugcaaaguccugcaccucgaaggcgaagucaacaaaaucaagucagcccuccucuccaccaacaaggccgucguaucccucucaaacggaguuagcguccucaccuucaaaguccuagaccucaaaaacuacaucgauaaacaacuacuccccauccuaaacaaacaaucaugcuccaucccaaacaucgaaaccguaaucgaguuccaacaaaagaacaaccgccuccucgaaaucacacgugaguucuccguuaacgccggcgucaccacccccgucucuacauacaugcucaccaacuccgaacuccuuucccucaucaacgacaugccaaucaccaacgaccaaaagaaacucaugucaaacaacguacaaaucguccgacaacaaagcuacuccaucaugugcaucaucaaagaagaaguccuugcauacgucguucaacuaccccucuacggcguaaucgacacucccugcuggaaacuccacaccuccccgcucugcacaaccaacaccaaagaaggcagcaacaucugccucacccgaaccgaccgcggcugguacugcgauaacgccggauccgucuccuucuucccacaagcagaaacuugcaaaguccaauccaaccgcgucuucugcgacaccaugaacucccucacacuccccuccgaagucaaccugugcaacgucgacaucuucaacccaaaauacgacugcaaaaucaugaccucaaaaaccgacgucucaucuucugucaucaccucucucggcgcuaucgucuccugcuauggcaaaaccaaaugcaccgccuccaacaagaaccgcggcauuaucaagaccuucuccaacggcugcgacuacgucuccaauaagggcgucgacaccgucucugucggcaacacccuuuacugcguaaacaaacaagaaggucaaucucucuacgucaaaggagaacccaucaucaacuucuacgacccccuggucuuccccuccgacgaguucgaugcaucaaucucccaagucaacgaaaagaucaaccaaucucucgcuuucauccgcaaauccgacgaacuccuacacaacguaaacgccggcaaauccaccacaaacaucaugaucaccaccauuaucauagucaucaucgucauccuccucuccuuaaucgccguuggccuccuucucuacugcaaagcccgauaaggacuaguggaagcauuuuccuggcugauuaaaagaaauuacucagcuauggucaucuguuccuguuagaaggcuaugcagcauauuauauacuaugcgcauguuaugaaaugcauaauaaaaaauuuuaaaaaaucuaaaagaucuaaaaaaaaaaaaaaaaaaaaaaaaaaaaaaaaaaaaaaaaaaaaaaaaaaaaaaaaaaaaaaaaugcaucccccccccccccccccccccccccccccccaaaggcucuuuucagagccaccagaauu

SEQ ID NO: 3714 - RNA, 1901 nt, Artificial Sequence
  mRNA product Design f-3 comprising derived and/or modified sequence from HRSV(A2)__F-del_DSCav1_mut3 (opt1)
gggagagucccgcagucggcguccagcggcucugcuuguucgugugugugucguugcaggccuuauucaagcuuaccauggagcugcucauccugaaggccaacgccaucaccaccauccugacggcggugaccuucugcuucgccagcggccagaacaucaccgaggaguucuaccaguccacgugcagcgccgucuccaagggguaccucggcgcccugcggaccggcugguacaccuccgugaucaccaucgagcugagcaacaucaaggagaucaagugcaacgggaccgacgccaaggugaagcucaucaagcaggagcuggacaaguacaagaacgcggucacggaccugcagcuccugaugcaguccaccccggcaaccggcuccggcuccgccaucugcagcggcgucgccgugugcaaggugcugcaccucgagggggaggucaacaagaucaagagcgcccugcuguccaccaacaaggccguggugagccucuccaacggcgucagcgugcugaccuucaaggugcuggaccucaagaacuacaucgacaagcagcugcugcccauccugaacaagcagagcugcuccauccccaacaucgagacggugaucgaguuccagcagaagaacaaccggcuccuggagaucacccgcgaguucagcgugaacgccggggucaccacccccguguccacguacaugcugaccaacagcgagcuccugucccugaucaacgacaugccgaucaccaacgaccagaagaagcucaugagcaacaacgugcagaucguccggcagcaguccuacagcaucaugugcaucaucaaggaggaggugcuggcguacgugguccagcugccccucuacggcgugaucgacacccccugcuggaagcugcacacgagcccccugugcaccaccaacaccaaggagggguccaacaucugccucacgcgcaccgaccggggcugguacugcgacaacgccggcagcgucuccuucuucccgcaggccgagaccugcaaggugcagagcaaccgcguguucugcgacaccaugaacucccugacgcugcccagcgagguaaaccucugcaacgucgacaucuucaaccccaaguacgacugcaagaucaugaccuccaagaccgacgugagcuccagcgugaucaccucccugggggccaucgucagcugcuacggcaagacgaagugcaccgccagcaacaagaaccgggggaucaucaagaccuucuccaacggcugcgacuacgugagcaacaagggcguggacaccguguccgucgggaacacccuguacugcgugaacaagcaggagggccagagccucuacgugaagggggagcccaucaucaacuucuacgacccgcuggucuuccccuccgacgaguucgacgcgagcaucucccaggugaacgagaagaucaaccagagccuggccuucauccgcaaguccgacgagcugcuccacaacgugaacgccggcaagagcacgaccaacaucaugaucaccaccaucaucaucgucaucaucgugauccugcugucccucaucgccguggggcugcugcucuacugcaaggcccggugaggacuaguacuggcugcaucucccuuuccucuguccuccauccuucucccaggauggugaagggggaccugguacccagugauccccaccccaggauccuaaaucaugacuuaccugcuaauaaaaacucauuggaaaagugagaagaucuaaaaaaaaaaaaaaaaaaaaaaaaaaaaaaaaaaaaaaaaaaaaaaaaaaaaaaaaaaaaaaaaugcaucccccccccccccccccccccccccccccccaaaggcucuuuucagagccaccagaauu

SEQ ID NO: 3715 - RNA, 1901 nt, Artificial Sequence
  mRNA product Design f-3 comprising derived and/or modified sequence from HRSV(A2)__F-del_DSCav1_mut3 (opt1)
gggagagucccgcagucggcguccagcggcucugcuuguucgugugugugucguugcaggccuuauucaagcuuaccauggagcugcucauccugaaggccaacgccaucaccaccauccugacggcggugaccuucugcuucgccagcggccagaacaucaccgaggaguucuaccaguccacgugcagcgccgucuccaagggguaccucggcgcccugcgcaccgggugguacaccagcgugaucaccaucgagcuguccaacaucaaggagaucaagugcaacggcaccgacgccaaggugaagcucaucaagcaggagcuggacaaguacaagaacgcggucacggaccugcagcuccugaugcagagcacccccgccaccggguccggcagcgccaucugcuccggcguggccgugugcaagguccugcaccucgagggggaggugaacaagaucaagagcgcgcugcuguccaccaacaaggccguggucagccucuccaacggcgugagcgugcugacguucaagguccuggaccucaagaacuacaucgacaagcagcugcugccgauccucaacaagcaguccugcagcauccccaacaucgagaccgugaucgaguuccagcagaagaacaaccggcugcuggagaucacccgcgaguucuccgugaacgccggggucaccacgcccgugagcaccuacaugcucaccaacuccgagcugcugagccucaucaacgacaugcccaucaccaacgaccagaagaagcugaugagcaacaacgugcagaucguccggcagcaguccuacagcaucaugugcaucaucaaggaggaggugcuggccuacgugguccagcucccgcuguacggcgugaucgacacgcccugcuggaagcugcacaccagcccccucugcaccaccaacacgaaggagggguccaacaucugccugacccgcaccgaccggggcugguacugcgacaacgccggcuccgugagcuucuucccccaggcggagaccugcaagguccaguccaaccgcguguucugcgacacgaugaacagccugacccucccguccgaggucaaccugugcaacguggacaucuucaaccccaaguacgacugcaagaucaugaccagcaagaccgacguguccagcuccgucaucacgagccugggggccaucguguccugcuacggcaagaccaagugcaccgccagcaacaagaaccgggggaucaucaagaccuucuccaacggcugcgacuacgugagcaacaagggcgucgacacgguguccguggggaacacccucuacugcgucaacaagcaggagggccagagccuguacgugaagggggagcccaucaucaacuucuacgacccccugguguucccgagcgacgaguucgacgccuccaucagccaggucaacgagaagaucaaccagucccucgccuucauccgcaagagcgacgagcugcugcacaacgugaacgcgggcaaguccaccaccaacaucaugaucaccacgaucaucaucgugaucaucgucauccuccugagccugaucgccguggggcuccugcuguacugcaaggcccggugaggacuaguacuggcugcaucucccuuuccucuguccuccauccuucucccaggauggugaagggggaccugguacccagugauccccaccccaggauccuaaaucaugacuuaccugcuaauaaaaacucauuggaaaagugagaagaucuaaaaaaaaaaaaaaaaaaaaaaaaaaaaaaaaaaaaaaaaaaaaaaaaaaaaaaaaaaaaaaaaugcaucccccccccccccccccccccccccccccccaaaggcucuuuucagagccaccagaauu

SEQ ID NO: 3716 - RNA, 1901 nt, Artificial Sequence
  mRNA product Design f-3 comprising derived and/or modified sequence from HRSV(A2)__F-del_DSCav1_mut3 (opt2)
gggagagucccgcagucggcguccagcggcucugcuuguucgugugugugucguugcaggccuuauucaagcuuaccauggagcuccucauccucaaggccaacgccaucaccaccauccucaccgccgucaccuucugcuucgccuccggccagaacaucaccgaggaguucuaccaguccaccugcuccgccgucuccaagggcuaccucggcgcccuccgcaccggcugguacaccuccgucaucaccaucgagcucuccaacaucaaggagaucaagugcaacggcaccgacgccaaggucaagcucaucaagcaggagcucgacaaguacaagaacgccgucaccgaccuccagcuccucaugcaguccacccccgccaccggcuccggcuccgccaucugcuccggcgucgccgucugcaagguccuccaccucgagggcgaggucaacaagaucaaguccgcccuccucuccaccaacaaggccgucgucucccucuccaacggcgucuccguccucaccuucaagguccucgaccucaagaacuacaucgacaagcagcuccuccccauccucaacaagcaguccugcuccauccccaacaucgagaccgucaucgaguuccagcagaagaacaaccgccuccucgagaucacccgcgaguucuccgucaacgccggcgucaccacccccgucuccaccuacaugcucaccaacuccgagcuccucucccucaucaacgacaugcccaucaccaacgaccagaagaagcucauguccaacaacguccagaucguccgccagcaguccuacuccaucaugugcaucaucaaggaggagguccucgccuacgucguccagcucccccucuacggcgucaucgacacccccugcuggaagcuccacaccuccccccucugcaccaccaacaccaaggagggcuccaacaucugccucacccgcaccgaccgcggcugguacugcgacaacgccggcuccgucuccuucuucccccaggccgagaccugcaagguccaguccaaccgcgucuucugcgacaccaugaacucccucacccuccccuccgaggucaaccucugcaacgucgacaucuucaaccccaaguacgacugcaagaucaugaccuccaagaccgacgucuccuccuccgucaucaccucccucggcgccaucgucuccugcuacggcaagaccaagugcaccgccuccaacaagaaccgcggcaucaucaagaccuucuccaacggcugcgacuacgucuccaacaagggcgucgacaccgucuccgucggcaacacccucuacugcgucaacaagcaggagggccagucccucuacgucaagggcgagcccaucaucaacuucuacgacccccucgucuuccccuccgacgaguucgacgccuccaucucccaggucaacgagaagaucaaccagucccucgccuucauccgcaaguccgacgagcuccuccacaacgucaacgccggcaaguccaccaccaacaucaugaucaccaccaucaucaucgucaucaucgucauccuccucucccucaucgccgucggccuccuccucuacugcaaggcccgcugaggacuaguacuggcugcaucucccuuuccucuguccuccauccuucucccaggauggugaagggggaccugguacccagugauccccaccccaggauccuaaaucaugacuuaccugcuaauaaaaacucauuggaaaagugagaagaucuaaaaaaaaaaaaaaaaaaaaaaaaaaaaaaaaaaaaaaaaaaaaaaaaaaaaaaaaaaaaaaaaugcaucccccccccccccccccccccccccccccccaaaggcucuuuucagagccaccagaauu

SEQ ID NO: 3717 - RNA, 1901 nt, Artificial Sequence
  mRNA product Design f-3 comprising derived and/or modified sequence from HRSV(A2)__F-del_DSCav1_mut3 (opt3)
gggagagucccgcagucggcguccagcggcucugcuuguucgugugugugucguugcaggccuuauucaagcuuaccauggagcugcucauccuuaaggccaacgcuauuaccacaauacugacugcagugacguucugcuuugccagcggccagaauaucaccgaagaguucuaccaauccacauguucugcggucucaaaaggguauuugggagcuuuaagaacugguugguacaccaguguuauuacaaucgaacugagcaacauuaaggagaucaaaugcaauggcaccgacgccaaggugaaacuaauaaagcaggaacucgauaaguauaaaaacgcaguaacugaccugcagcuucugaugcaguccacacccgccaccgggucuggaucggcuaucuguucaggcguggcagucugcaagguguugcaccucgagggugagguuaauaaaauuaagagcgcccugcugaguacgaacaaagcuguggucucccucucuaauggggugagcguauuaacuuuuaagguucuggaucuuaagaacuacaucgacaaacaauugcugccuauucuaaauaagcaguccuguucaaucccaaacauagaaaccgugauugaguuccagcagaaaaauaacaggcuccuggaaaucacacgggaguuuagugucaaugccggagugacuaccccggugagcacauauaugcuuaccaacucugagcuguugucccucauuaaugauaugcccaucacgaacgaccaaaagaaacugaugucaaacaauguccagaucguucgccagcagagcuacaguauuaugugcauaaucaaggaagagguguuagcguauguagugcaacugccucucuacggcgucauugauacuccauguuggaaacuucauacaucuccccugugcaccacuaacacaaaggaaggcuccaauaucuguuugacccgaacggaccgugggugguacugcgauaacgcaggaagcgugucguucuuuccucaggccgagaccuguaagguucagucuaauagaguguucugcgacacaaugaacucccuaacucugccaucagaagucaaucucugcaacguggauauauuuaaucccaaauaugacuguaagauuaugaccaguaaaacagauguaagcuccucuguuaucacuagccugggugcuaucgugucaugcuacggcaagaccaaauguacagccaguaacaagaauagggggauuaucaagaccuucuccaacggaugcgacuaugucagcaauaaaggcguggacacugucucuguggguaacacgcuuuacuguguuaauaagcaagaggggcagucacuguaugugaaaggagagccuauuauaaacuuuuacgauccauugguauucccgagugacgaauuugaugcaagcaucucccaggucaacgagaagauuaaucagucucucgcuuucauccggaaaucggacgaacuguuacacaacgugaaugccggcaagagcacaaccaacaucaugauuacuaccauaaucauuguuaucauugugauccugcuaucccucauagcggucggccugcuuuuguauugcaaggcccgcugaggacuaguacuggcugcaucucccuuuccucuguccuccauccuucucccaggauggugaagggggaccugguacccagugauccccaccccaggauccuaaaucaugacuuaccugcuaauaaaaacucauuggaaaagugagaagaucuaaaaaaaaaaaaaaaaaaaaaaaaaaaaaaaaaaaaaaaaaaaaaaaaaaaaaaaaaaaaaaaaugcaucccccccccccccccccccccccccccccccaaaggcucuuuucagagccaccagaauu

SEQ ID NO: 3718 - RNA, 1901 nt, Artificial Sequence
  mRNA product Design f-3 comprising derived and/or modified sequence from HRSV(A2)__F-del_DSCav1_mut3 (opt4)
gggagagucccgcagucggcguccagcggcucugcuuguucgugugugugucguugcaggccuuauucaagcuuaccauggagcugcugauccugaaggccaacgccaucaccaccauccugaccgccgugaccuucugcuucgccagcggccagaacaucaccgaggaguucuaccagagcaccugcagcgccgugagcaagggcuaccugggcgcccugagaaccggcugguacaccagcgugaucaccaucgagcugagcaacaucaaggagaucaagugcaacggcaccgacgccaaggugaagcugaucaagcaggagcuggacaaguacaagaacgccgugaccgaccugcagcugcugaugcagagcacccccgccaccggcagcggcagcgccaucugcagcggcguggccgugugcaaggugcugcaccuggagggcgaggugaacaagaucaagagcgcccugcugagcaccaacaaggccguggugagccugagcaacggcgugagcgugcugaccuucaaggugcuggaccugaagaacuacaucgacaagcagcugcugcccauccugaacaagcagagcugcagcauccccaacaucgagaccgugaucgaguuccagcagaagaacaacagacugcuggagaucaccagagaguucagcgugaacgccggcgugaccacccccgugagcaccuacaugcugaccaacagcgagcugcugagccugaucaacgacaugcccaucaccaacgaccagaagaagcugaugagcaacaacgugcagaucgugagacagcagagcuacagcaucaugugcaucaucaaggaggaggugcuggccuacguggugcagcugccccuguacggcgugaucgacacccccugcuggaagcugcacaccagcccccugugcaccaccaacaccaaggagggcagcaacaucugccugaccagaaccgacagaggcugguacugcgacaacgccggcagcgugagcuucuucccccaggccgagaccugcaaggugcagagcaacagaguguucugcgacaccaugaacagccugacccugcccagcgaggugaaccugugcaacguggacaucuucaaccccaaguacgacugcaagaucaugaccagcaagaccgacgugagcagcagcgugaucaccagccugggcgccaucgugagcugcuacggcaagaccaagugcaccgccagcaacaagaacagaggcaucaucaagaccuucagcaacggcugcgacuacgugagcaacaagggcguggacaccgugagcgugggcaacacccuguacugcgugaacaagcaggagggccagagccuguacgugaagggcgagcccaucaucaacuucuacgacccccugguguuccccagcgacgaguucgacgccagcaucagccaggugaacgagaagaucaaccagagccuggccuucaucagaaagagcgacgagcugcugcacaacgugaacgccggcaagagcaccaccaacaucaugaucaccaccaucaucaucgugaucaucgugauccugcugagccugaucgccgugggccugcugcuguacugcaaggccagaugaggacuaguacuggcugcaucucccuuuccucuguccuccauccuucucccaggauggugaagggggaccugguacccagugauccccaccccaggauccuaaaucaugacuuaccugcuaauaaaaacucauuggaaaagugagaagaucuaaaaaaaaaaaaaaaaaaaaaaaaaaaaaaaaaaaaaaaaaaaaaaaaaaaaaaaaaaaaaaaaugcaucccccccccccccccccccccccccccccccaaaggcucuuuucagagccaccagaauu

SEQ ID NO: 3719 - RNA, 1901 nt, Artificial Sequence
  mRNA product Design f-3 comprising derived and/or modified sequence from HRSV(A2)__F-del_DSCav1_mut3 (opt5)
gggagagucccgcagucggcguccagcggcucugcuuguucgugugugugucguugcaggccuuauucaagcuuaccauggagcugcucauccugaaggccaacgcuauuaccacaauccuuacggccgugaccuucugcuuugcgagcggccagaauauuacagaagaguucuaccaauccaccuguucugcugucagcaaaggguaucugggagcccucagaacaggcugguacaccuccguuaucacaauugaacugucuaacaucaaggagaucaaaugcaaugggaccgacgccaaggugaaacuuauuaagcaggaacuggauaaguauaaaaacgcugugacggaccuccagcugcugaugcagagcacccccgccacaggauccggcucugcuaucuguagcggggucgccgugugcaagguucuccaccuggagggagaggugaauaaaauuaaguccgcgcuucugagcaccaacaaagccgucgugucucucuccaauggcguuagcgugcugacauuuaagguccuugaucugaagaacuacaucgacaaacaacuccugccuauucugaauaagcagucuuguuccaucccgaacauugaaaccgugaucgaguuccagcagaaaaauaaccggcuccuggaaaucacgcgcgaguuuagcgugaaugcuggcgucacaacccccguuucuacauauaugcuuaccaacuccgagcugcucagccugauuaaugauaugccuaucaccaacgaccaaaagaaacuuauguccaacaaugugcagauugugagacagcagucuuacagcaucaugugcauuaucaaggaagagguccuggccuaugugguucaacucccccuguacggggugaucgauacaccuuguuggaaacugcauacgagcccccucugcaccacaaacaccaaggaaggauccaauauuugucugacacggaccgaccgcggcugguacugcgauaacgcugggucugucuccuucuuuccucaggccgagacguguaaggugcagagcaauagaguuuucugcgacacaaugaacucucuuacccugccgagcgaagugaaucucugcaacgucgauaucuuuaaucccaaauaugacuguaagauuaugaccuccaaaacagaugugucuagcuccgucaucaccagccugggagcgauugugucuugcuacggcaagacaaaauguacggccuccaacaagaaucgggggaucaucaagaccuucagcaacggaugcgacuauguuucuaauaaaggcguggacacagucuccgugggcaacacccuuuacuguguuaauaagcaagaggggcagagccuguaugugaaaggagagccuauuaucaacuuuuacgauccccucgucuucccuuccgacgaauuugaugcuucuauuagccaggugaacgagaagaucaaucagucccuggccuucauucgcaaaucugacgaacugcuccacaacgugaaugcuggcaagagcacaaccaacaucaugauuacgaccaucaucauuguuaucauugucauccugcuuucccugauugccguggggcuccugcuguauugcaaggccagaugaggacuaguacuggcugcaucucccuuuccucuguccuccauccuucucccaggauggugaagggggaccugguacccagugauccccaccccaggauccuaaaucaugacuuaccugcuaauaaaaacucauuggaaaagugagaagaucuaaaaaaaaaaaaaaaaaaaaaaaaaaaaaaaaaaaaaaaaaaaaaaaaaaaaaaaaaaaaaaaaugcaucccccccccccccccccccccccccccccccaaaggcucuuuucagagccaccagaauu

SEQ ID NO: 3720 - RNA, 1901 nt, Artificial Sequence
  mRNA product Design f-3 comprising derived and/or modified sequence from HRSV(A2)__F-del_DSCav1_mut3 (opt6)
gggagagucccgcagucggcguccagcggcucugcuuguucgugugugugucguugcaggccuuauucaagcuuaccauggaauuacuaauccugaaagcaaacgcaauuacuacaauacuaacagcaguaaccuuuugcuuugccucaggacaaaacauaacugaagaauuuuaccaaucaacuugcucagcagucucaaaaggcuaucuaggagcacuacgaacagguugguauacuucagucauaacaauagaauuaucaaacauaaaagaaauuaaauguaacggaacugacgcaaaaguaaaacucaucaaacaagaacucgauaaauacaaaaacgcuguaaccgacuuacaacuacuaaugcaaucaacuccagcaacaggcuccggauccgcaauaugcagugguguagcaguaugcaaaguccuacaccuagaaggagaaguaaauaagauaaaaucugcucuacuaucaacaaauaaagcaguugucucccuaucaaauggagucucaguacucaccuucaaaguauuagaccucaaaaacuacauagacaaacaacuauuaccaauacucaacaaacaauccugcuccaucccuaacauagaaaccguaaucgaauuucaacaaaaaaauaacagacucuuagaaauaacuagagaauuuucaguuaaugcaggcgugacaacaccaguaucaacauauaugcuaacaaacuccgaacuccuaucccuaauaaacgacaugccaaucacaaacgaccaaaaaaaacuaauguccaacaacguacaaaucguaagacaacaaucauacucuauaaugugcauaauaaaagaagaaguacuggccuacguaguacaauuaccacucuacggaguaauagacaccccaugcuggaaacuccauacaucaccccuaugcacaacaaacacaaaagaaggauccaacauaugucucacuagaacagacagaggcugguacugcgacaacgcuggauccgucucauucuucccccaagcagaaacauguaaaguacaaucuaauagaguauuuugugacacaaugaacagccucacacuaccauccgaagucaaccuauguaacguagauauauuuaaucccaaauacgacugcaaaauaaugacauccaaaacagauguaucaucauccguuaucaccucacuaggagccauaguuucaugcuacggaaaaacaaaaugcacugcaucuaacaaaaauagagguauaauaaaaacauuuuccaacggcugcgacuacgucucaaacaaaggcguagacaccguaucaguaggaaauacauuauauugcguaaauaaacaagaaggccaaucccuauacguaaaaggagaacccaucauaaacuucuaugacccacuuguuuuccccucagacgaauuugacgccucaauaucacaaguaaaugaaaaaauaaaccaaucucuugccuucauuagaaaaucagacgaauuacuacacaacgucaacgcaggaaaaucaacaacaaacaucaugauaacaacgauaauaauagucauaauaguaauacuacuaucauuaaucgcagucggacuccuauuauauugcaaagcuagauaaggacuaguacuggcugcaucucccuuuccucuguccuccauccuucucccaggauggugaagggggaccugguacccagugauccccaccccaggauccuaaaucaugacuuaccugcuaauaaaaacucauuggaaaagugagaagaucuaaaaaaaaaaaaaaaaaaaaaaaaaaaaaaaaaaaaaaaaaaaaaaaaaaaaaaaaaaaaaaaaugcaucccccccccccccccccccccccccccccccaaaggcucuuuucagagccaccagaauu

SEQ ID NO: 3721 - RNA, 1901 nt, Artificial Sequence
  mRNA product Design f-3 comprising derived and/or modified sequence from HRSV(A2)__F-del_DSCav1_mut3 (opt11)
gggagagucccgcagucggcguccagcggcucugcuuguucgugugugugucguugcaggccuuauucaagcuuaccauggaacuacucauacuaaaagccaacgccauaaccaccauccucaccgcaguaacuuucugcuucgcuuccggccaaaacaucaccgaagaauuuuaccaaaguaccugcagcgcagucucaaaaggauaccuaggcgcccuacgcacaggcugguacaccuccgucauuaccaucgaacucuccaacaucaaagaaauuaaaugcaacgguacagacgcaaaagucaaacucaucaaacaagaacucgacaaauacaaaaacgcagucaccgaccuccaacuccucaugcaauccacccccgccacaggcucuggcuccgccaucugcucaggcguagcagucugcaaaguccugcaccucgaaggcgaagucaacaaaaucaagucagcccuccucuccaccaacaaggccgucguaucccucucaaacggaguuagcguccucaccuucaaaguccuagaccucaaaaacuacaucgauaaacaacuacuccccauccuaaacaaacaaucaugcuccaucccaaacaucgaaaccguaaucgaguuccaacaaaagaacaaccgccuccucgaaaucacacgugaguucuccguuaacgccggcgucaccacccccgucucuacauacaugcucaccaacuccgaacuccuuucccucaucaacgacaugccaaucaccaacgaccaaaagaaacucaugucaaacaacguacaaaucguccgacaacaaagcuacuccaucaugugcaucaucaaagaagaaguccuugcauacgucguucaacuaccccucuacggcguaaucgacacucccugcuggaaacuccacaccuccccgcucugcacaaccaacaccaaagaaggcagcaacaucugccucacccgaaccgaccgcggcugguacugcgauaacgccggauccgucuccuucuucccacaagcagaaacuugcaaaguccaauccaaccgcgucuucugcgacaccaugaacucccucacacuccccuccgaagucaaccugugcaacgucgacaucuucaacccaaaauacgacugcaaaaucaugaccucaaaaaccgacgucucaucuucugucaucaccucucucggcgcuaucgucuccugcuauggcaaaaccaaaugcaccgccuccaacaagaaccgcggcauuaucaagaccuucuccaacggcugcgacuacgucuccaauaagggcgucgacaccgucucugucggcaacacccuuuacugcguaaacaaacaagaaggucaaucucucuacgucaaaggagaacccaucaucaacuucuacgacccccuggucuuccccuccgacgaguucgaugcaucaaucucccaagucaacgaaaagaucaaccaaucucucgcuuucauccgcaaauccgacgaacuccuacacaacguaaacgccggcaaauccaccacaaacaucaugaucaccaccauuaucauagucaucaucgucauccuccucuccuuaaucgccguuggccuccuucucuacugcaaagcccgauaaggacuaguacuggcugcaucucccuuuccucuguccuccauccuucucccaggauggugaagggggaccugguacccagugauccccaccccaggauccuaaaucaugacuuaccugcuaauaaaaacucauuggaaaagugagaagaucuaaaaaaaaaaaaaaaaaaaaaaaaaaaaaaaaaaaaaaaaaaaaaaaaaaaaaaaaaaaaaaaaugcaucccccccccccccccccccccccccccccccaaaggcucuuuucagagccaccagaauu

SEQ ID NO: 3722 - RNA, 2117 nt, Artificial Sequence
  mRNA product Design f-4 comprising derived and/or modified sequence from HRSV(A2)__F-del_DSCav1_mut3 (opt1)
gggagagucccgcagucggcguccagcggcucugcuuguucgugugugugucguugcaggccuuauucaagcuuaccauggagcugcucauccugaaggccaacgccaucaccaccauccugacggcggugaccuucugcuucgccagcggccagaacaucaccgaggaguucuaccaguccacgugcagcgccgucuccaagggguaccucggcgcccugcggaccggcugguacaccuccgugaucaccaucgagcugagcaacaucaaggagaucaagugcaacgggaccgacgccaaggugaagcucaucaagcaggagcuggacaaguacaagaacgcggucacggaccugcagcuccugaugcaguccaccccggcaaccggcuccggcuccgccaucugcagcggcgucgccgugugcaaggugcugcaccucgagggggaggucaacaagaucaagagcgcccugcuguccaccaacaaggccguggugagccucuccaacggcgucagcgugcugaccuucaaggugcuggaccucaagaacuacaucgacaagcagcugcugcccauccugaacaagcagagcugcuccauccccaacaucgagacggugaucgaguuccagcagaagaacaaccggcuccuggagaucacccgcgaguucagcgugaacgccggggucaccacccccguguccacguacaugcugaccaacagcgagcuccugucccugaucaacgacaugccgaucaccaacgaccagaagaagcucaugagcaacaacgugcagaucguccggcagcaguccuacagcaucaugugcaucaucaaggaggaggugcuggcguacgugguccagcugccccucuacggcgugaucgacacccccugcuggaagcugcacacgagcccccugugcaccaccaacaccaaggagggguccaacaucugccucacgcgcaccgaccggggcugguacugcgacaacgccggcagcgucuccuucuucccgcaggccgagaccugcaaggugcagagcaaccgcguguucugcgacaccaugaacucccugacgcugcccagcgagguaaaccucugcaacgucgacaucuucaaccccaaguacgacugcaagaucaugaccuccaagaccgacgugagcuccagcgugaucaccucccugggggccaucgucagcugcuacggcaagacgaagugcaccgccagcaacaagaaccgggggaucaucaagaccuucuccaacggcugcgacuacgugagcaacaagggcguggacaccguguccgucgggaacacccuguacugcgugaacaagcaggagggccagagccucuacgugaagggggagcccaucaucaacuucuacgacccgcuggucuuccccuccgacgaguucgacgcgagcaucucccaggugaacgagaagaucaaccagagccuggccuucauccgcaaguccgacgagcugcuccacaacgugaacgccggcaagagcacgaccaacaucaugaucaccaccaucaucaucgucaucaucgugauccugcugucccucaucgccguggggcugcugcucuacugcaaggcccggugaggacuagugaagggaacacccaaauuuaauucagccuuaagcacaauuaauuaagagugaaacguaauuguacaagcaguuggucacccaccauagggcaugaucaacaccgcaaccuuuccuuuuucccccagugauucugaaaaaccccucuucccuucagcuugcuuagauguuccaaauuuaguaagcuuaaggcggccuacagaagaaaaagaaaaaaaaggccacaaaaguucccucucacuuucaguaaauaaaauaaaagcagcaacagaaauaaagaaauaaaugaaauucaaaaugaaauaaauauuguguugugcagcauuaaaaaaucaauaaaaauuaaaaaugagcaagaucuaaaaaaaaaaaaaaaaaaaaaaaaaaaaaaaaaaaaaaaaaaaaaaaaaaaaaaaaaaaaaaaaugcaucccccccccccccccccccccccccccccccaaaggcucuuuucagagccaccagaauu

SEQ ID NO: 3723 - RNA, 2117 nt, Artificial Sequence
  mRNA product Design f-4 comprising derived and/or modified sequence from HRSV(A2)__F-del_DSCav1_mut3 (opt1)
gggagagucccgcagucggcguccagcggcucugcuuguucgugugugugucguugcaggccuuauucaagcuuaccauggagcugcucauccugaaggccaacgccaucaccaccauccugacggcggugaccuucugcuucgccagcggccagaacaucaccgaggaguucuaccaguccacgugcagcgccgucuccaagggguaccucggcgcccugcgcaccgggugguacaccagcgugaucaccaucgagcuguccaacaucaaggagaucaagugcaacggcaccgacgccaaggugaagcucaucaagcaggagcuggacaaguacaagaacgcggucacggaccugcagcuccugaugcagagcacccccgccaccggguccggcagcgccaucugcuccggcguggccgugugcaagguccugcaccucgagggggaggugaacaagaucaagagcgcgcugcuguccaccaacaaggccguggucagccucuccaacggcgugagcgugcugacguucaagguccuggaccucaagaacuacaucgacaagcagcugcugccgauccucaacaagcaguccugcagcauccccaacaucgagaccgugaucgaguuccagcagaagaacaaccggcugcuggagaucacccgcgaguucuccgugaacgccggggucaccacgcccgugagcaccuacaugcucaccaacuccgagcugcugagccucaucaacgacaugcccaucaccaacgaccagaagaagcugaugagcaacaacgugcagaucguccggcagcaguccuacagcaucaugugcaucaucaaggaggaggugcuggccuacgugguccagcucccgcuguacggcgugaucgacacgcccugcuggaagcugcacaccagcccccucugcaccaccaacacgaaggagggguccaacaucugccugacccgcaccgaccggggcugguacugcgacaacgccggcuccgugagcuucuucccccaggcggagaccugcaagguccaguccaaccgcguguucugcgacacgaugaacagccugacccucccguccgaggucaaccugugcaacguggacaucuucaaccccaaguacgacugcaagaucaugaccagcaagaccgacguguccagcuccgucaucacgagccugggggccaucguguccugcuacggcaagaccaagugcaccgccagcaacaagaaccgggggaucaucaagaccuucuccaacggcugcgacuacgugagcaacaagggcgucgacacgguguccguggggaacacccucuacugcgucaacaagcaggagggccagagccuguacgugaagggggagcccaucaucaacuucuacgacccccugguguucccgagcgacgaguucgacgccuccaucagccaggucaacgagaagaucaaccagucccucgccuucauccgcaagagcgacgagcugcugcacaacgugaacgcgggcaaguccaccaccaacaucaugaucaccacgaucaucaucgugaucaucgucauccuccugagccugaucgccguggggcuccugcuguacugcaaggcccggugaggacuagugaagggaacacccaaauuuaauucagccuuaagcacaauuaauuaagagugaaacguaauuguacaagcaguuggucacccaccauagggcaugaucaacaccgcaaccuuuccuuuuucccccagugauucugaaaaaccccucuucccuucagcuugcuuagauguuccaaauuuaguaagcuuaaggcggccuacagaagaaaaagaaaaaaaaggccacaaaaguucccucucacuuucaguaaauaaaauaaaagcagcaacagaaauaaagaaauaaaugaaauucaaaaugaaauaaauauuguguugugcagcauuaaaaaaucaauaaaaauuaaaaaugagcaagaucuaaaaaaaaaaaaaaaaaaaaaaaaaaaaaaaaaaaaaaaaaaaaaaaaaaaaaaaaaaaaaaaaugcaucccccccccccccccccccccccccccccccaaaggcucuuuucagagccaccagaauu

SEQ ID NO: 3724 - RNA, 2117 nt, Artificial Sequence
  mRNA product Design f-4 comprising derived and/or modified sequence from HRSV(A2)__F-del_DSCav1_mut3 (opt2)
gggagagucccgcagucggcguccagcggcucugcuuguucgugugugugucguugcaggccuuauucaagcuuaccauggagcuccucauccucaaggccaacgccaucaccaccauccucaccgccgucaccuucugcuucgccuccggccagaacaucaccgaggaguucuaccaguccaccugcuccgccgucuccaagggcuaccucggcgcccuccgcaccggcugguacaccuccgucaucaccaucgagcucuccaacaucaaggagaucaagugcaacggcaccgacgccaaggucaagcucaucaagcaggagcucgacaaguacaagaacgccgucaccgaccuccagcuccucaugcaguccacccccgccaccggcuccggcuccgccaucugcuccggcgucgccgucugcaagguccuccaccucgagggcgaggucaacaagaucaaguccgcccuccucuccaccaacaaggccgucgucucccucuccaacggcgucuccguccucaccuucaagguccucgaccucaagaacuacaucgacaagcagcuccuccccauccucaacaagcaguccugcuccauccccaacaucgagaccgucaucgaguuccagcagaagaacaaccgccuccucgagaucacccgcgaguucuccgucaacgccggcgucaccacccccgucuccaccuacaugcucaccaacuccgagcuccucucccucaucaacgacaugcccaucaccaacgaccagaagaagcucauguccaacaacguccagaucguccgccagcaguccuacuccaucaugugcaucaucaaggaggagguccucgccuacgucguccagcucccccucuacggcgucaucgacacccccugcuggaagcuccacaccuccccccucugcaccaccaacaccaaggagggcuccaacaucugccucacccgcaccgaccgcggcugguacugcgacaacgccggcuccgucuccuucuucccccaggccgagaccugcaagguccaguccaaccgcgucuucugcgacaccaugaacucccucacccuccccuccgaggucaaccucugcaacgucgacaucuucaaccccaaguacgacugcaagaucaugaccuccaagaccgacgucuccuccuccgucaucaccucccucggcgccaucgucuccugcuacggcaagaccaagugcaccgccuccaacaagaaccgcggcaucaucaagaccuucuccaacggcugcgacuacgucuccaacaagggcgucgacaccgucuccgucggcaacacccucuacugcgucaacaagcaggagggccagucccucuacgucaagggcgagcccaucaucaacuucuacgacccccucgucuuccccuccgacgaguucgacgccuccaucucccaggucaacgagaagaucaaccagucccucgccuucauccgcaaguccgacgagcuccuccacaacgucaacgccggcaaguccaccaccaacaucaugaucaccaccaucaucaucgucaucaucgucauccuccucucccucaucgccgucggccuccuccucuacugcaaggcccgcugaggacuagugaagggaacacccaaauuuaauucagccuuaagcacaauuaauuaagagugaaacguaauuguacaagcaguuggucacccaccauagggcaugaucaacaccgcaaccuuuccuuuuucccccagugauucugaaaaaccccucuucccuucagcuugcuuagauguuccaaauuuaguaagcuuaaggcggccuacagaagaaaaagaaaaaaaaggccacaaaaguucccucucacuuucaguaaauaaaauaaaagcagcaacagaaauaaagaaauaaaugaaauucaaaaugaaauaaauauuguguugugcagcauuaaaaaaucaauaaaaauuaaaaaugagcaagaucuaaaaaaaaaaaaaaaaaaaaaaaaaaaaaaaaaaaaaaaaaaaaaaaaaaaaaaaaaaaaaaaaugcaucccccccccccccccccccccccccccccccaaaggcucuuuucagagccaccagaauu

SEQ ID NO: 3725 - RNA, 2117 nt, Artificial Sequence
  mRNA product Design f-4 comprising derived and/or modified sequence from HRSV(A2)__F-del_DSCav1_mut3 (opt3)
gggagagucccgcagucggcguccagcggcucugcuuguucgugugugugucguugcaggccuuauucaagcuuaccauggagcugcucauccuuaaggccaacgcuauuaccacaauacugacugcagugacguucugcuuugccagcggccagaauaucaccgaagaguucuaccaauccacauguucugcggucucaaaaggguauuugggagcuuuaagaacugguugguacaccaguguuauuacaaucgaacugagcaacauuaaggagaucaaaugcaauggcaccgacgccaaggugaaacuaauaaagcaggaacucgauaaguauaaaaacgcaguaacugaccugcagcuucugaugcaguccacacccgccaccgggucuggaucggcuaucuguucaggcguggcagucugcaagguguugcaccucgagggugagguuaauaaaauuaagagcgcccugcugaguacgaacaaagcuguggucucccucucuaauggggugagcguauuaacuuuuaagguucuggaucuuaagaacuacaucgacaaacaauugcugccuauucuaaauaagcaguccuguucaaucccaaacauagaaaccgugauugaguuccagcagaaaaauaacaggcuccuggaaaucacacgggaguuuagugucaaugccggagugacuaccccggugagcacauauaugcuuaccaacucugagcuguugucccucauuaaugauaugcccaucacgaacgaccaaaagaaacugaugucaaacaauguccagaucguucgccagcagagcuacaguauuaugugcauaaucaaggaagagguguuagcguauguagugcaacugccucucuacggcgucauugauacuccauguuggaaacuucauacaucuccccugugcaccacuaacacaaaggaaggcuccaauaucuguuugacccgaacggaccgugggugguacugcgauaacgcaggaagcgugucguucuuuccucaggccgagaccuguaagguucagucuaauagaguguucugcgacacaaugaacucccuaacucugccaucagaagucaaucucugcaacguggauauauuuaaucccaaauaugacuguaagauuaugaccaguaaaacagauguaagcuccucuguuaucacuagccugggugcuaucgugucaugcuacggcaagaccaaauguacagccaguaacaagaauagggggauuaucaagaccuucuccaacggaugcgacuaugucagcaauaaaggcguggacacugucucuguggguaacacgcuuuacuguguuaauaagcaagaggggcagucacuguaugugaaaggagagccuauuauaaacuuuuacgauccauugguauucccgagugacgaauuugaugcaagcaucucccaggucaacgagaagauuaaucagucucucgcuuucauccggaaaucggacgaacuguuacacaacgugaaugccggcaagagcacaaccaacaucaugauuacuaccauaaucauuguuaucauugugauccugcuaucccucauagcggucggccugcuuuuguauugcaaggcccgcugaggacuagugaagggaacacccaaauuuaauucagccuuaagcacaauuaauuaagagugaaacguaauuguacaagcaguuggucacccaccauagggcaugaucaacaccgcaaccuuuccuuuuucccccagugauucugaaaaaccccucuucccuucagcuugcuuagauguuccaaauuuaguaagcuuaaggcggccuacagaagaaaaagaaaaaaaaggccacaaaaguucccucucacuuucaguaaauaaaauaaaagcagcaacagaaauaaagaaauaaaugaaauucaaaaugaaauaaauauuguguugugcagcauuaaaaaaucaauaaaaauuaaaaaugagcaagaucuaaaaaaaaaaaaaaaaaaaaaaaaaaaaaaaaaaaaaaaaaaaaaaaaaaaaaaaaaaaaaaaaugcaucccccccccccccccccccccccccccccccaaaggcucuuuucagagccaccagaauu

SEQ ID NO: 3726 - RNA, 2117 nt, Artificial Sequence
  mRNA product Design f-4 comprising derived and/or modified sequence from HRSV(A2)__F-del_DSCav1_mut3 (opt4)
gggagagucccgcagucggcguccagcggcucugcuuguucgugugugugucguugcaggccuuauucaagcuuaccauggagcugcugauccugaaggccaacgccaucaccaccauccugaccgccgugaccuucugcuucgccagcggccagaacaucaccgaggaguucuaccagagcaccugcagcgccgugagcaagggcuaccugggcgcccugagaaccggcugguacaccagcgugaucaccaucgagcugagcaacaucaaggagaucaagugcaacggcaccgacgccaaggugaagcugaucaagcaggagcuggacaaguacaagaacgccgugaccgaccugcagcugcugaugcagagcacccccgccaccggcagcggcagcgccaucugcagcggcguggccgugugcaaggugcugcaccuggagggcgaggugaacaagaucaagagcgcccugcugagcaccaacaaggccguggugagccugagcaacggcgugagcgugcugaccuucaaggugcuggaccugaagaacuacaucgacaagcagcugcugcccauccugaacaagcagagcugcagcauccccaacaucgagaccgugaucgaguuccagcagaagaacaacagacugcuggagaucaccagagaguucagcgugaacgccggcgugaccacccccgugagcaccuacaugcugaccaacagcgagcugcugagccugaucaacgacaugcccaucaccaacgaccagaagaagcugaugagcaacaacgugcagaucgugagacagcagagcuacagcaucaugugcaucaucaaggaggaggugcuggccuacguggugcagcugccccuguacggcgugaucgacacccccugcuggaagcugcacaccagcccccugugcaccaccaacaccaaggagggcagcaacaucugccugaccagaaccgacagaggcugguacugcgacaacgccggcagcgugagcuucuucccccaggccgagaccugcaaggugcagagcaacagaguguucugcgacaccaugaacagccugacccugcccagcgaggugaaccugugcaacguggacaucuucaaccccaaguacgacugcaagaucaugaccagcaagaccgacgugagcagcagcgugaucaccagccugggcgccaucgugagcugcuacggcaagaccaagugcaccgccagcaacaagaacagaggcaucaucaagaccuucagcaacggcugcgacuacgugagcaacaagggcguggacaccgugagcgugggcaacacccuguacugcgugaacaagcaggagggccagagccuguacgugaagggcgagcccaucaucaacuucuacgacccccugguguuccccagcgacgaguucgacgccagcaucagccaggugaacgagaagaucaaccagagccuggccuucaucagaaagagcgacgagcugcugcacaacgugaacgccggcaagagcaccaccaacaucaugaucaccaccaucaucaucgugaucaucgugauccugcugagccugaucgccgugggccugcugcuguacugcaaggccagaugaggacuagugaagggaacacccaaauuuaauucagccuuaagcacaauuaauuaagagugaaacguaauuguacaagcaguuggucacccaccauagggcaugaucaacaccgcaaccuuuccuuuuucccccagugauucugaaaaaccccucuucccuucagcuugcuuagauguuccaaauuuaguaagcuuaaggcggccuacagaagaaaaagaaaaaaaaggccacaaaaguucccucucacuuucaguaaauaaaauaaaagcagcaacagaaauaaagaaauaaaugaaauucaaaaugaaauaaauauuguguugugcagcauuaaaaaaucaauaaaaauuaaaaaugagcaagaucuaaaaaaaaaaaaaaaaaaaaaaaaaaaaaaaaaaaaaaaaaaaaaaaaaaaaaaaaaaaaaaaaugcaucccccccccccccccccccccccccccccccaaaggcucuuuucagagccaccagaauu

SEQ ID NO: 3727 - RNA, 2117 nt, Artificial Sequence
  mRNA product Design f-4 comprising derived and/or modified sequence from HRSV(A2)__F-del_DSCav1_mut3 (opt5)
gggagagucccgcagucggcguccagcggcucugcuuguucgugugugugucguugcaggccuuauucaagcuuaccauggagcugcucauccugaaggccaacgcuauuaccacaauccuuacggccgugaccuucugcuuugcgagcggccagaauauuacagaagaguucuaccaauccaccuguucugcugucagcaaaggguaucugggagcccucagaacaggcugguacaccuccguuaucacaauugaacugucuaacaucaaggagaucaaaugcaaugggaccgacgccaaggugaaacuuauuaagcaggaacuggauaaguauaaaaacgcugugacggaccuccagcugcugaugcagagcacccccgccacaggauccggcucugcuaucuguagcggggucgccgugugcaagguucuccaccuggagggagaggugaauaaaauuaaguccgcgcuucugagcaccaacaaagccgucgugucucucuccaauggcguuagcgugcugacauuuaagguccuugaucugaagaacuacaucgacaaacaacuccugccuauucugaauaagcagucuuguuccaucccgaacauugaaaccgugaucgaguuccagcagaaaaauaaccggcuccuggaaaucacgcgcgaguuuagcgugaaugcuggcgucacaacccccguuucuacauauaugcuuaccaacuccgagcugcucagccugauuaaugauaugccuaucaccaacgaccaaaagaaacuuauguccaacaaugugcagauugugagacagcagucuuacagcaucaugugcauuaucaaggaagagguccuggccuaugugguucaacucccccuguacggggugaucgauacaccuuguuggaaacugcauacgagcccccucugcaccacaaacaccaaggaaggauccaauauuugucugacacggaccgaccgcggcugguacugcgauaacgcugggucugucuccuucuuuccucaggccgagacguguaaggugcagagcaauagaguuuucugcgacacaaugaacucucuuacccugccgagcgaagugaaucucugcaacgucgauaucuuuaaucccaaauaugacuguaagauuaugaccuccaaaacagaugugucuagcuccgucaucaccagccugggagcgauugugucuugcuacggcaagacaaaauguacggccuccaacaagaaucgggggaucaucaagaccuucagcaacggaugcgacuauguuucuaauaaaggcguggacacagucuccgugggcaacacccuuuacuguguuaauaagcaagaggggcagagccuguaugugaaaggagagccuauuaucaacuuuuacgauccccucgucuucccuuccgacgaauuugaugcuucuauuagccaggugaacgagaagaucaaucagucccuggccuucauucgcaaaucugacgaacugcuccacaacgugaaugcuggcaagagcacaaccaacaucaugauuacgaccaucaucauuguuaucauugucauccugcuuucccugauugccguggggcuccugcuguauugcaaggccagaugaggacuagugaagggaacacccaaauuuaauucagccuuaagcacaauuaauuaagagugaaacguaauuguacaagcaguuggucacccaccauagggcaugaucaacaccgcaaccuuuccuuuuucccccagugauucugaaaaaccccucuucccuucagcuugcuuagauguuccaaauuuaguaagcuuaaggcggccuacagaagaaaaagaaaaaaaaggccacaaaaguucccucucacuuucaguaaauaaaauaaaagcagcaacagaaauaaagaaauaaaugaaauucaaaaugaaauaaauauuguguugugcagcauuaaaaaaucaauaaaaauuaaaaaugagcaagaucuaaaaaaaaaaaaaaaaaaaaaaaaaaaaaaaaaaaaaaaaaaaaaaaaaaaaaaaaaaaaaaaaugcaucccccccccccccccccccccccccccccccaaaggcucuuuucagagccaccagaauu

SEQ ID NO: 3728 - RNA, 2117 nt, Artificial Sequence
  mRNA product Design f-4 comprising derived and/or modified sequence from HRSV(A2)__F-del_DSCav1_mut3 (opt6)
gggagagucccgcagucggcguccagcggcucugcuuguucgugugugugucguugcaggccuuauucaagcuuaccauggaauuacuaauccugaaagcaaacgcaauuacuacaauacuaacagcaguaaccuuuugcuuugccucaggacaaaacauaacugaagaauuuuaccaaucaacuugcucagcagucucaaaaggcuaucuaggagcacuacgaacagguugguauacuucagucauaacaauagaauuaucaaacauaaaagaaauuaaauguaacggaacugacgcaaaaguaaaacucaucaaacaagaacucgauaaauacaaaaacgcuguaaccgacuuacaacuacuaaugcaaucaacuccagcaacaggcuccggauccgcaauaugcagugguguagcaguaugcaaaguccuacaccuagaaggagaaguaaauaagauaaaaucugcucuacuaucaacaaauaaagcaguugucucccuaucaaauggagucucaguacucaccuucaaaguauuagaccucaaaaacuacauagacaaacaacuauuaccaauacucaacaaacaauccugcuccaucccuaacauagaaaccguaaucgaauuucaacaaaaaaauaacagacucuuagaaauaacuagagaauuuucaguuaaugcaggcgugacaacaccaguaucaacauauaugcuaacaaacuccgaacuccuaucccuaauaaacgacaugccaaucacaaacgaccaaaaaaaacuaauguccaacaacguacaaaucguaagacaacaaucauacucuauaaugugcauaauaaaagaagaaguacuggccuacguaguacaauuaccacucuacggaguaauagacaccccaugcuggaaacuccauacaucaccccuaugcacaacaaacacaaaagaaggauccaacauaugucucacuagaacagacagaggcugguacugcgacaacgcuggauccgucucauucuucccccaagcagaaacauguaaaguacaaucuaauagaguauuuugugacacaaugaacagccucacacuaccauccgaagucaaccuauguaacguagauauauuuaaucccaaauacgacugcaaaauaaugacauccaaaacagauguaucaucauccguuaucaccucacuaggagccauaguuucaugcuacggaaaaacaaaaugcacugcaucuaacaaaaauagagguauaauaaaaacauuuuccaacggcugcgacuacgucucaaacaaaggcguagacaccguaucaguaggaaauacauuauauugcguaaauaaacaagaaggccaaucccuauacguaaaaggagaacccaucauaaacuucuaugacccacuuguuuuccccucagacgaauuugacgccucaauaucacaaguaaaugaaaaaauaaaccaaucucuugccuucauuagaaaaucagacgaauuacuacacaacgucaacgcaggaaaaucaacaacaaacaucaugauaacaacgauaauaauagucauaauaguaauacuacuaucauuaaucgcagucggacuccuauuauauugcaaagcuagauaaggacuagugaagggaacacccaaauuuaauucagccuuaagcacaauuaauuaagagugaaacguaauuguacaagcaguuggucacccaccauagggcaugaucaacaccgcaaccuuuccuuuuucccccagugauucugaaaaaccccucuucccuucagcuugcuuagauguuccaaauuuaguaagcuuaaggcggccuacagaagaaaaagaaaaaaaaggccacaaaaguucccucucacuuucaguaaauaaaauaaaagcagcaacagaaauaaagaaauaaaugaaauucaaaaugaaauaaauauuguguugugcagcauuaaaaaaucaauaaaaauuaaaaaugagcaagaucuaaaaaaaaaaaaaaaaaaaaaaaaaaaaaaaaaaaaaaaaaaaaaaaaaaaaaaaaaaaaaaaaugcaucccccccccccccccccccccccccccccccaaaggcucuuuucagagccaccagaauu

SEQ ID NO: 3729 - RNA, 2117 nt, Artificial Sequence
  mRNA product Design f-4 comprising derived and/or modified sequence from HRSV(A2)__F-del_DSCav1_mut3 (opt11)
gggagagucccgcagucggcguccagcggcucugcuuguucgugugugugucguugcaggccuuauucaagcuuaccauggaacuacucauacuaaaagccaacgccauaaccaccauccucaccgcaguaacuuucugcuucgcuuccggccaaaacaucaccgaagaauuuuaccaaaguaccugcagcgcagucucaaaaggauaccuaggcgcccuacgcacaggcugguacaccuccgucauuaccaucgaacucuccaacaucaaagaaauuaaaugcaacgguacagacgcaaaagucaaacucaucaaacaagaacucgacaaauacaaaaacgcagucaccgaccuccaacuccucaugcaauccacccccgccacaggcucuggcuccgccaucugcucaggcguagcagucugcaaaguccugcaccucgaaggcgaagucaacaaaaucaagucagcccuccucuccaccaacaaggccgucguaucccucucaaacggaguuagcguccucaccuucaaaguccuagaccucaaaaacuacaucgauaaacaacuacuccccauccuaaacaaacaaucaugcuccaucccaaacaucgaaaccguaaucgaguuccaacaaaagaacaaccgccuccucgaaaucacacgugaguucuccguuaacgccggcgucaccacccccgucucuacauacaugcucaccaacuccgaacuccuuucccucaucaacgacaugccaaucaccaacgaccaaaagaaacucaugucaaacaacguacaaaucguccgacaacaaagcuacuccaucaugugcaucaucaaagaagaaguccuugcauacgucguucaacuaccccucuacggcguaaucgacacucccugcuggaaacuccacaccuccccgcucugcacaaccaacaccaaagaaggcagcaacaucugccucacccgaaccgaccgcggcugguacugcgauaacgccggauccgucuccuucuucccacaagcagaaacuugcaaaguccaauccaaccgcgucuucugcgacaccaugaacucccucacacuccccuccgaagucaaccugugcaacgucgacaucuucaacccaaaauacgacugcaaaaucaugaccucaaaaaccgacgucucaucuucugucaucaccucucucggcgcuaucgucuccugcuauggcaaaaccaaaugcaccgccuccaacaagaaccgcggcauuaucaagaccuucuccaacggcugcgacuacgucuccaauaagggcgucgacaccgucucugucggcaacacccuuuacugcguaaacaaacaagaaggucaaucucucuacgucaaaggagaacccaucaucaacuucuacgacccccuggucuuccccuccgacgaguucgaugcaucaaucucccaagucaacgaaaagaucaaccaaucucucgcuuucauccgcaaauccgacgaacuccuacacaacguaaacgccggcaaauccaccacaaacaucaugaucaccaccauuaucauagucaucaucgucauccuccucuccuuaaucgccguuggccuccuucucuacugcaaagcccgauaaggacuagugaagggaacacccaaauuuaauucagccuuaagcacaauuaauuaagagugaaacguaauuguacaagcaguuggucacccaccauagggcaugaucaacaccgcaaccuuuccuuuuucccccagugauucugaaaaaccccucuucccuucagcuugcuuagauguuccaaauuuaguaagcuuaaggcggccuacagaagaaaaagaaaaaaaaggccacaaaaguucccucucacuuucaguaaauaaaauaaaagcagcaacagaaauaaagaaauaaaugaaauucaaaaugaaauaaauauuguguugugcagcauuaaaaaaucaauaaaaauuaaaaaugagcaagaucuaaaaaaaaaaaaaaaaaaaaaaaaaaaaaaaaaaaaaaaaaaaaaaaaaaaaaaaaaaaaaaaaugcaucccccccccccccccccccccccccccccccaaaggcucuuuucagagccaccagaauu

SEQ ID NO: 3730 - RNA, 1893 nt, Artificial Sequence
  mRNA product Design f-5 comprising derived and/or modified sequence from HRSV(A2)__F-del_DSCav1_mut3 (opt1)
gggagacuuucccauucuguagcagaauuugguguugccuguggucuuggucccgcggagaagcuuaccauggagcugcucauccugaaggccaacgccaucaccaccauccugacggcggugaccuucugcuucgccagcggccagaacaucaccgaggaguucuaccaguccacgugcagcgccgucuccaagggguaccucggcgcccugcggaccggcugguacaccuccgugaucaccaucgagcugagcaacaucaaggagaucaagugcaacgggaccgacgccaaggugaagcucaucaagcaggagcuggacaaguacaagaacgcggucacggaccugcagcuccugaugcaguccaccccggcaaccggcuccggcuccgccaucugcagcggcgucgccgugugcaaggugcugcaccucgagggggaggucaacaagaucaagagcgcccugcuguccaccaacaaggccguggugagccucuccaacggcgucagcgugcugaccuucaaggugcuggaccucaagaacuacaucgacaagcagcugcugcccauccugaacaagcagagcugcuccauccccaacaucgagacggugaucgaguuccagcagaagaacaaccggcuccuggagaucacccgcgaguucagcgugaacgccggggucaccacccccguguccacguacaugcugaccaacagcgagcuccugucccugaucaacgacaugccgaucaccaacgaccagaagaagcucaugagcaacaacgugcagaucguccggcagcaguccuacagcaucaugugcaucaucaaggaggaggugcuggcguacgugguccagcugccccucuacggcgugaucgacacccccugcuggaagcugcacacgagcccccugugcaccaccaacaccaaggagggguccaacaucugccucacgcgcaccgaccggggcugguacugcgacaacgccggcagcgucuccuucuucccgcaggccgagaccugcaaggugcagagcaaccgcguguucugcgacaccaugaacucccugacgcugcccagcgagguaaaccucugcaacgucgacaucuucaaccccaaguacgacugcaagaucaugaccuccaagaccgacgugagcuccagcgugaucaccucccugggggccaucgucagcugcuacggcaagacgaagugcaccgccagcaacaagaaccgggggaucaucaagaccuucuccaacggcugcgacuacgugagcaacaagggcguggacaccguguccgucgggaacacccuguacugcgugaacaagcaggagggccagagccucuacgugaagggggagcccaucaucaacuucuacgacccgcuggucuuccccuccgacgaguucgacgcgagcaucucccaggugaacgagaagaucaaccagagccuggccuucauccgcaaguccgacgagcugcuccacaacgugaacgccggcaagagcacgaccaacaucaugaucaccaccaucaucaucgucaucaucgugauccugcugucccucaucgccguggggcugcugcucuacugcaaggcccggugaggacuaguacuggcugcaucucccuuuccucuguccuccauccuucucccaggauggugaagggggaccugguacccagugauccccaccccaggauccuaaaucaugacuuaccugcuaauaaaaacucauuggaaaagugagaagaucuaaaaaaaaaaaaaaaaaaaaaaaaaaaaaaaaaaaaaaaaaaaaaaaaaaaaaaaaaaaaaaaaugcaucccccccccccccccccccccccccccccccaaaggcucuuuucagagccaccagaauu

SEQ ID NO: 3731 - RNA, 1893 nt, Artificial Sequence
  mRNA product Design f-5 comprising derived and/or modified sequence from HRSV(A2)__F-del_DSCav1_mut3 (opt1)
gggagacuuucccauucuguagcagaauuugguguugccuguggucuuggucccgcggagaagcuuaccauggagcugcucauccugaaggccaacgccaucaccaccauccugacggcggugaccuucugcuucgccagcggccagaacaucaccgaggaguucuaccaguccacgugcagcgccgucuccaagggguaccucggcgcccugcgcaccgggugguacaccagcgugaucaccaucgagcuguccaacaucaaggagaucaagugcaacggcaccgacgccaaggugaagcucaucaagcaggagcuggacaaguacaagaacgcggucacggaccugcagcuccugaugcagagcacccccgccaccggguccggcagcgccaucugcuccggcguggccgugugcaagguccugcaccucgagggggaggugaacaagaucaagagcgcgcugcuguccaccaacaaggccguggucagccucuccaacggcgugagcgugcugacguucaagguccuggaccucaagaacuacaucgacaagcagcugcugccgauccucaacaagcaguccugcagcauccccaacaucgagaccgugaucgaguuccagcagaagaacaaccggcugcuggagaucacccgcgaguucuccgugaacgccggggucaccacgcccgugagcaccuacaugcucaccaacuccgagcugcugagccucaucaacgacaugcccaucaccaacgaccagaagaagcugaugagcaacaacgugcagaucguccggcagcaguccuacagcaucaugugcaucaucaaggaggaggugcuggccuacgugguccagcucccgcuguacggcgugaucgacacgcccugcuggaagcugcacaccagcccccucugcaccaccaacacgaaggagggguccaacaucugccugacccgcaccgaccggggcugguacugcgacaacgccggcuccgugagcuucuucccccaggcggagaccugcaagguccaguccaaccgcguguucugcgacacgaugaacagccugacccucccguccgaggucaaccugugcaacguggacaucuucaaccccaaguacgacugcaagaucaugaccagcaagaccgacguguccagcuccgucaucacgagccugggggccaucguguccugcuacggcaagaccaagugcaccgccagcaacaagaaccgggggaucaucaagaccuucuccaacggcugcgacuacgugagcaacaagggcgucgacacgguguccguggggaacacccucuacugcgucaacaagcaggagggccagagccuguacgugaagggggagcccaucaucaacuucuacgacccccugguguucccgagcgacgaguucgacgccuccaucagccaggucaacgagaagaucaaccagucccucgccuucauccgcaagagcgacgagcugcugcacaacgugaacgcgggcaaguccaccaccaacaucaugaucaccacgaucaucaucgugaucaucgucauccuccugagccugaucgccguggggcuccugcuguacugcaaggcccggugaggacuaguacuggcugcaucucccuuuccucuguccuccauccuucucccaggauggugaagggggaccugguacccagugauccccaccccaggauccuaaaucaugacuuaccugcuaauaaaaacucauuggaaaagugagaagaucuaaaaaaaaaaaaaaaaaaaaaaaaaaaaaaaaaaaaaaaaaaaaaaaaaaaaaaaaaaaaaaaaugcaucccccccccccccccccccccccccccccccaaaggcucuuuucagagccaccagaauu

SEQ ID NO: 3732 - RNA, 1893 nt, Artificial Sequence
  mRNA product Design f-5 comprising derived and/or modified sequence from HRSV(A2)__F-del_DSCav1_mut3 (opt2)
gggagacuuucccauucuguagcagaauuugguguugccuguggucuuggucccgcggagaagcuuaccauggagcuccucauccucaaggccaacgccaucaccaccauccucaccgccgucaccuucugcuucgccuccggccagaacaucaccgaggaguucuaccaguccaccugcuccgccgucuccaagggcuaccucggcgcccuccgcaccggcugguacaccuccgucaucaccaucgagcucuccaacaucaaggagaucaagugcaacggcaccgacgccaaggucaagcucaucaagcaggagcucgacaaguacaagaacgccgucaccgaccuccagcuccucaugcaguccacccccgccaccggcuccggcuccgccaucugcuccggcgucgccgucugcaagguccuccaccucgagggcgaggucaacaagaucaaguccgcccuccucuccaccaacaaggccgucgucucccucuccaacggcgucuccguccucaccuucaagguccucgaccucaagaacuacaucgacaagcagcuccuccccauccucaacaagcaguccugcuccauccccaacaucgagaccgucaucgaguuccagcagaagaacaaccgccuccucgagaucacccgcgaguucuccgucaacgccggcgucaccacccccgucuccaccuacaugcucaccaacuccgagcuccucucccucaucaacgacaugcccaucaccaacgaccagaagaagcucauguccaacaacguccagaucguccgccagcaguccuacuccaucaugugcaucaucaaggaggagguccucgccuacgucguccagcucccccucuacggcgucaucgacacccccugcuggaagcuccacaccuccccccucugcaccaccaacaccaaggagggcuccaacaucugccucacccgcaccgaccgcggcugguacugcgacaacgccggcuccgucuccuucuucccccaggccgagaccugcaagguccaguccaaccgcgucuucugcgacaccaugaacucccucacccuccccuccgaggucaaccucugcaacgucgacaucuucaaccccaaguacgacugcaagaucaugaccuccaagaccgacgucuccuccuccgucaucaccucccucggcgccaucgucuccugcuacggcaagaccaagugcaccgccuccaacaagaaccgcggcaucaucaagaccuucuccaacggcugcgacuacgucuccaacaagggcgucgacaccgucuccgucggcaacacccucuacugcgucaacaagcaggagggccagucccucuacgucaagggcgagcccaucaucaacuucuacgacccccucgucuuccccuccgacgaguucgacgccuccaucucccaggucaacgagaagaucaaccagucccucgccuucauccgcaaguccgacgagcuccuccacaacgucaacgccggcaaguccaccaccaacaucaugaucaccaccaucaucaucgucaucaucgucauccuccucucccucaucgccgucggccuccuccucuacugcaaggcccgcugaggacuaguacuggcugcaucucccuuuccucuguccuccauccuucucccaggauggugaagggggaccugguacccagugauccccaccccaggauccuaaaucaugacuuaccugcuaauaaaaacucauuggaaaagugagaagaucuaaaaaaaaaaaaaaaaaaaaaaaaaaaaaaaaaaaaaaaaaaaaaaaaaaaaaaaaaaaaaaaaugcaucccccccccccccccccccccccccccccccaaaggcucuuuucagagccaccagaauu

SEQ ID NO: 3733 - RNA, 1893 nt, Artificial Sequence
  mRNA product Design f-5 comprising derived and/or modified sequence from HRSV(A2)__F-del_DSCav1_mut3 (opt3)
gggagacuuucccauucuguagcagaauuugguguugccuguggucuuggucccgcggagaagcuuaccauggagcugcucauccuuaaggccaacgcuauuaccacaauacugacugcagugacguucugcuuugccagcggccagaauaucaccgaagaguucuaccaauccacauguucugcggucucaaaaggguauuugggagcuuuaagaacugguugguacaccaguguuauuacaaucgaacugagcaacauuaaggagaucaaaugcaauggcaccgacgccaaggugaaacuaauaaagcaggaacucgauaaguauaaaaacgcaguaacugaccugcagcuucugaugcaguccacacccgccaccgggucuggaucggcuaucuguucaggcguggcagucugcaagguguugcaccucgagggugagguuaauaaaauuaagagcgcccugcugaguacgaacaaagcuguggucucccucucuaauggggugagcguauuaacuuuuaagguucuggaucuuaagaacuacaucgacaaacaauugcugccuauucuaaauaagcaguccuguucaaucccaaacauagaaaccgugauugaguuccagcagaaaaauaacaggcuccuggaaaucacacgggaguuuagugucaaugccggagugacuaccccggugagcacauauaugcuuaccaacucugagcuguugucccucauuaaugauaugcccaucacgaacgaccaaaagaaacugaugucaaacaauguccagaucguucgccagcagagcuacaguauuaugugcauaaucaaggaagagguguuagcguauguagugcaacugccucucuacggcgucauugauacuccauguuggaaacuucauacaucuccccugugcaccacuaacacaaaggaaggcuccaauaucuguuugacccgaacggaccgugggugguacugcgauaacgcaggaagcgugucguucuuuccucaggccgagaccuguaagguucagucuaauagaguguucugcgacacaaugaacucccuaacucugccaucagaagucaaucucugcaacguggauauauuuaaucccaaauaugacuguaagauuaugaccaguaaaacagauguaagcuccucuguuaucacuagccugggugcuaucgugucaugcuacggcaagaccaaauguacagccaguaacaagaauagggggauuaucaagaccuucuccaacggaugcgacuaugucagcaauaaaggcguggacacugucucuguggguaacacgcuuuacuguguuaauaagcaagaggggcagucacuguaugugaaaggagagccuauuauaaacuuuuacgauccauugguauucccgagugacgaauuugaugcaagcaucucccaggucaacgagaagauuaaucagucucucgcuuucauccggaaaucggacgaacuguuacacaacgugaaugccggcaagagcacaaccaacaucaugauuacuaccauaaucauuguuaucauugugauccugcuaucccucauagcggucggccugcuuuuguauugcaaggcccgcugaggacuaguacuggcugcaucucccuuuccucuguccuccauccuucucccaggauggugaagggggaccugguacccagugauccccaccccaggauccuaaaucaugacuuaccugcuaauaaaaacucauuggaaaagugagaagaucuaaaaaaaaaaaaaaaaaaaaaaaaaaaaaaaaaaaaaaaaaaaaaaaaaaaaaaaaaaaaaaaaugcaucccccccccccccccccccccccccccccccaaaggcucuuuucagagccaccagaauu

SEQ ID NO: 3734 - RNA, 1893 nt, Artificial Sequence
  mRNA product Design f-5 comprising derived and/or modified sequence from HRSV(A2)__F-del_DSCav1_mut3 (opt4)
gggagacuuucccauucuguagcagaauuugguguugccuguggucuuggucccgcggagaagcuuaccauggagcugcugauccugaaggccaacgccaucaccaccauccugaccgccgugaccuucugcuucgccagcggccagaacaucaccgaggaguucuaccagagcaccugcagcgccgugagcaagggcuaccugggcgcccugagaaccggcugguacaccagcgugaucaccaucgagcugagcaacaucaaggagaucaagugcaacggcaccgacgccaaggugaagcugaucaagcaggagcuggacaaguacaagaacgccgugaccgaccugcagcugcugaugcagagcacccccgccaccggcagcggcagcgccaucugcagcggcguggccgugugcaaggugcugcaccuggagggcgaggugaacaagaucaagagcgcccugcugagcaccaacaaggccguggugagccugagcaacggcgugagcgugcugaccuucaaggugcuggaccugaagaacuacaucgacaagcagcugcugcccauccugaacaagcagagcugcagcauccccaacaucgagaccgugaucgaguuccagcagaagaacaacagacugcuggagaucaccagagaguucagcgugaacgccggcgugaccacccccgugagcaccuacaugcugaccaacagcgagcugcugagccugaucaacgacaugcccaucaccaacgaccagaagaagcugaugagcaacaacgugcagaucgugagacagcagagcuacagcaucaugugcaucaucaaggaggaggugcuggccuacguggugcagcugccccuguacggcgugaucgacacccccugcuggaagcugcacaccagcccccugugcaccaccaacaccaaggagggcagcaacaucugccugaccagaaccgacagaggcugguacugcgacaacgccggcagcgugagcuucuucccccaggccgagaccugcaaggugcagagcaacagaguguucugcgacaccaugaacagccugacccugcccagcgaggugaaccugugcaacguggacaucuucaaccccaaguacgacugcaagaucaugaccagcaagaccgacgugagcagcagcgugaucaccagccugggcgccaucgugagcugcuacggcaagaccaagugcaccgccagcaacaagaacagaggcaucaucaagaccuucagcaacggcugcgacuacgugagcaacaagggcguggacaccgugagcgugggcaacacccuguacugcgugaacaagcaggagggccagagccuguacgugaagggcgagcccaucaucaacuucuacgacccccugguguuccccagcgacgaguucgacgccagcaucagccaggugaacgagaagaucaaccagagccuggccuucaucagaaagagcgacgagcugcugcacaacgugaacgccggcaagagcaccaccaacaucaugaucaccaccaucaucaucgugaucaucgugauccugcugagccugaucgccgugggccugcugcuguacugcaaggccagaugaggacuaguacuggcugcaucucccuuuccucuguccuccauccuucucccaggauggugaagggggaccugguacccagugauccccaccccaggauccuaaaucaugacuuaccugcuaauaaaaacucauuggaaaagugagaagaucuaaaaaaaaaaaaaaaaaaaaaaaaaaaaaaaaaaaaaaaaaaaaaaaaaaaaaaaaaaaaaaaaugcaucccccccccccccccccccccccccccccccaaaggcucuuuucagagccaccagaauu

SEQ ID NO: 3735 - RNA, 1893 nt, Artificial Sequence
  mRNA product Design f-5 comprising derived and/or modified sequence from HRSV(A2)__F-del_DSCav1_mut3 (opt5)
gggagacuuucccauucuguagcagaauuugguguugccuguggucuuggucccgcggagaagcuuaccauggagcugcucauccugaaggccaacgcuauuaccacaauccuuacggccgugaccuucugcuuugcgagcggccagaauauuacagaagaguucuaccaauccaccuguucugcugucagcaaaggguaucugggagcccucagaacaggcugguacaccuccguuaucacaauugaacugucuaacaucaaggagaucaaaugcaaugggaccgacgccaaggugaaacuuauuaagcaggaacuggauaaguauaaaaacgcugugacggaccuccagcugcugaugcagagcacccccgccacaggauccggcucugcuaucuguagcggggucgccgugugcaagguucuccaccuggagggagaggugaauaaaauuaaguccgcgcuucugagcaccaacaaagccgucgugucucucuccaauggcguuagcgugcugacauuuaagguccuugaucugaagaacuacaucgacaaacaacuccugccuauucugaauaagcagucuuguuccaucccgaacauugaaaccgugaucgaguuccagcagaaaaauaaccggcuccuggaaaucacgcgcgaguuuagcgugaaugcuggcgucacaacccccguuucuacauauaugcuuaccaacuccgagcugcucagccugauuaaugauaugccuaucaccaacgaccaaaagaaacuuauguccaacaaugugcagauugugagacagcagucuuacagcaucaugugcauuaucaaggaagagguccuggccuaugugguucaacucccccuguacggggugaucgauacaccuuguuggaaacugcauacgagcccccucugcaccacaaacaccaaggaaggauccaauauuugucugacacggaccgaccgcggcugguacugcgauaacgcugggucugucuccuucuuuccucaggccgagacguguaaggugcagagcaauagaguuuucugcgacacaaugaacucucuuacccugccgagcgaagugaaucucugcaacgucgauaucuuuaaucccaaauaugacuguaagauuaugaccuccaaaacagaugugucuagcuccgucaucaccagccugggagcgauugugucuugcuacggcaagacaaaauguacggccuccaacaagaaucgggggaucaucaagaccuucagcaacggaugcgacuauguuucuaauaaaggcguggacacagucuccgugggcaacacccuuuacuguguuaauaagcaagaggggcagagccuguaugugaaaggagagccuauuaucaacuuuuacgauccccucgucuucccuuccgacgaauuugaugcuucuauuagccaggugaacgagaagaucaaucagucccuggccuucauucgcaaaucugacgaacugcuccacaacgugaaugcuggcaagagcacaaccaacaucaugauuacgaccaucaucauuguuaucauugucauccugcuuucccugauugccguggggcuccugcuguauugcaaggccagaugaggacuaguacuggcugcaucucccuuuccucuguccuccauccuucucccaggauggugaagggggaccugguacccagugauccccaccccaggauccuaaaucaugacuuaccugcuaauaaaaacucauuggaaaagugagaagaucuaaaaaaaaaaaaaaaaaaaaaaaaaaaaaaaaaaaaaaaaaaaaaaaaaaaaaaaaaaaaaaaaugcaucccccccccccccccccccccccccccccccaaaggcucuuuucagagccaccagaauu

SEQ ID NO: 3736 - RNA, 1893 nt, Artificial Sequence
  mRNA product Design f-5 comprising derived and/or modified sequence from HRSV(A2)__F-del_DSCav1_mut3 (opt6)
gggagacuuucccauucuguagcagaauuugguguugccuguggucuuggucccgcggagaagcuuaccauggaauuacuaauccugaaagcaaacgcaauuacuacaauacuaacagcaguaaccuuuugcuuugccucaggacaaaacauaacugaagaauuuuaccaaucaacuugcucagcagucucaaaaggcuaucuaggagcacuacgaacagguugguauacuucagucauaacaauagaauuaucaaacauaaaagaaauuaaauguaacggaacugacgcaaaaguaaaacucaucaaacaagaacucgauaaauacaaaaacgcuguaaccgacuuacaacuacuaaugcaaucaacuccagcaacaggcuccggauccgcaauaugcagugguguagcaguaugcaaaguccuacaccuagaaggagaaguaaauaagauaaaaucugcucuacuaucaacaaauaaagcaguugucucccuaucaaauggagucucaguacucaccuucaaaguauuagaccucaaaaacuacauagacaaacaacuauuaccaauacucaacaaacaauccugcuccaucccuaacauagaaaccguaaucgaauuucaacaaaaaaauaacagacucuuagaaauaacuagagaauuuucaguuaaugcaggcgugacaacaccaguaucaacauauaugcuaacaaacuccgaacuccuaucccuaauaaacgacaugccaaucacaaacgaccaaaaaaaacuaauguccaacaacguacaaaucguaagacaacaaucauacucuauaaugugcauaauaaaagaagaaguacuggccuacguaguacaauuaccacucuacggaguaauagacaccccaugcuggaaacuccauacaucaccccuaugcacaacaaacacaaaagaaggauccaacauaugucucacuagaacagacagaggcugguacugcgacaacgcuggauccgucucauucuucccccaagcagaaacauguaaaguacaaucuaauagaguauuuugugacacaaugaacagccucacacuaccauccgaagucaaccuauguaacguagauauauuuaaucccaaauacgacugcaaaauaaugacauccaaaacagauguaucaucauccguuaucaccucacuaggagccauaguuucaugcuacggaaaaacaaaaugcacugcaucuaacaaaaauagagguauaauaaaaacauuuuccaacggcugcgacuacgucucaaacaaaggcguagacaccguaucaguaggaaauacauuauauugcguaaauaaacaagaaggccaaucccuauacguaaaaggagaacccaucauaaacuucuaugacccacuuguuuuccccucagacgaauuugacgccucaauaucacaaguaaaugaaaaaauaaaccaaucucuugccuucauuagaaaaucagacgaauuacuacacaacgucaacgcaggaaaaucaacaacaaacaucaugauaacaacgauaauaauagucauaauaguaauacuacuaucauuaaucgcagucggacuccuauuauauugcaaagcuagauaaggacuaguacuggcugcaucucccuuuccucuguccuccauccuucucccaggauggugaagggggaccugguacccagugauccccaccccaggauccuaaaucaugacuuaccugcuaauaaaaacucauuggaaaagugagaagaucuaaaaaaaaaaaaaaaaaaaaaaaaaaaaaaaaaaaaaaaaaaaaaaaaaaaaaaaaaaaaaaaaugcaucccccccccccccccccccccccccccccccaaaggcucuuuucagagccaccagaauu

SEQ ID NO: 3737 - RNA, 1893 nt, Artificial Sequence
  mRNA product Design f-5 comprising derived and/or modified sequence from HRSV(A2)__F-del_DSCav1_mut3 (opt11)
gggagacuuucccauucuguagcagaauuugguguugccuguggucuuggucccgcggagaagcuuaccauggaacuacucauacuaaaagccaacgccauaaccaccauccucaccgcaguaacuuucugcuucgcuuccggccaaaacaucaccgaagaauuuuaccaaaguaccugcagcgcagucucaaaaggauaccuaggcgcccuacgcacaggcugguacaccuccgucauuaccaucgaacucuccaacaucaaagaaauuaaaugcaacgguacagacgcaaaagucaaacucaucaaacaagaacucgacaaauacaaaaacgcagucaccgaccuccaacuccucaugcaauccacccccgccacaggcucuggcuccgccaucugcucaggcguagcagucugcaaaguccugcaccucgaaggcgaagucaacaaaaucaagucagcccuccucuccaccaacaaggccgucguaucccucucaaacggaguuagcguccucaccuucaaaguccuagaccucaaaaacuacaucgauaaacaacuacuccccauccuaaacaaacaaucaugcuccaucccaaacaucgaaaccguaaucgaguuccaacaaaagaacaaccgccuccucgaaaucacacgugaguucuccguuaacgccggcgucaccacccccgucucuacauacaugcucaccaacuccgaacuccuuucccucaucaacgacaugccaaucaccaacgaccaaaagaaacucaugucaaacaacguacaaaucguccgacaacaaagcuacuccaucaugugcaucaucaaagaagaaguccuugcauacgucguucaacuaccccucuacggcguaaucgacacucccugcuggaaacuccacaccuccccgcucugcacaaccaacaccaaagaaggcagcaacaucugccucacccgaaccgaccgcggcugguacugcgauaacgccggauccgucuccuucuucccacaagcagaaacuugcaaaguccaauccaaccgcgucuucugcgacaccaugaacucccucacacuccccuccgaagucaaccugugcaacgucgacaucuucaacccaaaauacgacugcaaaaucaugaccucaaaaaccgacgucucaucuucugucaucaccucucucggcgcuaucgucuccugcuauggcaaaaccaaaugcaccgccuccaacaagaaccgcggcauuaucaagaccuucuccaacggcugcgacuacgucuccaauaagggcgucgacaccgucucugucggcaacacccuuuacugcguaaacaaacaagaaggucaaucucucuacgucaaaggagaacccaucaucaacuucuacgacccccuggucuuccccuccgacgaguucgaugcaucaaucucccaagucaacgaaaagaucaaccaaucucucgcuuucauccgcaaauccgacgaacuccuacacaacguaaacgccggcaaauccaccacaaacaucaugaucaccaccauuaucauagucaucaucgucauccuccucuccuuaaucgccguuggccuccuucucuacugcaaagcccgauaaggacuaguacuggcugcaucucccuuuccucuguccuccauccuucucccaggauggugaagggggaccugguacccagugauccccaccccaggauccuaaaucaugacuuaccugcuaauaaaaacucauuggaaaagugagaagaucuaaaaaaaaaaaaaaaaaaaaaaaaaaaaaaaaaaaaaaaaaaaaaaaaaaaaaaaaaaaaaaaaugcaucccccccccccccccccccccccccccccccaaaggcucuuuucagagccaccagaauu

SEQ ID NO: 3738 - RNA, 1889 nt, Artificial Sequence
  mRNA product Design g-1 comprising derived and/or modified sequence from HRSV(A2)__F-del_DSCav1_mut3 (opt1)
gggagacuuucccauucuguagcagaauuugguguugccuguggucuuggucccgcggagaagcuuaccauggagcugcucauccugaaggccaacgccaucaccaccauccugacggcggugaccuucugcuucgccagcggccagaacaucaccgaggaguucuaccaguccacgugcagcgccgucuccaagggguaccucggcgcccugcggaccggcugguacaccuccgugaucaccaucgagcugagcaacaucaaggagaucaagugcaacgggaccgacgccaaggugaagcucaucaagcaggagcuggacaaguacaagaacgcggucacggaccugcagcuccugaugcaguccaccccggcaaccggcuccggcuccgccaucugcagcggcgucgccgugugcaaggugcugcaccucgagggggaggucaacaagaucaagagcgcccugcuguccaccaacaaggccguggugagccucuccaacggcgucagcgugcugaccuucaaggugcuggaccucaagaacuacaucgacaagcagcugcugcccauccugaacaagcagagcugcuccauccccaacaucgagacggugaucgaguuccagcagaagaacaaccggcuccuggagaucacccgcgaguucagcgugaacgccggggucaccacccccguguccacguacaugcugaccaacagcgagcuccugucccugaucaacgacaugccgaucaccaacgaccagaagaagcucaugagcaacaacgugcagaucguccggcagcaguccuacagcaucaugugcaucaucaaggaggaggugcuggcguacgugguccagcugccccucuacggcgugaucgacacccccugcuggaagcugcacacgagcccccugugcaccaccaacaccaaggagggguccaacaucugccucacgcgcaccgaccggggcugguacugcgacaacgccggcagcgucuccuucuucccgcaggccgagaccugcaaggugcagagcaaccgcguguucugcgacaccaugaacucccugacgcugcccagcgagguaaaccucugcaacgucgacaucuucaaccccaaguacgacugcaagaucaugaccuccaagaccgacgugagcuccagcgugaucaccucccugggggccaucgucagcugcuacggcaagacgaagugcaccgccagcaacaagaaccgggggaucaucaagaccuucuccaacggcugcgacuacgugagcaacaagggcguggacaccguguccgucgggaacacccuguacugcgugaacaagcaggagggccagagccucuacgugaagggggagcccaucaucaacuucuacgacccgcuggucuuccccuccgacgaguucgacgcgagcaucucccaggugaacgagaagaucaaccagagccuggccuucauccgcaaguccgacgagcugcuccacaacgugaacgccggcaagagcacgaccaacaucaugaucaccaccaucaucaucgucaucaucgugauccugcugucccucaucgccguggggcugcugcucuacugcaaggcccggugaggacuaguggaagcauuuuccuggcugauuaaaagaaauuacucagcuauggucaucuguuccuguuagaaggcuaugcagcauauuauauacuaugcgcauguuaugaaaugcauaauaaaaaauuuuaaaaaaucuaaaagaucuaaaaaaaaaaaaaaaaaaaaaaaaaaaaaaaaaaaaaaaaaaaaaaaaaaaaaaaaaaaaaaaaugcaucccccccccccccccccccccccccccccccaaaggcucuuuucagagccaccagaauu

SEQ ID NO: 3739 - RNA, 1889 nt, Artificial Sequence
  mRNA product Design g-1 comprising derived and/or modified sequence from HRSV(A2)__F-del_DSCav1_mut3 (opt1)
gggagacuuucccauucuguagcagaauuugguguugccuguggucuuggucccgcggagaagcuuaccauggagcugcucauccugaaggccaacgccaucaccaccauccugacggcggugaccuucugcuucgccagcggccagaacaucaccgaggaguucuaccaguccacgugcagcgccgucuccaagggguaccucggcgcccugcgcaccgggugguacaccagcgugaucaccaucgagcuguccaacaucaaggagaucaagugcaacggcaccgacgccaaggugaagcucaucaagcaggagcuggacaaguacaagaacgcggucacggaccugcagcuccugaugcagagcacccccgccaccggguccggcagcgccaucugcuccggcguggccgugugcaagguccugcaccucgagggggaggugaacaagaucaagagcgcgcugcuguccaccaacaaggccguggucagccucuccaacggcgugagcgugcugacguucaagguccuggaccucaagaacuacaucgacaagcagcugcugccgauccucaacaagcaguccugcagcauccccaacaucgagaccgugaucgaguuccagcagaagaacaaccggcugcuggagaucacccgcgaguucuccgugaacgccggggucaccacgcccgugagcaccuacaugcucaccaacuccgagcugcugagccucaucaacgacaugcccaucaccaacgaccagaagaagcugaugagcaacaacgugcagaucguccggcagcaguccuacagcaucaugugcaucaucaaggaggaggugcuggccuacgugguccagcucccgcuguacggcgugaucgacacgcccugcuggaagcugcacaccagcccccucugcaccaccaacacgaaggagggguccaacaucugccugacccgcaccgaccggggcugguacugcgacaacgccggcuccgugagcuucuucccccaggcggagaccugcaagguccaguccaaccgcguguucugcgacacgaugaacagccugacccucccguccgaggucaaccugugcaacguggacaucuucaaccccaaguacgacugcaagaucaugaccagcaagaccgacguguccagcuccgucaucacgagccugggggccaucguguccugcuacggcaagaccaagugcaccgccagcaacaagaaccgggggaucaucaagaccuucuccaacggcugcgacuacgugagcaacaagggcgucgacacgguguccguggggaacacccucuacugcgucaacaagcaggagggccagagccuguacgugaagggggagcccaucaucaacuucuacgacccccugguguucccgagcgacgaguucgacgccuccaucagccaggucaacgagaagaucaaccagucccucgccuucauccgcaagagcgacgagcugcugcacaacgugaacgcgggcaaguccaccaccaacaucaugaucaccacgaucaucaucgugaucaucgucauccuccugagccugaucgccguggggcuccugcuguacugcaaggcccggugaggacuaguggaagcauuuuccuggcugauuaaaagaaauuacucagcuauggucaucuguuccuguuagaaggcuaugcagcauauuauauacuaugcgcauguuaugaaaugcauaauaaaaaauuuuaaaaaaucuaaaagaucuaaaaaaaaaaaaaaaaaaaaaaaaaaaaaaaaaaaaaaaaaaaaaaaaaaaaaaaaaaaaaaaaugcaucccccccccccccccccccccccccccccccaaaggcucuuuucagagccaccagaauu

SEQ ID NO: 3740 - RNA, 1889 nt, Artificial Sequence
  mRNA product Design g-1 comprising derived and/or modified sequence from HRSV(A2)__F-del_DSCav1_mut3 (opt2)
gggagacuuucccauucuguagcagaauuugguguugccuguggucuuggucccgcggagaagcuuaccauggagcuccucauccucaaggccaacgccaucaccaccauccucaccgccgucaccuucugcuucgccuccggccagaacaucaccgaggaguucuaccaguccaccugcuccgccgucuccaagggcuaccucggcgcccuccgcaccggcugguacaccuccgucaucaccaucgagcucuccaacaucaaggagaucaagugcaacggcaccgacgccaaggucaagcucaucaagcaggagcucgacaaguacaagaacgccgucaccgaccuccagcuccucaugcaguccacccccgccaccggcuccggcuccgccaucugcuccggcgucgccgucugcaagguccuccaccucgagggcgaggucaacaagaucaaguccgcccuccucuccaccaacaaggccgucgucucccucuccaacggcgucuccguccucaccuucaagguccucgaccucaagaacuacaucgacaagcagcuccuccccauccucaacaagcaguccugcuccauccccaacaucgagaccgucaucgaguuccagcagaagaacaaccgccuccucgagaucacccgcgaguucuccgucaacgccggcgucaccacccccgucuccaccuacaugcucaccaacuccgagcuccucucccucaucaacgacaugcccaucaccaacgaccagaagaagcucauguccaacaacguccagaucguccgccagcaguccuacuccaucaugugcaucaucaaggaggagguccucgccuacgucguccagcucccccucuacggcgucaucgacacccccugcuggaagcuccacaccuccccccucugcaccaccaacaccaaggagggcuccaacaucugccucacccgcaccgaccgcggcugguacugcgacaacgccggcuccgucuccuucuucccccaggccgagaccugcaagguccaguccaaccgcgucuucugcgacaccaugaacucccucacccuccccuccgaggucaaccucugcaacgucgacaucuucaaccccaaguacgacugcaagaucaugaccuccaagaccgacgucuccuccuccgucaucaccucccucggcgccaucgucuccugcuacggcaagaccaagugcaccgccuccaacaagaaccgcggcaucaucaagaccuucuccaacggcugcgacuacgucuccaacaagggcgucgacaccgucuccgucggcaacacccucuacugcgucaacaagcaggagggccagucccucuacgucaagggcgagcccaucaucaacuucuacgacccccucgucuuccccuccgacgaguucgacgccuccaucucccaggucaacgagaagaucaaccagucccucgccuucauccgcaaguccgacgagcuccuccacaacgucaacgccggcaaguccaccaccaacaucaugaucaccaccaucaucaucgucaucaucgucauccuccucucccucaucgccgucggccuccuccucuacugcaaggcccgcugaggacuaguggaagcauuuuccuggcugauuaaaagaaauuacucagcuauggucaucuguuccuguuagaaggcuaugcagcauauuauauacuaugcgcauguuaugaaaugcauaauaaaaaauuuuaaaaaaucuaaaagaucuaaaaaaaaaaaaaaaaaaaaaaaaaaaaaaaaaaaaaaaaaaaaaaaaaaaaaaaaaaaaaaaaugcaucccccccccccccccccccccccccccccccaaaggcucuuuucagagccaccagaauu

SEQ ID NO: 3741 - RNA, 1889 nt, Artificial Sequence
  mRNA product Design g-1 comprising derived and/or modified sequence from HRSV(A2)__F-del_DSCav1_mut3 (opt3)
gggagacuuucccauucuguagcagaauuugguguugccuguggucuuggucccgcggagaagcuuaccauggagcugcucauccuuaaggccaacgcuauuaccacaauacugacugcagugacguucugcuuugccagcggccagaauaucaccgaagaguucuaccaauccacauguucugcggucucaaaaggguauuugggagcuuuaagaacugguugguacaccaguguuauuacaaucgaacugagcaacauuaaggagaucaaaugcaauggcaccgacgccaaggugaaacuaauaaagcaggaacucgauaaguauaaaaacgcaguaacugaccugcagcuucugaugcaguccacacccgccaccgggucuggaucggcuaucuguucaggcguggcagucugcaagguguugcaccucgagggugagguuaauaaaauuaagagcgcccugcugaguacgaacaaagcuguggucucccucucuaauggggugagcguauuaacuuuuaagguucuggaucuuaagaacuacaucgacaaacaauugcugccuauucuaaauaagcaguccuguucaaucccaaacauagaaaccgugauugaguuccagcagaaaaauaacaggcuccuggaaaucacacgggaguuuagugucaaugccggagugacuaccccggugagcacauauaugcuuaccaacucugagcuguugucccucauuaaugauaugcccaucacgaacgaccaaaagaaacugaugucaaacaauguccagaucguucgccagcagagcuacaguauuaugugcauaaucaaggaagagguguuagcguauguagugcaacugccucucuacggcgucauugauacuccauguuggaaacuucauacaucuccccugugcaccacuaacacaaaggaaggcuccaauaucuguuugacccgaacggaccgugggugguacugcgauaacgcaggaagcgugucguucuuuccucaggccgagaccuguaagguucagucuaauagaguguucugcgacacaaugaacucccuaacucugccaucagaagucaaucucugcaacguggauauauuuaaucccaaauaugacuguaagauuaugaccaguaaaacagauguaagcuccucuguuaucacuagccugggugcuaucgugucaugcuacggcaagaccaaauguacagccaguaacaagaauagggggauuaucaagaccuucuccaacggaugcgacuaugucagcaauaaaggcguggacacugucucuguggguaacacgcuuuacuguguuaauaagcaagaggggcagucacuguaugugaaaggagagccuauuauaaacuuuuacgauccauugguauucccgagugacgaauuugaugcaagcaucucccaggucaacgagaagauuaaucagucucucgcuuucauccggaaaucggacgaacuguuacacaacgugaaugccggcaagagcacaaccaacaucaugauuacuaccauaaucauuguuaucauugugauccugcuaucccucauagcggucggccugcuuuuguauugcaaggcccgcugaggacuaguggaagcauuuuccuggcugauuaaaagaaauuacucagcuauggucaucuguuccuguuagaaggcuaugcagcauauuauauacuaugcgcauguuaugaaaugcauaauaaaaaauuuuaaaaaaucuaaaagaucuaaaaaaaaaaaaaaaaaaaaaaaaaaaaaaaaaaaaaaaaaaaaaaaaaaaaaaaaaaaaaaaaugcaucccccccccccccccccccccccccccccccaaaggcucuuuucagagccaccagaauu

SEQ ID NO: 3742 - RNA, 1889 nt, Artificial Sequence
  mRNA product Design g-1 comprising derived and/or modified sequence from HRSV(A2)__F-del_DSCav1_mut3 (opt4)
gggagacuuucccauucuguagcagaauuugguguugccuguggucuuggucccgcggagaagcuuaccauggagcugcugauccugaaggccaacgccaucaccaccauccugaccgccgugaccuucugcuucgccagcggccagaacaucaccgaggaguucuaccagagcaccugcagcgccgugagcaagggcuaccugggcgcccugagaaccggcugguacaccagcgugaucaccaucgagcugagcaacaucaaggagaucaagugcaacggcaccgacgccaaggugaagcugaucaagcaggagcuggacaaguacaagaacgccgugaccgaccugcagcugcugaugcagagcacccccgccaccggcagcggcagcgccaucugcagcggcguggccgugugcaaggugcugcaccuggagggcgaggugaacaagaucaagagcgcccugcugagcaccaacaaggccguggugagccugagcaacggcgugagcgugcugaccuucaaggugcuggaccugaagaacuacaucgacaagcagcugcugcccauccugaacaagcagagcugcagcauccccaacaucgagaccgugaucgaguuccagcagaagaacaacagacugcuggagaucaccagagaguucagcgugaacgccggcgugaccacccccgugagcaccuacaugcugaccaacagcgagcugcugagccugaucaacgacaugcccaucaccaacgaccagaagaagcugaugagcaacaacgugcagaucgugagacagcagagcuacagcaucaugugcaucaucaaggaggaggugcuggccuacguggugcagcugccccuguacggcgugaucgacacccccugcuggaagcugcacaccagcccccugugcaccaccaacaccaaggagggcagcaacaucugccugaccagaaccgacagaggcugguacugcgacaacgccggcagcgugagcuucuucccccaggccgagaccugcaaggugcagagcaacagaguguucugcgacaccaugaacagccugacccugcccagcgaggugaaccugugcaacguggacaucuucaaccccaaguacgacugcaagaucaugaccagcaagaccgacgugagcagcagcgugaucaccagccugggcgccaucgugagcugcuacggcaagaccaagugcaccgccagcaacaagaacagaggcaucaucaagaccuucagcaacggcugcgacuacgugagcaacaagggcguggacaccgugagcgugggcaacacccuguacugcgugaacaagcaggagggccagagccuguacgugaagggcgagcccaucaucaacuucuacgacccccugguguuccccagcgacgaguucgacgccagcaucagccaggugaacgagaagaucaaccagagccuggccuucaucagaaagagcgacgagcugcugcacaacgugaacgccggcaagagcaccaccaacaucaugaucaccaccaucaucaucgugaucaucgugauccugcugagccugaucgccgugggccugcugcuguacugcaaggccagaugaggacuaguggaagcauuuuccuggcugauuaaaagaaauuacucagcuauggucaucuguuccuguuagaaggcuaugcagcauauuauauacuaugcgcauguuaugaaaugcauaauaaaaaauuuuaaaaaaucuaaaagaucuaaaaaaaaaaaaaaaaaaaaaaaaaaaaaaaaaaaaaaaaaaaaaaaaaaaaaaaaaaaaaaaaugcaucccccccccccccccccccccccccccccccaaaggcucuuuucagagccaccagaauu

SEQ ID NO: 3743 - RNA, 1889 nt, Artificial Sequence
  mRNA product Design g-1 comprising derived and/or modified sequence from HRSV(A2)__F-del_DSCav1_mut3 (opt5)
gggagacuuucccauucuguagcagaauuugguguugccuguggucuuggucccgcggagaagcuuaccauggagcugcucauccugaaggccaacgcuauuaccacaauccuuacggccgugaccuucugcuuugcgagcggccagaauauuacagaagaguucuaccaauccaccuguucugcugucagcaaaggguaucugggagcccucagaacaggcugguacaccuccguuaucacaauugaacugucuaacaucaaggagaucaaaugcaaugggaccgacgccaaggugaaacuuauuaagcaggaacuggauaaguauaaaaacgcugugacggaccuccagcugcugaugcagagcacccccgccacaggauccggcucugcuaucuguagcggggucgccgugugcaagguucuccaccuggagggagaggugaauaaaauuaaguccgcgcuucugagcaccaacaaagccgucgugucucucuccaauggcguuagcgugcugacauuuaagguccuugaucugaagaacuacaucgacaaacaacuccugccuauucugaauaagcagucuuguuccaucccgaacauugaaaccgugaucgaguuccagcagaaaaauaaccggcuccuggaaaucacgcgcgaguuuagcgugaaugcuggcgucacaacccccguuucuacauauaugcuuaccaacuccgagcugcucagccugauuaaugauaugccuaucaccaacgaccaaaagaaacuuauguccaacaaugugcagauugugagacagcagucuuacagcaucaugugcauuaucaaggaagagguccuggccuaugugguucaacucccccuguacggggugaucgauacaccuuguuggaaacugcauacgagcccccucugcaccacaaacaccaaggaaggauccaauauuugucugacacggaccgaccgcggcugguacugcgauaacgcugggucugucuccuucuuuccucaggccgagacguguaaggugcagagcaauagaguuuucugcgacacaaugaacucucuuacccugccgagcgaagugaaucucugcaacgucgauaucuuuaaucccaaauaugacuguaagauuaugaccuccaaaacagaugugucuagcuccgucaucaccagccugggagcgauugugucuugcuacggcaagacaaaauguacggccuccaacaagaaucgggggaucaucaagaccuucagcaacggaugcgacuauguuucuaauaaaggcguggacacagucuccgugggcaacacccuuuacuguguuaauaagcaagaggggcagagccuguaugugaaaggagagccuauuaucaacuuuuacgauccccucgucuucccuuccgacgaauuugaugcuucuauuagccaggugaacgagaagaucaaucagucccuggccuucauucgcaaaucugacgaacugcuccacaacgugaaugcuggcaagagcacaaccaacaucaugauuacgaccaucaucauuguuaucauugucauccugcuuucccugauugccguggggcuccugcuguauugcaaggccagaugaggacuaguggaagcauuuuccuggcugauuaaaagaaauuacucagcuauggucaucuguuccuguuagaaggcuaugcagcauauuauauacuaugcgcauguuaugaaaugcauaauaaaaaauuuuaaaaaaucuaaaagaucuaaaaaaaaaaaaaaaaaaaaaaaaaaaaaaaaaaaaaaaaaaaaaaaaaaaaaaaaaaaaaaaaugcaucccccccccccccccccccccccccccccccaaaggcucuuuucagagccaccagaauu

SEQ ID NO: 3744 - RNA, 1889 nt, Artificial Sequence
  mRNA product Design g-1 comprising derived and/or modified sequence from HRSV(A2)__F-del_DSCav1_mut3 (opt6)
gggagacuuucccauucuguagcagaauuugguguugccuguggucuuggucccgcggagaagcuuaccauggaauuacuaauccugaaagcaaacgcaauuacuacaauacuaacagcaguaaccuuuugcuuugccucaggacaaaacauaacugaagaauuuuaccaaucaacuugcucagcagucucaaaaggcuaucuaggagcacuacgaacagguugguauacuucagucauaacaauagaauuaucaaacauaaaagaaauuaaauguaacggaacugacgcaaaaguaaaacucaucaaacaagaacucgauaaauacaaaaacgcuguaaccgacuuacaacuacuaaugcaaucaacuccagcaacaggcuccggauccgcaauaugcagugguguagcaguaugcaaaguccuacaccuagaaggagaaguaaauaagauaaaaucugcucuacuaucaacaaauaaagcaguugucucccuaucaaauggagucucaguacucaccuucaaaguauuagaccucaaaaacuacauagacaaacaacuauuaccaauacucaacaaacaauccugcuccaucccuaacauagaaaccguaaucgaauuucaacaaaaaaauaacagacucuuagaaauaacuagagaauuuucaguuaaugcaggcgugacaacaccaguaucaacauauaugcuaacaaacuccgaacuccuaucccuaauaaacgacaugccaaucacaaacgaccaaaaaaaacuaauguccaacaacguacaaaucguaagacaacaaucauacucuauaaugugcauaauaaaagaagaaguacuggccuacguaguacaauuaccacucuacggaguaauagacaccccaugcuggaaacuccauacaucaccccuaugcacaacaaacacaaaagaaggauccaacauaugucucacuagaacagacagaggcugguacugcgacaacgcuggauccgucucauucuucccccaagcagaaacauguaaaguacaaucuaauagaguauuuugugacacaaugaacagccucacacuaccauccgaagucaaccuauguaacguagauauauuuaaucccaaauacgacugcaaaauaaugacauccaaaacagauguaucaucauccguuaucaccucacuaggagccauaguuucaugcuacggaaaaacaaaaugcacugcaucuaacaaaaauagagguauaauaaaaacauuuuccaacggcugcgacuacgucucaaacaaaggcguagacaccguaucaguaggaaauacauuauauugcguaaauaaacaagaaggccaaucccuauacguaaaaggagaacccaucauaaacuucuaugacccacuuguuuuccccucagacgaauuugacgccucaauaucacaaguaaaugaaaaaauaaaccaaucucuugccuucauuagaaaaucagacgaauuacuacacaacgucaacgcaggaaaaucaacaacaaacaucaugauaacaacgauaauaauagucauaauaguaauacuacuaucauuaaucgcagucggacuccuauuauauugcaaagcuagauaaggacuaguggaagcauuuuccuggcugauuaaaagaaauuacucagcuauggucaucuguuccuguuagaaggcuaugcagcauauuauauacuaugcgcauguuaugaaaugcauaauaaaaaauuuuaaaaaaucuaaaagaucuaaaaaaaaaaaaaaaaaaaaaaaaaaaaaaaaaaaaaaaaaaaaaaaaaaaaaaaaaaaaaaaaugcaucccccccccccccccccccccccccccccccaaaggcucuuuucagagccaccagaauu

SEQ ID NO: 3745 - RNA, 1889 nt, Artificial Sequence
  mRNA product Design g-1 comprising derived and/or modified sequence from HRSV(A2)__F-del_DSCav1_mut3 (opt11)
gggagacuuucccauucuguagcagaauuugguguugccuguggucuuggucccgcggagaagcuuaccauggaacuacucauacuaaaagccaacgccauaaccaccauccucaccgcaguaacuuucugcuucgcuuccggccaaaacaucaccgaagaauuuuaccaaaguaccugcagcgcagucucaaaaggauaccuaggcgcccuacgcacaggcugguacaccuccgucauuaccaucgaacucuccaacaucaaagaaauuaaaugcaacgguacagacgcaaaagucaaacucaucaaacaagaacucgacaaauacaaaaacgcagucaccgaccuccaacuccucaugcaauccacccccgccacaggcucuggcuccgccaucugcucaggcguagcagucugcaaaguccugcaccucgaaggcgaagucaacaaaaucaagucagcccuccucuccaccaacaaggccgucguaucccucucaaacggaguuagcguccucaccuucaaaguccuagaccucaaaaacuacaucgauaaacaacuacuccccauccuaaacaaacaaucaugcuccaucccaaacaucgaaaccguaaucgaguuccaacaaaagaacaaccgccuccucgaaaucacacgugaguucuccguuaacgccggcgucaccacccccgucucuacauacaugcucaccaacuccgaacuccuuucccucaucaacgacaugccaaucaccaacgaccaaaagaaacucaugucaaacaacguacaaaucguccgacaacaaagcuacuccaucaugugcaucaucaaagaagaaguccuugcauacgucguucaacuaccccucuacggcguaaucgacacucccugcuggaaacuccacaccuccccgcucugcacaaccaacaccaaagaaggcagcaacaucugccucacccgaaccgaccgcggcugguacugcgauaacgccggauccgucuccuucuucccacaagcagaaacuugcaaaguccaauccaaccgcgucuucugcgacaccaugaacucccucacacuccccuccgaagucaaccugugcaacgucgacaucuucaacccaaaauacgacugcaaaaucaugaccucaaaaaccgacgucucaucuucugucaucaccucucucggcgcuaucgucuccugcuauggcaaaaccaaaugcaccgccuccaacaagaaccgcggcauuaucaagaccuucuccaacggcugcgacuacgucuccaauaagggcgucgacaccgucucugucggcaacacccuuuacugcguaaacaaacaagaaggucaaucucucuacgucaaaggagaacccaucaucaacuucuacgacccccuggucuuccccuccgacgaguucgaugcaucaaucucccaagucaacgaaaagaucaaccaaucucucgcuuucauccgcaaauccgacgaacuccuacacaacguaaacgccggcaaauccaccacaaacaucaugaucaccaccauuaucauagucaucaucgucauccuccucuccuuaaucgccguuggccuccuucucuacugcaaagcccgauaaggacuaguggaagcauuuuccuggcugauuaaaagaaauuacucagcuauggucaucuguuccuguuagaaggcuaugcagcauauuauauacuaugcgcauguuaugaaaugcauaauaaaaaauuuuaaaaaaucuaaaagaucuaaaaaaaaaaaaaaaaaaaaaaaaaaaaaaaaaaaaaaaaaaaaaaaaaaaaaaaaaaaaaaaaugcaucccccccccccccccccccccccccccccccaaaggcucuuuucagagccaccagaauu

SEQ ID NO: 3746 - RNA, 1904 nt, Artificial Sequence
  mRNA product Design g-2 comprising derived and/or modified sequence from HRSV(A2)__F-del_DSCav1_mut3 (opt1)
gggagaguccgcucagccagguugcagaagcggcuuagcguguguccuaaucuucucucugcguguagguaggccugugccgcaaacaagcuuaccauggagcugcucauccugaaggccaacgccaucaccaccauccugacggcggugaccuucugcuucgccagcggccagaacaucaccgaggaguucuaccaguccacgugcagcgccgucuccaagggguaccucggcgcccugcggaccggcugguacaccuccgugaucaccaucgagcugagcaacaucaaggagaucaagugcaacgggaccgacgccaaggugaagcucaucaagcaggagcuggacaaguacaagaacgcggucacggaccugcagcuccugaugcaguccaccccggcaaccggcuccggcuccgccaucugcagcggcgucgccgugugcaaggugcugcaccucgagggggaggucaacaagaucaagagcgcccugcuguccaccaacaaggccguggugagccucuccaacggcgucagcgugcugaccuucaaggugcuggaccucaagaacuacaucgacaagcagcugcugcccauccugaacaagcagagcugcuccauccccaacaucgagacggugaucgaguuccagcagaagaacaaccggcuccuggagaucacccgcgaguucagcgugaacgccggggucaccacccccguguccacguacaugcugaccaacagcgagcuccugucccugaucaacgacaugccgaucaccaacgaccagaagaagcucaugagcaacaacgugcagaucguccggcagcaguccuacagcaucaugugcaucaucaaggaggaggugcuggcguacgugguccagcugccccucuacggcgugaucgacacccccugcuggaagcugcacacgagcccccugugcaccaccaacaccaaggagggguccaacaucugccucacgcgcaccgaccggggcugguacugcgacaacgccggcagcgucuccuucuucccgcaggccgagaccugcaaggugcagagcaaccgcguguucugcgacaccaugaacucccugacgcugcccagcgagguaaaccucugcaacgucgacaucuucaaccccaaguacgacugcaagaucaugaccuccaagaccgacgugagcuccagcgugaucaccucccugggggccaucgucagcugcuacggcaagacgaagugcaccgccagcaacaagaaccgggggaucaucaagaccuucuccaacggcugcgacuacgugagcaacaagggcguggacaccguguccgucgggaacacccuguacugcgugaacaagcaggagggccagagccucuacgugaagggggagcccaucaucaacuucuacgacccgcuggucuuccccuccgacgaguucgacgcgagcaucucccaggugaacgagaagaucaaccagagccuggccuucauccgcaaguccgacgagcugcuccacaacgugaacgccggcaagagcacgaccaacaucaugaucaccaccaucaucaucgucaucaucgugauccugcugucccucaucgccguggggcugcugcucuacugcaaggcccggugaggacuaguaauaaggaaacuguaugaaugucugugggcaggaagugaagagauccuucuguaaagguuuuuggaauuaugucugcugaauaauaaacuuuuuugaaauaauaaaucugguagaaaaaugagaucuaaaaaaaaaaaaaaaaaaaaaaaaaaaaaaaaaaaaaaaaaaaaaaaaaaaaaaaaaaaaaaaaugcaucccccccccccccccccccccccccccccccaaaggcucuuuucagagccaccagaauu

SEQ ID NO: 3747 - RNA, 1904 nt, Artificial Sequence
  mRNA product Design g-2 comprising derived and/or modified sequence from HRSV(A2)__F-del_DSCav1_mut3 (opt1)
gggagaguccgcucagccagguugcagaagcggcuuagcguguguccuaaucuucucucugcguguagguaggccugugccgcaaacaagcuuaccauggagcugcucauccugaaggccaacgccaucaccaccauccugacggcggugaccuucugcuucgccagcggccagaacaucaccgaggaguucuaccaguccacgugcagcgccgucuccaagggguaccucggcgcccugcgcaccgggugguacaccagcgugaucaccaucgagcuguccaacaucaaggagaucaagugcaacggcaccgacgccaaggugaagcucaucaagcaggagcuggacaaguacaagaacgcggucacggaccugcagcuccugaugcagagcacccccgccaccggguccggcagcgccaucugcuccggcguggccgugugcaagguccugcaccucgagggggaggugaacaagaucaagagcgcgcugcuguccaccaacaaggccguggucagccucuccaacggcgugagcgugcugacguucaagguccuggaccucaagaacuacaucgacaagcagcugcugccgauccucaacaagcaguccugcagcauccccaacaucgagaccgugaucgaguuccagcagaagaacaaccggcugcuggagaucacccgcgaguucuccgugaacgccggggucaccacgcccgugagcaccuacaugcucaccaacuccgagcugcugagccucaucaacgacaugcccaucaccaacgaccagaagaagcugaugagcaacaacgugcagaucguccggcagcaguccuacagcaucaugugcaucaucaaggaggaggugcuggccuacgugguccagcucccgcuguacggcgugaucgacacgcccugcuggaagcugcacaccagcccccucugcaccaccaacacgaaggagggguccaacaucugccugacccgcaccgaccggggcugguacugcgacaacgccggcuccgugagcuucuucccccaggcggagaccugcaagguccaguccaaccgcguguucugcgacacgaugaacagccugacccucccguccgaggucaaccugugcaacguggacaucuucaaccccaaguacgacugcaagaucaugaccagcaagaccgacguguccagcuccgucaucacgagccugggggccaucguguccugcuacggcaagaccaagugcaccgccagcaacaagaaccgggggaucaucaagaccuucuccaacggcugcgacuacgugagcaacaagggcgucgacacgguguccguggggaacacccucuacugcgucaacaagcaggagggccagagccuguacgugaagggggagcccaucaucaacuucuacgacccccugguguucccgagcgacgaguucgacgccuccaucagccaggucaacgagaagaucaaccagucccucgccuucauccgcaagagcgacgagcugcugcacaacgugaacgcgggcaaguccaccaccaacaucaugaucaccacgaucaucaucgugaucaucgucauccuccugagccugaucgccguggggcuccugcuguacugcaaggcccggugaggacuaguaauaaggaaacuguaugaaugucugugggcaggaagugaagagauccuucuguaaagguuuuuggaauuaugucugcugaauaauaaacuuuuuugaaauaauaaaucugguagaaaaaugagaucuaaaaaaaaaaaaaaaaaaaaaaaaaaaaaaaaaaaaaaaaaaaaaaaaaaaaaaaaaaaaaaaaugcaucccccccccccccccccccccccccccccccaaaggcucuuuucagagccaccagaauu

SEQ ID NO: 3748 - RNA, 1904 nt, Artificial Sequence
  mRNA product Design g-2 comprising derived and/or modified sequence from HRSV(A2)__F-del_DSCav1_mut3 (opt2)
gggagaguccgcucagccagguugcagaagcggcuuagcguguguccuaaucuucucucugcguguagguaggccugugccgcaaacaagcuuaccauggagcuccucauccucaaggccaacgccaucaccaccauccucaccgccgucaccuucugcuucgccuccggccagaacaucaccgaggaguucuaccaguccaccugcuccgccgucuccaagggcuaccucggcgcccuccgcaccggcugguacaccuccgucaucaccaucgagcucuccaacaucaaggagaucaagugcaacggcaccgacgccaaggucaagcucaucaagcaggagcucgacaaguacaagaacgccgucaccgaccuccagcuccucaugcaguccacccccgccaccggcuccggcuccgccaucugcuccggcgucgccgucugcaagguccuccaccucgagggcgaggucaacaagaucaaguccgcccuccucuccaccaacaaggccgucgucucccucuccaacggcgucuccguccucaccuucaagguccucgaccucaagaacuacaucgacaagcagcuccuccccauccucaacaagcaguccugcuccauccccaacaucgagaccgucaucgaguuccagcagaagaacaaccgccuccucgagaucacccgcgaguucuccgucaacgccggcgucaccacccccgucuccaccuacaugcucaccaacuccgagcuccucucccucaucaacgacaugcccaucaccaacgaccagaagaagcucauguccaacaacguccagaucguccgccagcaguccuacuccaucaugugcaucaucaaggaggagguccucgccuacgucguccagcucccccucuacggcgucaucgacacccccugcuggaagcuccacaccuccccccucugcaccaccaacaccaaggagggcuccaacaucugccucacccgcaccgaccgcggcugguacugcgacaacgccggcuccgucuccuucuucccccaggccgagaccugcaagguccaguccaaccgcgucuucugcgacaccaugaacucccucacccuccccuccgaggucaaccucugcaacgucgacaucuucaaccccaaguacgacugcaagaucaugaccuccaagaccgacgucuccuccuccgucaucaccucccucggcgccaucgucuccugcuacggcaagaccaagugcaccgccuccaacaagaaccgcggcaucaucaagaccuucuccaacggcugcgacuacgucuccaacaagggcgucgacaccgucuccgucggcaacacccucuacugcgucaacaagcaggagggccagucccucuacgucaagggcgagcccaucaucaacuucuacgacccccucgucuuccccuccgacgaguucgacgccuccaucucccaggucaacgagaagaucaaccagucccucgccuucauccgcaaguccgacgagcuccuccacaacgucaacgccggcaaguccaccaccaacaucaugaucaccaccaucaucaucgucaucaucgucauccuccucucccucaucgccgucggccuccuccucuacugcaaggcccgcugaggacuaguaauaaggaaacuguaugaaugucugugggcaggaagugaagagauccuucuguaaagguuuuuggaauuaugucugcugaauaauaaacuuuuuugaaauaauaaaucugguagaaaaaugagaucuaaaaaaaaaaaaaaaaaaaaaaaaaaaaaaaaaaaaaaaaaaaaaaaaaaaaaaaaaaaaaaaaugcaucccccccccccccccccccccccccccccccaaaggcucuuuucagagccaccagaauu

SEQ ID NO: 3749 - RNA, 1904 nt, Artificial Sequence
  mRNA product Design g-2 comprising derived and/or modified sequence from HRSV(A2)__F-del_DSCav1_mut3 (opt3)
gggagaguccgcucagccagguugcagaagcggcuuagcguguguccuaaucuucucucugcguguagguaggccugugccgcaaacaagcuuaccauggagcugcucauccuuaaggccaacgcuauuaccacaauacugacugcagugacguucugcuuugccagcggccagaauaucaccgaagaguucuaccaauccacauguucugcggucucaaaaggguauuugggagcuuuaagaacugguugguacaccaguguuauuacaaucgaacugagcaacauuaaggagaucaaaugcaauggcaccgacgccaaggugaaacuaauaaagcaggaacucgauaaguauaaaaacgcaguaacugaccugcagcuucugaugcaguccacacccgccaccgggucuggaucggcuaucuguucaggcguggcagucugcaagguguugcaccucgagggugagguuaauaaaauuaagagcgcccugcugaguacgaacaaagcuguggucucccucucuaauggggugagcguauuaacuuuuaagguucuggaucuuaagaacuacaucgacaaacaauugcugccuauucuaaauaagcaguccuguucaaucccaaacauagaaaccgugauugaguuccagcagaaaaauaacaggcuccuggaaaucacacgggaguuuagugucaaugccggagugacuaccccggugagcacauauaugcuuaccaacucugagcuguugucccucauuaaugauaugcccaucacgaacgaccaaaagaaacugaugucaaacaauguccagaucguucgccagcagagcuacaguauuaugugcauaaucaaggaagagguguuagcguauguagugcaacugccucucuacggcgucauugauacuccauguuggaaacuucauacaucuccccugugcaccacuaacacaaaggaaggcuccaauaucuguuugacccgaacggaccgugggugguacugcgauaacgcaggaagcgugucguucuuuccucaggccgagaccuguaagguucagucuaauagaguguucugcgacacaaugaacucccuaacucugccaucagaagucaaucucugcaacguggauauauuuaaucccaaauaugacuguaagauuaugaccaguaaaacagauguaagcuccucuguuaucacuagccugggugcuaucgugucaugcuacggcaagaccaaauguacagccaguaacaagaauagggggauuaucaagaccuucuccaacggaugcgacuaugucagcaauaaaggcguggacacugucucuguggguaacacgcuuuacuguguuaauaagcaagaggggcagucacuguaugugaaaggagagccuauuauaaacuuuuacgauccauugguauucccgagugacgaauuugaugcaagcaucucccaggucaacgagaagauuaaucagucucucgcuuucauccggaaaucggacgaacuguuacacaacgugaaugccggcaagagcacaaccaacaucaugauuacuaccauaaucauuguuaucauugugauccugcuaucccucauagcggucggccugcuuuuguauugcaaggcccgcugaggacuaguaauaaggaaacuguaugaaugucugugggcaggaagugaagagauccuucuguaaagguuuuuggaauuaugucugcugaauaauaaacuuuuuugaaauaauaaaucugguagaaaaaugagaucuaaaaaaaaaaaaaaaaaaaaaaaaaaaaaaaaaaaaaaaaaaaaaaaaaaaaaaaaaaaaaaaaugcaucccccccccccccccccccccccccccccccaaaggcucuuuucagagccaccagaauu

SEQ ID NO: 3750 - RNA, 1904 nt, Artificial Sequence
  mRNA product Design g-2 comprising derived and/or modified sequence from HRSV(A2)__F-del_DSCav1_mut3 (opt4)
gggagaguccgcucagccagguugcagaagcggcuuagcguguguccuaaucuucucucugcguguagguaggccugugccgcaaacaagcuuaccauggagcugcugauccugaaggccaacgccaucaccaccauccugaccgccgugaccuucugcuucgccagcggccagaacaucaccgaggaguucuaccagagcaccugcagcgccgugagcaagggcuaccugggcgcccugagaaccggcugguacaccagcgugaucaccaucgagcugagcaacaucaaggagaucaagugcaacggcaccgacgccaaggugaagcugaucaagcaggagcuggacaaguacaagaacgccgugaccgaccugcagcugcugaugcagagcacccccgccaccggcagcggcagcgccaucugcagcggcguggccgugugcaaggugcugcaccuggagggcgaggugaacaagaucaagagcgcccugcugagcaccaacaaggccguggugagccugagcaacggcgugagcgugcugaccuucaaggugcuggaccugaagaacuacaucgacaagcagcugcugcccauccugaacaagcagagcugcagcauccccaacaucgagaccgugaucgaguuccagcagaagaacaacagacugcuggagaucaccagagaguucagcgugaacgccggcgugaccacccccgugagcaccuacaugcugaccaacagcgagcugcugagccugaucaacgacaugcccaucaccaacgaccagaagaagcugaugagcaacaacgugcagaucgugagacagcagagcuacagcaucaugugcaucaucaaggaggaggugcuggccuacguggugcagcugccccuguacggcgugaucgacacccccugcuggaagcugcacaccagcccccugugcaccaccaacaccaaggagggcagcaacaucugccugaccagaaccgacagaggcugguacugcgacaacgccggcagcgugagcuucuucccccaggccgagaccugcaaggugcagagcaacagaguguucugcgacaccaugaacagccugacccugcccagcgaggugaaccugugcaacguggacaucuucaaccccaaguacgacugcaagaucaugaccagcaagaccgacgugagcagcagcgugaucaccagccugggcgccaucgugagcugcuacggcaagaccaagugcaccgccagcaacaagaacagaggcaucaucaagaccuucagcaacggcugcgacuacgugagcaacaagggcguggacaccgugagcgugggcaacacccuguacugcgugaacaagcaggagggccagagccuguacgugaagggcgagcccaucaucaacuucuacgacccccugguguuccccagcgacgaguucgacgccagcaucagccaggugaacgagaagaucaaccagagccuggccuucaucagaaagagcgacgagcugcugcacaacgugaacgccggcaagagcaccaccaacaucaugaucaccaccaucaucaucgugaucaucgugauccugcugagccugaucgccgugggccugcugcuguacugcaaggccagaugaggacuaguaauaaggaaacuguaugaaugucugugggcaggaagugaagagauccuucuguaaagguuuuuggaauuaugucugcugaauaauaaacuuuuuugaaauaauaaaucugguagaaaaaugagaucuaaaaaaaaaaaaaaaaaaaaaaaaaaaaaaaaaaaaaaaaaaaaaaaaaaaaaaaaaaaaaaaaugcaucccccccccccccccccccccccccccccccaaaggcucuuuucagagccaccagaauu

SEQ ID NO: 3751 - RNA, 1904 nt, Artificial Sequence
  mRNA product Design g-2 comprising derived and/or modified sequence from HRSV(A2)__F-del_DSCav1_mut3 (opt5)
gggagaguccgcucagccagguugcagaagcggcuuagcguguguccuaaucuucucucugcguguagguaggccugugccgcaaacaagcuuaccauggagcugcucauccugaaggccaacgcuauuaccacaauccuuacggccgugaccuucugcuuugcgagcggccagaauauuacagaagaguucuaccaauccaccuguucugcugucagcaaaggguaucugggagcccucagaacaggcugguacaccuccguuaucacaauugaacugucuaacaucaaggagaucaaaugcaaugggaccgacgccaaggugaaacuuauuaagcaggaacuggauaaguauaaaaacgcugugacggaccuccagcugcugaugcagagcacccccgccacaggauccggcucugcuaucuguagcggggucgccgugugcaagguucuccaccuggagggagaggugaauaaaauuaaguccgcgcuucugagcaccaacaaagccgucgugucucucuccaauggcguuagcgugcugacauuuaagguccuugaucugaagaacuacaucgacaaacaacuccugccuauucugaauaagcagucuuguuccaucccgaacauugaaaccgugaucgaguuccagcagaaaaauaaccggcuccuggaaaucacgcgcgaguuuagcgugaaugcuggcgucacaacccccguuucuacauauaugcuuaccaacuccgagcugcucagccugauuaaugauaugccuaucaccaacgaccaaaagaaacuuauguccaacaaugugcagauugugagacagcagucuuacagcaucaugugcauuaucaaggaagagguccuggccuaugugguucaacucccccuguacggggugaucgauacaccuuguuggaaacugcauacgagcccccucugcaccacaaacaccaaggaaggauccaauauuugucugacacggaccgaccgcggcugguacugcgauaacgcugggucugucuccuucuuuccucaggccgagacguguaaggugcagagcaauagaguuuucugcgacacaaugaacucucuuacccugccgagcgaagugaaucucugcaacgucgauaucuuuaaucccaaauaugacuguaagauuaugaccuccaaaacagaugugucuagcuccgucaucaccagccugggagcgauugugucuugcuacggcaagacaaaauguacggccuccaacaagaaucgggggaucaucaagaccuucagcaacggaugcgacuauguuucuaauaaaggcguggacacagucuccgugggcaacacccuuuacuguguuaauaagcaagaggggcagagccuguaugugaaaggagagccuauuaucaacuuuuacgauccccucgucuucccuuccgacgaauuugaugcuucuauuagccaggugaacgagaagaucaaucagucccuggccuucauucgcaaaucugacgaacugcuccacaacgugaaugcuggcaagagcacaaccaacaucaugauuacgaccaucaucauuguuaucauugucauccugcuuucccugauugccguggggcuccugcuguauugcaaggccagaugaggacuaguaauaaggaaacuguaugaaugucugugggcaggaagugaagagauccuucuguaaagguuuuuggaauuaugucugcugaauaauaaacuuuuuugaaauaauaaaucugguagaaaaaugagaucuaaaaaaaaaaaaaaaaaaaaaaaaaaaaaaaaaaaaaaaaaaaaaaaaaaaaaaaaaaaaaaaaugcaucccccccccccccccccccccccccccccccaaaggcucuuuucagagccaccagaauu

SEQ ID NO: 3752 - RNA, 1904 nt, Artificial Sequence
  mRNA product Design g-2 comprising derived and/or modified sequence from HRSV(A2)__F-del_DSCav1_mut3 (opt6)
gggagaguccgcucagccagguugcagaagcggcuuagcguguguccuaaucuucucucugcguguagguaggccugugccgcaaacaagcuuaccauggaauuacuaauccugaaagcaaacgcaauuacuacaauacuaacagcaguaaccuuuugcuuugccucaggacaaaacauaacugaagaauuuuaccaaucaacuugcucagcagucucaaaaggcuaucuaggagcacuacgaacagguugguauacuucagucauaacaauagaauuaucaaacauaaaagaaauuaaauguaacggaacugacgcaaaaguaaaacucaucaaacaagaacucgauaaauacaaaaacgcuguaaccgacuuacaacuacuaaugcaaucaacuccagcaacaggcuccggauccgcaauaugcagugguguagcaguaugcaaaguccuacaccuagaaggagaaguaaauaagauaaaaucugcucuacuaucaacaaauaaagcaguugucucccuaucaaauggagucucaguacucaccuucaaaguauuagaccucaaaaacuacauagacaaacaacuauuaccaauacucaacaaacaauccugcuccaucccuaacauagaaaccguaaucgaauuucaacaaaaaaauaacagacucuuagaaauaacuagagaauuuucaguuaaugcaggcgugacaacaccaguaucaacauauaugcuaacaaacuccgaacuccuaucccuaauaaacgacaugccaaucacaaacgaccaaaaaaaacuaauguccaacaacguacaaaucguaagacaacaaucauacucuauaaugugcauaauaaaagaagaaguacuggccuacguaguacaauuaccacucuacggaguaauagacaccccaugcuggaaacuccauacaucaccccuaugcacaacaaacacaaaagaaggauccaacauaugucucacuagaacagacagaggcugguacugcgacaacgcuggauccgucucauucuucccccaagcagaaacauguaaaguacaaucuaauagaguauuuugugacacaaugaacagccucacacuaccauccgaagucaaccuauguaacguagauauauuuaaucccaaauacgacugcaaaauaaugacauccaaaacagauguaucaucauccguuaucaccucacuaggagccauaguuucaugcuacggaaaaacaaaaugcacugcaucuaacaaaaauagagguauaauaaaaacauuuuccaacggcugcgacuacgucucaaacaaaggcguagacaccguaucaguaggaaauacauuauauugcguaaauaaacaagaaggccaaucccuauacguaaaaggagaacccaucauaaacuucuaugacccacuuguuuuccccucagacgaauuugacgccucaauaucacaaguaaaugaaaaaauaaaccaaucucuugccuucauuagaaaaucagacgaauuacuacacaacgucaacgcaggaaaaucaacaacaaacaucaugauaacaacgauaauaauagucauaauaguaauacuacuaucauuaaucgcagucggacuccuauuauauugcaaagcuagauaaggacuaguaauaaggaaacuguaugaaugucugugggcaggaagugaagagauccuucuguaaagguuuuuggaauuaugucugcugaauaauaaacuuuuuugaaauaauaaaucugguagaaaaaugagaucuaaaaaaaaaaaaaaaaaaaaaaaaaaaaaaaaaaaaaaaaaaaaaaaaaaaaaaaaaaaaaaaaugcaucccccccccccccccccccccccccccccccaaaggcucuuuucagagccaccagaauu

SEQ ID NO: 3753 - RNA, 1904 nt, Artificial Sequence
  mRNA product Design g-2 comprising derived and/or modified sequence from HRSV(A2)__F-del_DSCav1_mut3 (opt11)
gggagaguccgcucagccagguugcagaagcggcuuagcguguguccuaaucuucucucugcguguagguaggccugugccgcaaacaagcuuaccauggaacuacucauacuaaaagccaacgccauaaccaccauccucaccgcaguaacuuucugcuucgcuuccggccaaaacaucaccgaagaauuuuaccaaaguaccugcagcgcagucucaaaaggauaccuaggcgcccuacgcacaggcugguacaccuccgucauuaccaucgaacucuccaacaucaaagaaauuaaaugcaacgguacagacgcaaaagucaaacucaucaaacaagaacucgacaaauacaaaaacgcagucaccgaccuccaacuccucaugcaauccacccccgccacaggcucuggcuccgccaucugcucaggcguagcagucugcaaaguccugcaccucgaaggcgaagucaacaaaaucaagucagcccuccucuccaccaacaaggccgucguaucccucucaaacggaguuagcguccucaccuucaaaguccuagaccucaaaaacuacaucgauaaacaacuacuccccauccuaaacaaacaaucaugcuccaucccaaacaucgaaaccguaaucgaguuccaacaaaagaacaaccgccuccucgaaaucacacgugaguucuccguuaacgccggcgucaccacccccgucucuacauacaugcucaccaacuccgaacuccuuucccucaucaacgacaugccaaucaccaacgaccaaaagaaacucaugucaaacaacguacaaaucguccgacaacaaagcuacuccaucaugugcaucaucaaagaagaaguccuugcauacgucguucaacuaccccucuacggcguaaucgacacucccugcuggaaacuccacaccuccccgcucugcacaaccaacaccaaagaaggcagcaacaucugccucacccgaaccgaccgcggcugguacugcgauaacgccggauccgucuccuucuucccacaagcagaaacuugcaaaguccaauccaaccgcgucuucugcgacaccaugaacucccucacacuccccuccgaagucaaccugugcaacgucgacaucuucaacccaaaauacgacugcaaaaucaugaccucaaaaaccgacgucucaucuucugucaucaccucucucggcgcuaucgucuccugcuauggcaaaaccaaaugcaccgccuccaacaagaaccgcggcauuaucaagaccuucuccaacggcugcgacuacgucuccaauaagggcgucgacaccgucucugucggcaacacccuuuacugcguaaacaaacaagaaggucaaucucucuacgucaaaggagaacccaucaucaacuucuacgacccccuggucuuccccuccgacgaguucgaugcaucaaucucccaagucaacgaaaagaucaaccaaucucucgcuuucauccgcaaauccgacgaacuccuacacaacguaaacgccggcaaauccaccacaaacaucaugaucaccaccauuaucauagucaucaucgucauccuccucuccuuaaucgccguuggccuccuucucuacugcaaagcccgauaaggacuaguaauaaggaaacuguaugaaugucugugggcaggaagugaagagauccuucuguaaagguuuuuggaauuaugucugcugaauaauaaacuuuuuugaaauaauaaaucugguagaaaaaugagaucuaaaaaaaaaaaaaaaaaaaaaaaaaaaaaaaaaaaaaaaaaaaaaaaaaaaaaaaaaaaaaaaaugcaucccccccccccccccccccccccccccccccaaaggcucuuuucagagccaccagaauu

SEQ ID NO: 3754 - RNA, 2136 nt, Artificial Sequence
  mRNA product Design g-3 comprising derived and/or modified sequence from HRSV(A2)__F-del_DSCav1_mut3 (opt1)
gggagaguccgcucagccagguugcagaagcggcuuagcguguguccuaaucuucucucugcguguagguaggccugugccgcaaacaagcuuaccauggagcugcucauccugaaggccaacgccaucaccaccauccugacggcggugaccuucugcuucgccagcggccagaacaucaccgaggaguucuaccaguccacgugcagcgccgucuccaagggguaccucggcgcccugcggaccggcugguacaccuccgugaucaccaucgagcugagcaacaucaaggagaucaagugcaacgggaccgacgccaaggugaagcucaucaagcaggagcuggacaaguacaagaacgcggucacggaccugcagcuccugaugcaguccaccccggcaaccggcuccggcuccgccaucugcagcggcgucgccgugugcaaggugcugcaccucgagggggaggucaacaagaucaagagcgcccugcuguccaccaacaaggccguggugagccucuccaacggcgucagcgugcugaccuucaaggugcuggaccucaagaacuacaucgacaagcagcugcugcccauccugaacaagcagagcugcuccauccccaacaucgagacggugaucgaguuccagcagaagaacaaccggcuccuggagaucacccgcgaguucagcgugaacgccggggucaccacccccguguccacguacaugcugaccaacagcgagcuccugucccugaucaacgacaugccgaucaccaacgaccagaagaagcucaugagcaacaacgugcagaucguccggcagcaguccuacagcaucaugugcaucaucaaggaggaggugcuggcguacgugguccagcugccccucuacggcgugaucgacacccccugcuggaagcugcacacgagcccccugugcaccaccaacaccaaggagggguccaacaucugccucacgcgcaccgaccggggcugguacugcgacaacgccggcagcgucuccuucuucccgcaggccgagaccugcaaggugcagagcaaccgcguguucugcgacaccaugaacucccugacgcugcccagcgagguaaaccucugcaacgucgacaucuucaaccccaaguacgacugcaagaucaugaccuccaagaccgacgugagcuccagcgugaucaccucccugggggccaucgucagcugcuacggcaagacgaagugcaccgccagcaacaagaaccgggggaucaucaagaccuucuccaacggcugcgacuacgugagcaacaagggcguggacaccguguccgucgggaacacccuguacugcgugaacaagcaggagggccagagccucuacgugaagggggagcccaucaucaacuucuacgacccgcuggucuuccccuccgacgaguucgacgcgagcaucucccaggugaacgagaagaucaaccagagccuggccuucauccgcaaguccgacgagcugcuccacaacgugaacgccggcaagagcacgaccaacaucaugaucaccaccaucaucaucgucaucaucgugauccugcugucccucaucgccguggggcugcugcucuacugcaaggcccggugaggacuagugaagggaacacccaaauuuaauucagccuuaagcacaauuaauuaagagugaaacguaauuguacaagcaguuggucacccaccauagggcaugaucaacaccgcaaccuuuccuuuuucccccagugauucugaaaaaccccucuucccuucagcuugcuuagauguuccaaauuuaguaagcuuaaggcggccuacagaagaaaaagaaaaaaaaggccacaaaaguucccucucacuuucaguaaauaaaauaaaagcagcaacagaaauaaagaaauaaaugaaauucaaaaugaaauaaauauuguguugugcagcauuaaaaaaucaauaaaaauuaaaaaugagcaagaucuaaaaaaaaaaaaaaaaaaaaaaaaaaaaaaaaaaaaaaaaaaaaaaaaaaaaaaaaaaaaaaaaugcaucccccccccccccccccccccccccccccccaaaggcucuuuucagagccaccagaauu

SEQ ID NO: 3755 - RNA, 2136 nt, Artificial Sequence
  mRNA product Design g-3 comprising derived and/or modified sequence from HRSV(A2)__F-del_DSCav1_mut3 (opt1)
gggagaguccgcucagccagguugcagaagcggcuuagcguguguccuaaucuucucucugcguguagguaggccugugccgcaaacaagcuuaccauggagcugcucauccugaaggccaacgccaucaccaccauccugacggcggugaccuucugcuucgccagcggccagaacaucaccgaggaguucuaccaguccacgugcagcgccgucuccaagggguaccucggcgcccugcgcaccgggugguacaccagcgugaucaccaucgagcuguccaacaucaaggagaucaagugcaacggcaccgacgccaaggugaagcucaucaagcaggagcuggacaaguacaagaacgcggucacggaccugcagcuccugaugcagagcacccccgccaccggguccggcagcgccaucugcuccggcguggccgugugcaagguccugcaccucgagggggaggugaacaagaucaagagcgcgcugcuguccaccaacaaggccguggucagccucuccaacggcgugagcgugcugacguucaagguccuggaccucaagaacuacaucgacaagcagcugcugccgauccucaacaagcaguccugcagcauccccaacaucgagaccgugaucgaguuccagcagaagaacaaccggcugcuggagaucacccgcgaguucuccgugaacgccggggucaccacgcccgugagcaccuacaugcucaccaacuccgagcugcugagccucaucaacgacaugcccaucaccaacgaccagaagaagcugaugagcaacaacgugcagaucguccggcagcaguccuacagcaucaugugcaucaucaaggaggaggugcuggccuacgugguccagcucccgcuguacggcgugaucgacacgcccugcuggaagcugcacaccagcccccucugcaccaccaacacgaaggagggguccaacaucugccugacccgcaccgaccggggcugguacugcgacaacgccggcuccgugagcuucuucccccaggcggagaccugcaagguccaguccaaccgcguguucugcgacacgaugaacagccugacccucccguccgaggucaaccugugcaacguggacaucuucaaccccaaguacgacugcaagaucaugaccagcaagaccgacguguccagcuccgucaucacgagccugggggccaucguguccugcuacggcaagaccaagugcaccgccagcaacaagaaccgggggaucaucaagaccuucuccaacggcugcgacuacgugagcaacaagggcgucgacacgguguccguggggaacacccucuacugcgucaacaagcaggagggccagagccuguacgugaagggggagcccaucaucaacuucuacgacccccugguguucccgagcgacgaguucgacgccuccaucagccaggucaacgagaagaucaaccagucccucgccuucauccgcaagagcgacgagcugcugcacaacgugaacgcgggcaaguccaccaccaacaucaugaucaccacgaucaucaucgugaucaucgucauccuccugagccugaucgccguggggcuccugcuguacugcaaggcccggugaggacuagugaagggaacacccaaauuuaauucagccuuaagcacaauuaauuaagagugaaacguaauuguacaagcaguuggucacccaccauagggcaugaucaacaccgcaaccuuuccuuuuucccccagugauucugaaaaaccccucuucccuucagcuugcuuagauguuccaaauuuaguaagcuuaaggcggccuacagaagaaaaagaaaaaaaaggccacaaaaguucccucucacuuucaguaaauaaaauaaaagcagcaacagaaauaaagaaauaaaugaaauucaaaaugaaauaaauauuguguugugcagcauuaaaaaaucaauaaaaauuaaaaaugagcaagaucuaaaaaaaaaaaaaaaaaaaaaaaaaaaaaaaaaaaaaaaaaaaaaaaaaaaaaaaaaaaaaaaaugcaucccccccccccccccccccccccccccccccaaaggcucuuuucagagccaccagaauu

SEQ ID NO: 3756 - RNA, 2136 nt, Artificial Sequence
  mRNA product Design g-3 comprising derived and/or modified sequence from HRSV(A2)__F-del_DSCav1_mut3 (opt2)
gggagaguccgcucagccagguugcagaagcggcuuagcguguguccuaaucuucucucugcguguagguaggccugugccgcaaacaagcuuaccauggagcuccucauccucaaggccaacgccaucaccaccauccucaccgccgucaccuucugcuucgccuccggccagaacaucaccgaggaguucuaccaguccaccugcuccgccgucuccaagggcuaccucggcgcccuccgcaccggcugguacaccuccgucaucaccaucgagcucuccaacaucaaggagaucaagugcaacggcaccgacgccaaggucaagcucaucaagcaggagcucgacaaguacaagaacgccgucaccgaccuccagcuccucaugcaguccacccccgccaccggcuccggcuccgccaucugcuccggcgucgccgucugcaagguccuccaccucgagggcgaggucaacaagaucaaguccgcccuccucuccaccaacaaggccgucgucucccucuccaacggcgucuccguccucaccuucaagguccucgaccucaagaacuacaucgacaagcagcuccuccccauccucaacaagcaguccugcuccauccccaacaucgagaccgucaucgaguuccagcagaagaacaaccgccuccucgagaucacccgcgaguucuccgucaacgccggcgucaccacccccgucuccaccuacaugcucaccaacuccgagcuccucucccucaucaacgacaugcccaucaccaacgaccagaagaagcucauguccaacaacguccagaucguccgccagcaguccuacuccaucaugugcaucaucaaggaggagguccucgccuacgucguccagcucccccucuacggcgucaucgacacccccugcuggaagcuccacaccuccccccucugcaccaccaacaccaaggagggcuccaacaucugccucacccgcaccgaccgcggcugguacugcgacaacgccggcuccgucuccuucuucccccaggccgagaccugcaagguccaguccaaccgcgucuucugcgacaccaugaacucccucacccuccccuccgaggucaaccucugcaacgucgacaucuucaaccccaaguacgacugcaagaucaugaccuccaagaccgacgucuccuccuccgucaucaccucccucggcgccaucgucuccugcuacggcaagaccaagugcaccgccuccaacaagaaccgcggcaucaucaagaccuucuccaacggcugcgacuacgucuccaacaagggcgucgacaccgucuccgucggcaacacccucuacugcgucaacaagcaggagggccagucccucuacgucaagggcgagcccaucaucaacuucuacgacccccucgucuuccccuccgacgaguucgacgccuccaucucccaggucaacgagaagaucaaccagucccucgccuucauccgcaaguccgacgagcuccuccacaacgucaacgccggcaaguccaccaccaacaucaugaucaccaccaucaucaucgucaucaucgucauccuccucucccucaucgccgucggccuccuccucuacugcaaggcccgcugaggacuagugaagggaacacccaaauuuaauucagccuuaagcacaauuaauuaagagugaaacguaauuguacaagcaguuggucacccaccauagggcaugaucaacaccgcaaccuuuccuuuuucccccagugauucugaaaaaccccucuucccuucagcuugcuuagauguuccaaauuuaguaagcuuaaggcggccuacagaagaaaaagaaaaaaaaggccacaaaaguucccucucacuuucaguaaauaaaauaaaagcagcaacagaaauaaagaaauaaaugaaauucaaaaugaaauaaauauuguguugugcagcauuaaaaaaucaauaaaaauuaaaaaugagcaagaucuaaaaaaaaaaaaaaaaaaaaaaaaaaaaaaaaaaaaaaaaaaaaaaaaaaaaaaaaaaaaaaaaugcaucccccccccccccccccccccccccccccccaaaggcucuuuucagagccaccagaauu

SEQ ID NO: 3757 - RNA, 2136 nt, Artificial Sequence
  mRNA product Design g-3 comprising derived and/or modified sequence from HRSV(A2)__F-del_DSCav1_mut3 (opt3)
gggagaguccgcucagccagguugcagaagcggcuuagcguguguccuaaucuucucucugcguguagguaggccugugccgcaaacaagcuuaccauggagcugcucauccuuaaggccaacgcuauuaccacaauacugacugcagugacguucugcuuugccagcggccagaauaucaccgaagaguucuaccaauccacauguucugcggucucaaaaggguauuugggagcuuuaagaacugguugguacaccaguguuauuacaaucgaacugagcaacauuaaggagaucaaaugcaauggcaccgacgccaaggugaaacuaauaaagcaggaacucgauaaguauaaaaacgcaguaacugaccugcagcuucugaugcaguccacacccgccaccgggucuggaucggcuaucuguucaggcguggcagucugcaagguguugcaccucgagggugagguuaauaaaauuaagagcgcccugcugaguacgaacaaagcuguggucucccucucuaauggggugagcguauuaacuuuuaagguucuggaucuuaagaacuacaucgacaaacaauugcugccuauucuaaauaagcaguccuguucaaucccaaacauagaaaccgugauugaguuccagcagaaaaauaacaggcuccuggaaaucacacgggaguuuagugucaaugccggagugacuaccccggugagcacauauaugcuuaccaacucugagcuguugucccucauuaaugauaugcccaucacgaacgaccaaaagaaacugaugucaaacaauguccagaucguucgccagcagagcuacaguauuaugugcauaaucaaggaagagguguuagcguauguagugcaacugccucucuacggcgucauugauacuccauguuggaaacuucauacaucuccccugugcaccacuaacacaaaggaaggcuccaauaucuguuugacccgaacggaccgugggugguacugcgauaacgcaggaagcgugucguucuuuccucaggccgagaccuguaagguucagucuaauagaguguucugcgacacaaugaacucccuaacucugccaucagaagucaaucucugcaacguggauauauuuaaucccaaauaugacuguaagauuaugaccaguaaaacagauguaagcuccucuguuaucacuagccugggugcuaucgugucaugcuacggcaagaccaaauguacagccaguaacaagaauagggggauuaucaagaccuucuccaacggaugcgacuaugucagcaauaaaggcguggacacugucucuguggguaacacgcuuuacuguguuaauaagcaagaggggcagucacuguaugugaaaggagagccuauuauaaacuuuuacgauccauugguauucccgagugacgaauuugaugcaagcaucucccaggucaacgagaagauuaaucagucucucgcuuucauccggaaaucggacgaacuguuacacaacgugaaugccggcaagagcacaaccaacaucaugauuacuaccauaaucauuguuaucauugugauccugcuaucccucauagcggucggccugcuuuuguauugcaaggcccgcugaggacuagugaagggaacacccaaauuuaauucagccuuaagcacaauuaauuaagagugaaacguaauuguacaagcaguuggucacccaccauagggcaugaucaacaccgcaaccuuuccuuuuucccccagugauucugaaaaaccccucuucccuucagcuugcuuagauguuccaaauuuaguaagcuuaaggcggccuacagaagaaaaagaaaaaaaaggccacaaaaguucccucucacuuucaguaaauaaaauaaaagcagcaacagaaauaaagaaauaaaugaaauucaaaaugaaauaaauauuguguugugcagcauuaaaaaaucaauaaaaauuaaaaaugagcaagaucuaaaaaaaaaaaaaaaaaaaaaaaaaaaaaaaaaaaaaaaaaaaaaaaaaaaaaaaaaaaaaaaaugcaucccccccccccccccccccccccccccccccaaaggcucuuuucagagccaccagaauu

SEQ ID NO: 3758 - RNA, 2136 nt, Artificial Sequence
  mRNA product Design g-3 comprising derived and/or modified sequence from HRSV(A2)__F-del_DSCav1_mut3 (opt4)
gggagaguccgcucagccagguugcagaagcggcuuagcguguguccuaaucuucucucugcguguagguaggccugugccgcaaacaagcuuaccauggagcugcugauccugaaggccaacgccaucaccaccauccugaccgccgugaccuucugcuucgccagcggccagaacaucaccgaggaguucuaccagagcaccugcagcgccgugagcaagggcuaccugggcgcccugagaaccggcugguacaccagcgugaucaccaucgagcugagcaacaucaaggagaucaagugcaacggcaccgacgccaaggugaagcugaucaagcaggagcuggacaaguacaagaacgccgugaccgaccugcagcugcugaugcagagcacccccgccaccggcagcggcagcgccaucugcagcggcguggccgugugcaaggugcugcaccuggagggcgaggugaacaagaucaagagcgcccugcugagcaccaacaaggccguggugagccugagcaacggcgugagcgugcugaccuucaaggugcuggaccugaagaacuacaucgacaagcagcugcugcccauccugaacaagcagagcugcagcauccccaacaucgagaccgugaucgaguuccagcagaagaacaacagacugcuggagaucaccagagaguucagcgugaacgccggcgugaccacccccgugagcaccuacaugcugaccaacagcgagcugcugagccugaucaacgacaugcccaucaccaacgaccagaagaagcugaugagcaacaacgugcagaucgugagacagcagagcuacagcaucaugugcaucaucaaggaggaggugcuggccuacguggugcagcugccccuguacggcgugaucgacacccccugcuggaagcugcacaccagcccccugugcaccaccaacaccaaggagggcagcaacaucugccugaccagaaccgacagaggcugguacugcgacaacgccggcagcgugagcuucuucccccaggccgagaccugcaaggugcagagcaacagaguguucugcgacaccaugaacagccugacccugcccagcgaggugaaccugugcaacguggacaucuucaaccccaaguacgacugcaagaucaugaccagcaagaccgacgugagcagcagcgugaucaccagccugggcgccaucgugagcugcuacggcaagaccaagugcaccgccagcaacaagaacagaggcaucaucaagaccuucagcaacggcugcgacuacgugagcaacaagggcguggacaccgugagcgugggcaacacccuguacugcgugaacaagcaggagggccagagccuguacgugaagggcgagcccaucaucaacuucuacgacccccugguguuccccagcgacgaguucgacgccagcaucagccaggugaacgagaagaucaaccagagccuggccuucaucagaaagagcgacgagcugcugcacaacgugaacgccggcaagagcaccaccaacaucaugaucaccaccaucaucaucgugaucaucgugauccugcugagccugaucgccgugggccugcugcuguacugcaaggccagaugaggacuagugaagggaacacccaaauuuaauucagccuuaagcacaauuaauuaagagugaaacguaauuguacaagcaguuggucacccaccauagggcaugaucaacaccgcaaccuuuccuuuuucccccagugauucugaaaaaccccucuucccuucagcuugcuuagauguuccaaauuuaguaagcuuaaggcggccuacagaagaaaaagaaaaaaaaggccacaaaaguucccucucacuuucaguaaauaaaauaaaagcagcaacagaaauaaagaaauaaaugaaauucaaaaugaaauaaauauuguguugugcagcauuaaaaaaucaauaaaaauuaaaaaugagcaagaucuaaaaaaaaaaaaaaaaaaaaaaaaaaaaaaaaaaaaaaaaaaaaaaaaaaaaaaaaaaaaaaaaugcaucccccccccccccccccccccccccccccccaaaggcucuuuucagagccaccagaauu

SEQ ID NO: 3759 - RNA, 2136 nt, Artificial Sequence
  mRNA product Design g-3 comprising derived and/or modified sequence from HRSV(A2)__F-del_DSCav1_mut3 (opt5)
gggagaguccgcucagccagguugcagaagcggcuuagcguguguccuaaucuucucucugcguguagguaggccugugccgcaaacaagcuuaccauggagcugcucauccugaaggccaacgcuauuaccacaauccuuacggccgugaccuucugcuuugcgagcggccagaauauuacagaagaguucuaccaauccaccuguucugcugucagcaaaggguaucugggagcccucagaacaggcugguacaccuccguuaucacaauugaacugucuaacaucaaggagaucaaaugcaaugggaccgacgccaaggugaaacuuauuaagcaggaacuggauaaguauaaaaacgcugugacggaccuccagcugcugaugcagagcacccccgccacaggauccggcucugcuaucuguagcggggucgccgugugcaagguucuccaccuggagggagaggugaauaaaauuaaguccgcgcuucugagcaccaacaaagccgucgugucucucuccaauggcguuagcgugcugacauuuaagguccuugaucugaagaacuacaucgacaaacaacuccugccuauucugaauaagcagucuuguuccaucccgaacauugaaaccgugaucgaguuccagcagaaaaauaaccggcuccuggaaaucacgcgcgaguuuagcgugaaugcuggcgucacaacccccguuucuacauauaugcuuaccaacuccgagcugcucagccugauuaaugauaugccuaucaccaacgaccaaaagaaacuuauguccaacaaugugcagauugugagacagcagucuuacagcaucaugugcauuaucaaggaagagguccuggccuaugugguucaacucccccuguacggggugaucgauacaccuuguuggaaacugcauacgagcccccucugcaccacaaacaccaaggaaggauccaauauuugucugacacggaccgaccgcggcugguacugcgauaacgcugggucugucuccuucuuuccucaggccgagacguguaaggugcagagcaauagaguuuucugcgacacaaugaacucucuuacccugccgagcgaagugaaucucugcaacgucgauaucuuuaaucccaaauaugacuguaagauuaugaccuccaaaacagaugugucuagcuccgucaucaccagccugggagcgauugugucuugcuacggcaagacaaaauguacggccuccaacaagaaucgggggaucaucaagaccuucagcaacggaugcgacuauguuucuaauaaaggcguggacacagucuccgugggcaacacccuuuacuguguuaauaagcaagaggggcagagccuguaugugaaaggagagccuauuaucaacuuuuacgauccccucgucuucccuuccgacgaauuugaugcuucuauuagccaggugaacgagaagaucaaucagucccuggccuucauucgcaaaucugacgaacugcuccacaacgugaaugcuggcaagagcacaaccaacaucaugauuacgaccaucaucauuguuaucauugucauccugcuuucccugauugccguggggcuccugcuguauugcaaggccagaugaggacuagugaagggaacacccaaauuuaauucagccuuaagcacaauuaauuaagagugaaacguaauuguacaagcaguuggucacccaccauagggcaugaucaacaccgcaaccuuuccuuuuucccccagugauucugaaaaaccccucuucccuucagcuugcuuagauguuccaaauuuaguaagcuuaaggcggccuacagaagaaaaagaaaaaaaaggccacaaaaguucccucucacuuucaguaaauaaaauaaaagcagcaacagaaauaaagaaauaaaugaaauucaaaaugaaauaaauauuguguugugcagcauuaaaaaaucaauaaaaauuaaaaaugagcaagaucuaaaaaaaaaaaaaaaaaaaaaaaaaaaaaaaaaaaaaaaaaaaaaaaaaaaaaaaaaaaaaaaaugcaucccccccccccccccccccccccccccccccaaaggcucuuuucagagccaccagaauu

SEQ ID NO: 3760 - RNA, 2136 nt, Artificial Sequence
  mRNA product Design g-3 comprising derived and/or modified sequence from HRSV(A2)__F-del_DSCav1_mut3 (opt6)
gggagaguccgcucagccagguugcagaagcggcuuagcguguguccuaaucuucucucugcguguagguaggccugugccgcaaacaagcuuaccauggaauuacuaauccugaaagcaaacgcaauuacuacaauacuaacagcaguaaccuuuugcuuugccucaggacaaaacauaacugaagaauuuuaccaaucaacuugcucagcagucucaaaaggcuaucuaggagcacuacgaacagguugguauacuucagucauaacaauagaauuaucaaacauaaaagaaauuaaauguaacggaacugacgcaaaaguaaaacucaucaaacaagaacucgauaaauacaaaaacgcuguaaccgacuuacaacuacuaaugcaaucaacuccagcaacaggcuccggauccgcaauaugcagugguguagcaguaugcaaaguccuacaccuagaaggagaaguaaauaagauaaaaucugcucuacuaucaacaaauaaagcaguugucucccuaucaaauggagucucaguacucaccuucaaaguauuagaccucaaaaacuacauagacaaacaacuauuaccaauacucaacaaacaauccugcuccaucccuaacauagaaaccguaaucgaauuucaacaaaaaaauaacagacucuuagaaauaacuagagaauuuucaguuaaugcaggcgugacaacaccaguaucaacauauaugcuaacaaacuccgaacuccuaucccuaauaaacgacaugccaaucacaaacgaccaaaaaaaacuaauguccaacaacguacaaaucguaagacaacaaucauacucuauaaugugcauaauaaaagaagaaguacuggccuacguaguacaauuaccacucuacggaguaauagacaccccaugcuggaaacuccauacaucaccccuaugcacaacaaacacaaaagaaggauccaacauaugucucacuagaacagacagaggcugguacugcgacaacgcuggauccgucucauucuucccccaagcagaaacauguaaaguacaaucuaauagaguauuuugugacacaaugaacagccucacacuaccauccgaagucaaccuauguaacguagauauauuuaaucccaaauacgacugcaaaauaaugacauccaaaacagauguaucaucauccguuaucaccucacuaggagccauaguuucaugcuacggaaaaacaaaaugcacugcaucuaacaaaaauagagguauaauaaaaacauuuuccaacggcugcgacuacgucucaaacaaaggcguagacaccguaucaguaggaaauacauuauauugcguaaauaaacaagaaggccaaucccuauacguaaaaggagaacccaucauaaacuucuaugacccacuuguuuuccccucagacgaauuugacgccucaauaucacaaguaaaugaaaaaauaaaccaaucucuugccuucauuagaaaaucagacgaauuacuacacaacgucaacgcaggaaaaucaacaacaaacaucaugauaacaacgauaauaauagucauaauaguaauacuacuaucauuaaucgcagucggacuccuauuauauugcaaagcuagauaaggacuagugaagggaacacccaaauuuaauucagccuuaagcacaauuaauuaagagugaaacguaauuguacaagcaguuggucacccaccauagggcaugaucaacaccgcaaccuuuccuuuuucccccagugauucugaaaaaccccucuucccuucagcuugcuuagauguuccaaauuuaguaagcuuaaggcggccuacagaagaaaaagaaaaaaaaggccacaaaaguucccucucacuuucaguaaauaaaauaaaagcagcaacagaaauaaagaaauaaaugaaauucaaaaugaaauaaauauuguguugugcagcauuaaaaaaucaauaaaaauuaaaaaugagcaagaucuaaaaaaaaaaaaaaaaaaaaaaaaaaaaaaaaaaaaaaaaaaaaaaaaaaaaaaaaaaaaaaaaugcaucccccccccccccccccccccccccccccccaaaggcucuuuucagagccaccagaauu

SEQ ID NO: 3761 - RNA, 2136 nt, Artificial Sequence
  mRNA product Design g-3 comprising derived and/or modified sequence from HRSV(A2)__F-del_DSCav1_mut3 (opt11)
gggagaguccgcucagccagguugcagaagcggcuuagcguguguccuaaucuucucucugcguguagguaggccugugccgcaaacaagcuuaccauggaacuacucauacuaaaagccaacgccauaaccaccauccucaccgcaguaacuuucugcuucgcuuccggccaaaacaucaccgaagaauuuuaccaaaguaccugcagcgcagucucaaaaggauaccuaggcgcccuacgcacaggcugguacaccuccgucauuaccaucgaacucuccaacaucaaagaaauuaaaugcaacgguacagacgcaaaagucaaacucaucaaacaagaacucgacaaauacaaaaacgcagucaccgaccuccaacuccucaugcaauccacccccgccacaggcucuggcuccgccaucugcucaggcguagcagucugcaaaguccugcaccucgaaggcgaagucaacaaaaucaagucagcccuccucuccaccaacaaggccgucguaucccucucaaacggaguuagcguccucaccuucaaaguccuagaccucaaaaacuacaucgauaaacaacuacuccccauccuaaacaaacaaucaugcuccaucccaaacaucgaaaccguaaucgaguuccaacaaaagaacaaccgccuccucgaaaucacacgugaguucuccguuaacgccggcgucaccacccccgucucuacauacaugcucaccaacuccgaacuccuuucccucaucaacgacaugccaaucaccaacgaccaaaagaaacucaugucaaacaacguacaaaucguccgacaacaaagcuacuccaucaugugcaucaucaaagaagaaguccuugcauacgucguucaacuaccccucuacggcguaaucgacacucccugcuggaaacuccacaccuccccgcucugcacaaccaacaccaaagaaggcagcaacaucugccucacccgaaccgaccgcggcugguacugcgauaacgccggauccgucuccuucuucccacaagcagaaacuugcaaaguccaauccaaccgcgucuucugcgacaccaugaacucccucacacuccccuccgaagucaaccugugcaacgucgacaucuucaacccaaaauacgacugcaaaaucaugaccucaaaaaccgacgucucaucuucugucaucaccucucucggcgcuaucgucuccugcuauggcaaaaccaaaugcaccgccuccaacaagaaccgcggcauuaucaagaccuucuccaacggcugcgacuacgucuccaauaagggcgucgacaccgucucugucggcaacacccuuuacugcguaaacaaacaagaaggucaaucucucuacgucaaaggagaacccaucaucaacuucuacgacccccuggucuuccccuccgacgaguucgaugcaucaaucucccaagucaacgaaaagaucaaccaaucucucgcuuucauccgcaaauccgacgaacuccuacacaacguaaacgccggcaaauccaccacaaacaucaugaucaccaccauuaucauagucaucaucgucauccuccucuccuuaaucgccguuggccuccuucucuacugcaaagcccgauaaggacuagugaagggaacacccaaauuuaauucagccuuaagcacaauuaauuaagagugaaacguaauuguacaagcaguuggucacccaccauagggcaugaucaacaccgcaaccuuuccuuuuucccccagugauucugaaaaaccccucuucccuucagcuugcuuagauguuccaaauuuaguaagcuuaaggcggccuacagaagaaaaagaaaaaaaaggccacaaaaguucccucucacuuucaguaaauaaaauaaaagcagcaacagaaauaaagaaauaaaugaaauucaaaaugaaauaaauauuguguugugcagcauuaaaaaaucaauaaaaauuaaaaaugagcaagaucuaaaaaaaaaaaaaaaaaaaaaaaaaaaaaaaaaaaaaaaaaaaaaaaaaaaaaaaaaaaaaaaaugcaucccccccccccccccccccccccccccccccaaaggcucuuuucagagccaccagaauu

SEQ ID NO: 3762 - RNA, 1931 nt, Artificial Sequence
  mRNA product Design g-4 comprising derived and/or modified sequence from HRSV(A2)__F-del_DSCav1_mut3 (opt1)
gggagacuccugucgggcggaaguaggaggaguagaguuuaaaaacaguacucuuuuuccgguucgggacguaguugaagcaacgacaagccggauaaccgcucuugagacaggaagcuuaccauggagcugcucauccugaaggccaacgccaucaccaccauccugacggcggugaccuucugcuucgccagcggccagaacaucaccgaggaguucuaccaguccacgugcagcgccgucuccaagggguaccucggcgcccugcggaccggcugguacaccuccgugaucaccaucgagcugagcaacaucaaggagaucaagugcaacgggaccgacgccaaggugaagcucaucaagcaggagcuggacaaguacaagaacgcggucacggaccugcagcuccugaugcaguccaccccggcaaccggcuccggcuccgccaucugcagcggcgucgccgugugcaaggugcugcaccucgagggggaggucaacaagaucaagagcgcccugcuguccaccaacaaggccguggugagccucuccaacggcgucagcgugcugaccuucaaggugcuggaccucaagaacuacaucgacaagcagcugcugcccauccugaacaagcagagcugcuccauccccaacaucgagacggugaucgaguuccagcagaagaacaaccggcuccuggagaucacccgcgaguucagcgugaacgccggggucaccacccccguguccacguacaugcugaccaacagcgagcuccugucccugaucaacgacaugccgaucaccaacgaccagaagaagcucaugagcaacaacgugcagaucguccggcagcaguccuacagcaucaugugcaucaucaaggaggaggugcuggcguacgugguccagcugccccucuacggcgugaucgacacccccugcuggaagcugcacacgagcccccugugcaccaccaacaccaaggagggguccaacaucugccucacgcgcaccgaccggggcugguacugcgacaacgccggcagcgucuccuucuucccgcaggccgagaccugcaaggugcagagcaaccgcguguucugcgacaccaugaacucccugacgcugcccagcgagguaaaccucugcaacgucgacaucuucaaccccaaguacgacugcaagaucaugaccuccaagaccgacgugagcuccagcgugaucaccucccugggggccaucgucagcugcuacggcaagacgaagugcaccgccagcaacaagaaccgggggaucaucaagaccuucuccaacggcugcgacuacgugagcaacaagggcguggacaccguguccgucgggaacacccuguacugcgugaacaagcaggagggccagagccucuacgugaagggggagcccaucaucaacuucuacgacccgcuggucuuccccuccgacgaguucgacgcgagcaucucccaggugaacgagaagaucaaccagagccuggccuucauccgcaaguccgacgagcugcuccacaacgugaacgccggcaagagcacgaccaacaucaugaucaccaccaucaucaucgucaucaucgugauccugcugucccucaucgccguggggcugcugcucuacugcaaggcccggugaggacuaguaauaaggaaacuguaugaaugucugugggcaggaagugaagagauccuucuguaaagguuuuuggaauuaugucugcugaauaauaaacuuuuuugaaauaauaaaucugguagaaaaaugagaucuaaaaaaaaaaaaaaaaaaaaaaaaaaaaaaaaaaaaaaaaaaaaaaaaaaaaaaaaaaaaaaaaugcaucccccccccccccccccccccccccccccccaaaggcucuuuucagagccaccagaauu

SEQ ID NO: 3763 - RNA, 1931 nt, Artificial Sequence
  mRNA product Design g-4 comprising derived and/or modified sequence from HRSV(A2)__F-del_DSCav1_mut3 (opt1)
gggagacuccugucgggcggaaguaggaggaguagaguuuaaaaacaguacucuuuuuccgguucgggacguaguugaagcaacgacaagccggauaaccgcucuugagacaggaagcuuaccauggagcugcucauccugaaggccaacgccaucaccaccauccugacggcggugaccuucugcuucgccagcggccagaacaucaccgaggaguucuaccaguccacgugcagcgccgucuccaagggguaccucggcgcccugcgcaccgggugguacaccagcgugaucaccaucgagcuguccaacaucaaggagaucaagugcaacggcaccgacgccaaggugaagcucaucaagcaggagcuggacaaguacaagaacgcggucacggaccugcagcuccugaugcagagcacccccgccaccggguccggcagcgccaucugcuccggcguggccgugugcaagguccugcaccucgagggggaggugaacaagaucaagagcgcgcugcuguccaccaacaaggccguggucagccucuccaacggcgugagcgugcugacguucaagguccuggaccucaagaacuacaucgacaagcagcugcugccgauccucaacaagcaguccugcagcauccccaacaucgagaccgugaucgaguuccagcagaagaacaaccggcugcuggagaucacccgcgaguucuccgugaacgccggggucaccacgcccgugagcaccuacaugcucaccaacuccgagcugcugagccucaucaacgacaugcccaucaccaacgaccagaagaagcugaugagcaacaacgugcagaucguccggcagcaguccuacagcaucaugugcaucaucaaggaggaggugcuggccuacgugguccagcucccgcuguacggcgugaucgacacgcccugcuggaagcugcacaccagcccccucugcaccaccaacacgaaggagggguccaacaucugccugacccgcaccgaccggggcugguacugcgacaacgccggcuccgugagcuucuucccccaggcggagaccugcaagguccaguccaaccgcguguucugcgacacgaugaacagccugacccucccguccgaggucaaccugugcaacguggacaucuucaaccccaaguacgacugcaagaucaugaccagcaagaccgacguguccagcuccgucaucacgagccugggggccaucguguccugcuacggcaagaccaagugcaccgccagcaacaagaaccgggggaucaucaagaccuucuccaacggcugcgacuacgugagcaacaagggcgucgacacgguguccguggggaacacccucuacugcgucaacaagcaggagggccagagccuguacgugaagggggagcccaucaucaacuucuacgacccccugguguucccgagcgacgaguucgacgccuccaucagccaggucaacgagaagaucaaccagucccucgccuucauccgcaagagcgacgagcugcugcacaacgugaacgcgggcaaguccaccaccaacaucaugaucaccacgaucaucaucgugaucaucgucauccuccugagccugaucgccguggggcuccugcuguacugcaaggcccggugaggacuaguaauaaggaaacuguaugaaugucugugggcaggaagugaagagauccuucuguaaagguuuuuggaauuaugucugcugaauaauaaacuuuuuugaaauaauaaaucugguagaaaaaugagaucuaaaaaaaaaaaaaaaaaaaaaaaaaaaaaaaaaaaaaaaaaaaaaaaaaaaaaaaaaaaaaaaaugcaucccccccccccccccccccccccccccccccaaaggcucuuuucagagccaccagaauu

SEQ ID NO: 3764 - RNA, 1931 nt, Artificial Sequence
  mRNA product Design g-4 comprising derived and/or modified sequence from HRSV(A2)__F-del_DSCav1_mut3 (opt2)
gggagacuccugucgggcggaaguaggaggaguagaguuuaaaaacaguacucuuuuuccgguucgggacguaguugaagcaacgacaagccggauaaccgcucuugagacaggaagcuuaccauggagcuccucauccucaaggccaacgccaucaccaccauccucaccgccgucaccuucugcuucgccuccggccagaacaucaccgaggaguucuaccaguccaccugcuccgccgucuccaagggcuaccucggcgcccuccgcaccggcugguacaccuccgucaucaccaucgagcucuccaacaucaaggagaucaagugcaacggcaccgacgccaaggucaagcucaucaagcaggagcucgacaaguacaagaacgccgucaccgaccuccagcuccucaugcaguccacccccgccaccggcuccggcuccgccaucugcuccggcgucgccgucugcaagguccuccaccucgagggcgaggucaacaagaucaaguccgcccuccucuccaccaacaaggccgucgucucccucuccaacggcgucuccguccucaccuucaagguccucgaccucaagaacuacaucgacaagcagcuccuccccauccucaacaagcaguccugcuccauccccaacaucgagaccgucaucgaguuccagcagaagaacaaccgccuccucgagaucacccgcgaguucuccgucaacgccggcgucaccacccccgucuccaccuacaugcucaccaacuccgagcuccucucccucaucaacgacaugcccaucaccaacgaccagaagaagcucauguccaacaacguccagaucguccgccagcaguccuacuccaucaugugcaucaucaaggaggagguccucgccuacgucguccagcucccccucuacggcgucaucgacacccccugcuggaagcuccacaccuccccccucugcaccaccaacaccaaggagggcuccaacaucugccucacccgcaccgaccgcggcugguacugcgacaacgccggcuccgucuccuucuucccccaggccgagaccugcaagguccaguccaaccgcgucuucugcgacaccaugaacucccucacccuccccuccgaggucaaccucugcaacgucgacaucuucaaccccaaguacgacugcaagaucaugaccuccaagaccgacgucuccuccuccgucaucaccucccucggcgccaucgucuccugcuacggcaagaccaagugcaccgccuccaacaagaaccgcggcaucaucaagaccuucuccaacggcugcgacuacgucuccaacaagggcgucgacaccgucuccgucggcaacacccucuacugcgucaacaagcaggagggccagucccucuacgucaagggcgagcccaucaucaacuucuacgacccccucgucuuccccuccgacgaguucgacgccuccaucucccaggucaacgagaagaucaaccagucccucgccuucauccgcaaguccgacgagcuccuccacaacgucaacgccggcaaguccaccaccaacaucaugaucaccaccaucaucaucgucaucaucgucauccuccucucccucaucgccgucggccuccuccucuacugcaaggcccgcugaggacuaguaauaaggaaacuguaugaaugucugugggcaggaagugaagagauccuucuguaaagguuuuuggaauuaugucugcugaauaauaaacuuuuuugaaauaauaaaucugguagaaaaaugagaucuaaaaaaaaaaaaaaaaaaaaaaaaaaaaaaaaaaaaaaaaaaaaaaaaaaaaaaaaaaaaaaaaugcaucccccccccccccccccccccccccccccccaaaggcucuuuucagagccaccagaauu

SEQ ID NO: 3765 - RNA, 1931 nt, Artificial Sequence
  mRNA product Design g-4 comprising derived and/or modified sequence from HRSV(A2)__F-del_DSCav1_mut3 (opt3)
gggagacuccugucgggcggaaguaggaggaguagaguuuaaaaacaguacucuuuuuccgguucgggacguaguugaagcaacgacaagccggauaaccgcucuugagacaggaagcuuaccauggagcugcucauccuuaaggccaacgcuauuaccacaauacugacugcagugacguucugcuuugccagcggccagaauaucaccgaagaguucuaccaauccacauguucugcggucucaaaaggguauuugggagcuuuaagaacugguugguacaccaguguuauuacaaucgaacugagcaacauuaaggagaucaaaugcaauggcaccgacgccaaggugaaacuaauaaagcaggaacucgauaaguauaaaaacgcaguaacugaccugcagcuucugaugcaguccacacccgccaccgggucuggaucggcuaucuguucaggcguggcagucugcaagguguugcaccucgagggugagguuaauaaaauuaagagcgcccugcugaguacgaacaaagcuguggucucccucucuaauggggugagcguauuaacuuuuaagguucuggaucuuaagaacuacaucgacaaacaauugcugccuauucuaaauaagcaguccuguucaaucccaaacauagaaaccgugauugaguuccagcagaaaaauaacaggcuccuggaaaucacacgggaguuuagugucaaugccggagugacuaccccggugagcacauauaugcuuaccaacucugagcuguugucccucauuaaugauaugcccaucacgaacgaccaaaagaaacugaugucaaacaauguccagaucguucgccagcagagcuacaguauuaugugcauaaucaaggaagagguguuagcguauguagugcaacugccucucuacggcgucauugauacuccauguuggaaacuucauacaucuccccugugcaccacuaacacaaaggaaggcuccaauaucuguuugacccgaacggaccgugggugguacugcgauaacgcaggaagcgugucguucuuuccucaggccgagaccuguaagguucagucuaauagaguguucugcgacacaaugaacucccuaacucugccaucagaagucaaucucugcaacguggauauauuuaaucccaaauaugacuguaagauuaugaccaguaaaacagauguaagcuccucuguuaucacuagccugggugcuaucgugucaugcuacggcaagaccaaauguacagccaguaacaagaauagggggauuaucaagaccuucuccaacggaugcgacuaugucagcaauaaaggcguggacacugucucuguggguaacacgcuuuacuguguuaauaagcaagaggggcagucacuguaugugaaaggagagccuauuauaaacuuuuacgauccauugguauucccgagugacgaauuugaugcaagcaucucccaggucaacgagaagauuaaucagucucucgcuuucauccggaaaucggacgaacuguuacacaacgugaaugccggcaagagcacaaccaacaucaugauuacuaccauaaucauuguuaucauugugauccugcuaucccucauagcggucggccugcuuuuguauugcaaggcccgcugaggacuaguaauaaggaaacuguaugaaugucugugggcaggaagugaagagauccuucuguaaagguuuuuggaauuaugucugcugaauaauaaacuuuuuugaaauaauaaaucugguagaaaaaugagaucuaaaaaaaaaaaaaaaaaaaaaaaaaaaaaaaaaaaaaaaaaaaaaaaaaaaaaaaaaaaaaaaaugcaucccccccccccccccccccccccccccccccaaaggcucuuuucagagccaccagaauu

SEQ ID NO: 3766 - RNA, 1931 nt, Artificial Sequence
  mRNA product Design g-4 comprising derived and/or modified sequence from HRSV(A2)__F-del_DSCav1_mut3 (opt4)
gggagacuccugucgggcggaaguaggaggaguagaguuuaaaaacaguacucuuuuuccgguucgggacguaguugaagcaacgacaagccggauaaccgcucuugagacaggaagcuuaccauggagcugcugauccugaaggccaacgccaucaccaccauccugaccgccgugaccuucugcuucgccagcggccagaacaucaccgaggaguucuaccagagcaccugcagcgccgugagcaagggcuaccugggcgcccugagaaccggcugguacaccagcgugaucaccaucgagcugagcaacaucaaggagaucaagugcaacggcaccgacgccaaggugaagcugaucaagcaggagcuggacaaguacaagaacgccgugaccgaccugcagcugcugaugcagagcacccccgccaccggcagcggcagcgccaucugcagcggcguggccgugugcaaggugcugcaccuggagggcgaggugaacaagaucaagagcgcccugcugagcaccaacaaggccguggugagccugagcaacggcgugagcgugcugaccuucaaggugcuggaccugaagaacuacaucgacaagcagcugcugcccauccugaacaagcagagcugcagcauccccaacaucgagaccgugaucgaguuccagcagaagaacaacagacugcuggagaucaccagagaguucagcgugaacgccggcgugaccacccccgugagcaccuacaugcugaccaacagcgagcugcugagccugaucaacgacaugcccaucaccaacgaccagaagaagcugaugagcaacaacgugcagaucgugagacagcagagcuacagcaucaugugcaucaucaaggaggaggugcuggccuacguggugcagcugccccuguacggcgugaucgacacccccugcuggaagcugcacaccagcccccugugcaccaccaacaccaaggagggcagcaacaucugccugaccagaaccgacagaggcugguacugcgacaacgccggcagcgugagcuucuucccccaggccgagaccugcaaggugcagagcaacagaguguucugcgacaccaugaacagccugacccugcccagcgaggugaaccugugcaacguggacaucuucaaccccaaguacgacugcaagaucaugaccagcaagaccgacgugagcagcagcgugaucaccagccugggcgccaucgugagcugcuacggcaagaccaagugcaccgccagcaacaagaacagaggcaucaucaagaccuucagcaacggcugcgacuacgugagcaacaagggcguggacaccgugagcgugggcaacacccuguacugcgugaacaagcaggagggccagagccuguacgugaagggcgagcccaucaucaacuucuacgacccccugguguuccccagcgacgaguucgacgccagcaucagccaggugaacgagaagaucaaccagagccuggccuucaucagaaagagcgacgagcugcugcacaacgugaacgccggcaagagcaccaccaacaucaugaucaccaccaucaucaucgugaucaucgugauccugcugagccugaucgccgugggccugcugcuguacugcaaggccagaugaggacuaguaauaaggaaacuguaugaaugucugugggcaggaagugaagagauccuucuguaaagguuuuuggaauuaugucugcugaauaauaaacuuuuuugaaauaauaaaucugguagaaaaaugagaucuaaaaaaaaaaaaaaaaaaaaaaaaaaaaaaaaaaaaaaaaaaaaaaaaaaaaaaaaaaaaaaaaugcaucccccccccccccccccccccccccccccccaaaggcucuuuucagagccaccagaauu

SEQ ID NO: 3767 - RNA, 1931 nt, Artificial Sequence
  mRNA product Design g-4 comprising derived and/or modified sequence from HRSV(A2)__F-del_DSCav1_mut3 (opt5)
gggagacuccugucgggcggaaguaggaggaguagaguuuaaaaacaguacucuuuuuccgguucgggacguaguugaagcaacgacaagccggauaaccgcucuugagacaggaagcuuaccauggagcugcucauccugaaggccaacgcuauuaccacaauccuuacggccgugaccuucugcuuugcgagcggccagaauauuacagaagaguucuaccaauccaccuguucugcugucagcaaaggguaucugggagcccucagaacaggcugguacaccuccguuaucacaauugaacugucuaacaucaaggagaucaaaugcaaugggaccgacgccaaggugaaacuuauuaagcaggaacuggauaaguauaaaaacgcugugacggaccuccagcugcugaugcagagcacccccgccacaggauccggcucugcuaucuguagcggggucgccgugugcaagguucuccaccuggagggagaggugaauaaaauuaaguccgcgcuucugagcaccaacaaagccgucgugucucucuccaauggcguuagcgugcugacauuuaagguccuugaucugaagaacuacaucgacaaacaacuccugccuauucugaauaagcagucuuguuccaucccgaacauugaaaccgugaucgaguuccagcagaaaaauaaccggcuccuggaaaucacgcgcgaguuuagcgugaaugcuggcgucacaacccccguuucuacauauaugcuuaccaacuccgagcugcucagccugauuaaugauaugccuaucaccaacgaccaaaagaaacuuauguccaacaaugugcagauugugagacagcagucuuacagcaucaugugcauuaucaaggaagagguccuggccuaugugguucaacucccccuguacggggugaucgauacaccuuguuggaaacugcauacgagcccccucugcaccacaaacaccaaggaaggauccaauauuugucugacacggaccgaccgcggcugguacugcgauaacgcugggucugucuccuucuuuccucaggccgagacguguaaggugcagagcaauagaguuuucugcgacacaaugaacucucuuacccugccgagcgaagugaaucucugcaacgucgauaucuuuaaucccaaauaugacuguaagauuaugaccuccaaaacagaugugucuagcuccgucaucaccagccugggagcgauugugucuugcuacggcaagacaaaauguacggccuccaacaagaaucgggggaucaucaagaccuucagcaacggaugcgacuauguuucuaauaaaggcguggacacagucuccgugggcaacacccuuuacuguguuaauaagcaagaggggcagagccuguaugugaaaggagagccuauuaucaacuuuuacgauccccucgucuucccuuccgacgaauuugaugcuucuauuagccaggugaacgagaagaucaaucagucccuggccuucauucgcaaaucugacgaacugcuccacaacgugaaugcuggcaagagcacaaccaacaucaugauuacgaccaucaucauuguuaucauugucauccugcuuucccugauugccguggggcuccugcuguauugcaaggccagaugaggacuaguaauaaggaaacuguaugaaugucugugggcaggaagugaagagauccuucuguaaagguuuuuggaauuaugucugcugaauaauaaacuuuuuugaaauaauaaaucugguagaaaaaugagaucuaaaaaaaaaaaaaaaaaaaaaaaaaaaaaaaaaaaaaaaaaaaaaaaaaaaaaaaaaaaaaaaaugcaucccccccccccccccccccccccccccccccaaaggcucuuuucagagccaccagaauu

SEQ ID NO: 3768 - RNA, 1931 nt, Artificial Sequence
  mRNA product Design g-4 comprising derived and/or modified sequence from HRSV(A2)__F-del_DSCav1_mut3 (opt6)
gggagacuccugucgggcggaaguaggaggaguagaguuuaaaaacaguacucuuuuuccgguucgggacguaguugaagcaacgacaagccggauaaccgcucuugagacaggaagcuuaccauggaauuacuaauccugaaagcaaacgcaauuacuacaauacuaacagcaguaaccuuuugcuuugccucaggacaaaacauaacugaagaauuuuaccaaucaacuugcucagcagucucaaaaggcuaucuaggagcacuacgaacagguugguauacuucagucauaacaauagaauuaucaaacauaaaagaaauuaaauguaacggaacugacgcaaaaguaaaacucaucaaacaagaacucgauaaauacaaaaacgcuguaaccgacuuacaacuacuaaugcaaucaacuccagcaacaggcuccggauccgcaauaugcagugguguagcaguaugcaaaguccuacaccuagaaggagaaguaaauaagauaaaaucugcucuacuaucaacaaauaaagcaguugucucccuaucaaauggagucucaguacucaccuucaaaguauuagaccucaaaaacuacauagacaaacaacuauuaccaauacucaacaaacaauccugcuccaucccuaacauagaaaccguaaucgaauuucaacaaaaaaauaacagacucuuagaaauaacuagagaauuuucaguuaaugcaggcgugacaacaccaguaucaacauauaugcuaacaaacuccgaacuccuaucccuaauaaacgacaugccaaucacaaacgaccaaaaaaaacuaauguccaacaacguacaaaucguaagacaacaaucauacucuauaaugugcauaauaaaagaagaaguacuggccuacguaguacaauuaccacucuacggaguaauagacaccccaugcuggaaacuccauacaucaccccuaugcacaacaaacacaaaagaaggauccaacauaugucucacuagaacagacagaggcugguacugcgacaacgcuggauccgucucauucuucccccaagcagaaacauguaaaguacaaucuaauagaguauuuugugacacaaugaacagccucacacuaccauccgaagucaaccuauguaacguagauauauuuaaucccaaauacgacugcaaaauaaugacauccaaaacagauguaucaucauccguuaucaccucacuaggagccauaguuucaugcuacggaaaaacaaaaugcacugcaucuaacaaaaauagagguauaauaaaaacauuuuccaacggcugcgacuacgucucaaacaaaggcguagacaccguaucaguaggaaauacauuauauugcguaaauaaacaagaaggccaaucccuauacguaaaaggagaacccaucauaaacuucuaugacccacuuguuuuccccucagacgaauuugacgccucaauaucacaaguaaaugaaaaaauaaaccaaucucuugccuucauuagaaaaucagacgaauuacuacacaacgucaacgcaggaaaaucaacaacaaacaucaugauaacaacgauaauaauagucauaauaguaauacuacuaucauuaaucgcagucggacuccuauuauauugcaaagcuagauaaggacuaguaauaaggaaacuguaugaaugucugugggcaggaagugaagagauccuucuguaaagguuuuuggaauuaugucugcugaauaauaaacuuuuuugaaauaauaaaucugguagaaaaaugagaucuaaaaaaaaaaaaaaaaaaaaaaaaaaaaaaaaaaaaaaaaaaaaaaaaaaaaaaaaaaaaaaaaugcaucccccccccccccccccccccccccccccccaaaggcucuuuucagagccaccagaauu

SEQ ID NO: 3769 - RNA, 1931 nt, Artificial Sequence
  mRNA product Design g-4 comprising derived and/or modified sequence from HRSV(A2)__F-del_DSCav1_mut3 (opt11)
gggagacuccugucgggcggaaguaggaggaguagaguuuaaaaacaguacucuuuuuccgguucgggacguaguugaagcaacgacaagccggauaaccgcucuugagacaggaagcuuaccauggaacuacucauacuaaaagccaacgccauaaccaccauccucaccgcaguaacuuucugcuucgcuuccggccaaaacaucaccgaagaauuuuaccaaaguaccugcagcgcagucucaaaaggauaccuaggcgcccuacgcacaggcugguacaccuccgucauuaccaucgaacucuccaacaucaaagaaauuaaaugcaacgguacagacgcaaaagucaaacucaucaaacaagaacucgacaaauacaaaaacgcagucaccgaccuccaacuccucaugcaauccacccccgccacaggcucuggcuccgccaucugcucaggcguagcagucugcaaaguccugcaccucgaaggcgaagucaacaaaaucaagucagcccuccucuccaccaacaaggccgucguaucccucucaaacggaguuagcguccucaccuucaaaguccuagaccucaaaaacuacaucgauaaacaacuacuccccauccuaaacaaacaaucaugcuccaucccaaacaucgaaaccguaaucgaguuccaacaaaagaacaaccgccuccucgaaaucacacgugaguucuccguuaacgccggcgucaccacccccgucucuacauacaugcucaccaacuccgaacuccuuucccucaucaacgacaugccaaucaccaacgaccaaaagaaacucaugucaaacaacguacaaaucguccgacaacaaagcuacuccaucaugugcaucaucaaagaagaaguccuugcauacgucguucaacuaccccucuacggcguaaucgacacucccugcuggaaacuccacaccuccccgcucugcacaaccaacaccaaagaaggcagcaacaucugccucacccgaaccgaccgcggcugguacugcgauaacgccggauccgucuccuucuucccacaagcagaaacuugcaaaguccaauccaaccgcgucuucugcgacaccaugaacucccucacacuccccuccgaagucaaccugugcaacgucgacaucuucaacccaaaauacgacugcaaaaucaugaccucaaaaaccgacgucucaucuucugucaucaccucucucggcgcuaucgucuccugcuauggcaaaaccaaaugcaccgccuccaacaagaaccgcggcauuaucaagaccuucuccaacggcugcgacuacgucuccaauaagggcgucgacaccgucucugucggcaacacccuuuacugcguaaacaaacaagaaggucaaucucucuacgucaaaggagaacccaucaucaacuucuacgacccccuggucuuccccuccgacgaguucgaugcaucaaucucccaagucaacgaaaagaucaaccaaucucucgcuuucauccgcaaauccgacgaacuccuacacaacguaaacgccggcaaauccaccacaaacaucaugaucaccaccauuaucauagucaucaucgucauccuccucuccuuaaucgccguuggccuccuucucuacugcaaagcccgauaaggacuaguaauaaggaaacuguaugaaugucugugggcaggaagugaagagauccuucuguaaagguuuuuggaauuaugucugcugaauaauaaacuuuuuugaaauaauaaaucugguagaaaaaugagaucuaaaaaaaaaaaaaaaaaaaaaaaaaaaaaaaaaaaaaaaaaaaaaaaaaaaaaaaaaaaaaaaaugcaucccccccccccccccccccccccccccccccaaaggcucuuuucagagccaccagaauu

SEQ ID NO: 3770 - RNA, 1907 nt, Artificial Sequence
  mRNA product Design g-5 comprising derived and/or modified sequence from HRSV(A2)__F-del_DSCav1_mut3 (opt1)
gggagacccgugacccggaaguuguacggcuacgcgacuuucccucccacaaacccucgcgcccuuccuuuccuacuugggcccggcagaaagcuuaccauggagcugcucauccugaaggccaacgccaucaccaccauccugacggcggugaccuucugcuucgccagcggccagaacaucaccgaggaguucuaccaguccacgugcagcgccgucuccaagggguaccucggcgcccugcggaccggcugguacaccuccgugaucaccaucgagcugagcaacaucaaggagaucaagugcaacgggaccgacgccaaggugaagcucaucaagcaggagcuggacaaguacaagaacgcggucacggaccugcagcuccugaugcaguccaccccggcaaccggcuccggcuccgccaucugcagcggcgucgccgugugcaaggugcugcaccucgagggggaggucaacaagaucaagagcgcccugcuguccaccaacaaggccguggugagccucuccaacggcgucagcgugcugaccuucaaggugcuggaccucaagaacuacaucgacaagcagcugcugcccauccugaacaagcagagcugcuccauccccaacaucgagacggugaucgaguuccagcagaagaacaaccggcuccuggagaucacccgcgaguucagcgugaacgccggggucaccacccccguguccacguacaugcugaccaacagcgagcuccugucccugaucaacgacaugccgaucaccaacgaccagaagaagcucaugagcaacaacgugcagaucguccggcagcaguccuacagcaucaugugcaucaucaaggaggaggugcuggcguacgugguccagcugccccucuacggcgugaucgacacccccugcuggaagcugcacacgagcccccugugcaccaccaacaccaaggagggguccaacaucugccucacgcgcaccgaccggggcugguacugcgacaacgccggcagcgucuccuucuucccgcaggccgagaccugcaaggugcagagcaaccgcguguucugcgacaccaugaacucccugacgcugcccagcgagguaaaccucugcaacgucgacaucuucaaccccaaguacgacugcaagaucaugaccuccaagaccgacgugagcuccagcgugaucaccucccugggggccaucgucagcugcuacggcaagacgaagugcaccgccagcaacaagaaccgggggaucaucaagaccuucuccaacggcugcgacuacgugagcaacaagggcguggacaccguguccgucgggaacacccuguacugcgugaacaagcaggagggccagagccucuacgugaagggggagcccaucaucaacuucuacgacccgcuggucuuccccuccgacgaguucgacgcgagcaucucccaggugaacgagaagaucaaccagagccuggccuucauccgcaaguccgacgagcugcuccacaacgugaacgccggcaagagcacgaccaacaucaugaucaccaccaucaucaucgucaucaucgugauccugcugucccucaucgccguggggcugcugcucuacugcaaggcccggugaggacuaguaauaaggaaacuguaugaaugucugugggcaggaagugaagagauccuucuguaaagguuuuuggaauuaugucugcugaauaauaaacuuuuuugaaauaauaaaucugguagaaaaaugagaucuaaaaaaaaaaaaaaaaaaaaaaaaaaaaaaaaaaaaaaaaaaaaaaaaaaaaaaaaaaaaaaaaugcaucccccccccccccccccccccccccccccccaaaggcucuuuucagagccaccagaauu

SEQ ID NO: 3771 - RNA, 1907 nt, Artificial Sequence
  mRNA product Design g-5 comprising derived and/or modified sequence from HRSV(A2)__F-del_DSCav1_mut3 (opt1)
gggagacccgugacccggaaguuguacggcuacgcgacuuucccucccacaaacccucgcgcccuuccuuuccuacuugggcccggcagaaagcuuaccauggagcugcucauccugaaggccaacgccaucaccaccauccugacggcggugaccuucugcuucgccagcggccagaacaucaccgaggaguucuaccaguccacgugcagcgccgucuccaagggguaccucggcgcccugcgcaccgggugguacaccagcgugaucaccaucgagcuguccaacaucaaggagaucaagugcaacggcaccgacgccaaggugaagcucaucaagcaggagcuggacaaguacaagaacgcggucacggaccugcagcuccugaugcagagcacccccgccaccggguccggcagcgccaucugcuccggcguggccgugugcaagguccugcaccucgagggggaggugaacaagaucaagagcgcgcugcuguccaccaacaaggccguggucagccucuccaacggcgugagcgugcugacguucaagguccuggaccucaagaacuacaucgacaagcagcugcugccgauccucaacaagcaguccugcagcauccccaacaucgagaccgugaucgaguuccagcagaagaacaaccggcugcuggagaucacccgcgaguucuccgugaacgccggggucaccacgcccgugagcaccuacaugcucaccaacuccgagcugcugagccucaucaacgacaugcccaucaccaacgaccagaagaagcugaugagcaacaacgugcagaucguccggcagcaguccuacagcaucaugugcaucaucaaggaggaggugcuggccuacgugguccagcucccgcuguacggcgugaucgacacgcccugcuggaagcugcacaccagcccccucugcaccaccaacacgaaggagggguccaacaucugccugacccgcaccgaccggggcugguacugcgacaacgccggcuccgugagcuucuucccccaggcggagaccugcaagguccaguccaaccgcguguucugcgacacgaugaacagccugacccucccguccgaggucaaccugugcaacguggacaucuucaaccccaaguacgacugcaagaucaugaccagcaagaccgacguguccagcuccgucaucacgagccugggggccaucguguccugcuacggcaagaccaagugcaccgccagcaacaagaaccgggggaucaucaagaccuucuccaacggcugcgacuacgugagcaacaagggcgucgacacgguguccguggggaacacccucuacugcgucaacaagcaggagggccagagccuguacgugaagggggagcccaucaucaacuucuacgacccccugguguucccgagcgacgaguucgacgccuccaucagccaggucaacgagaagaucaaccagucccucgccuucauccgcaagagcgacgagcugcugcacaacgugaacgcgggcaaguccaccaccaacaucaugaucaccacgaucaucaucgugaucaucgucauccuccugagccugaucgccguggggcuccugcuguacugcaaggcccggugaggacuaguaauaaggaaacuguaugaaugucugugggcaggaagugaagagauccuucuguaaagguuuuuggaauuaugucugcugaauaauaaacuuuuuugaaauaauaaaucugguagaaaaaugagaucuaaaaaaaaaaaaaaaaaaaaaaaaaaaaaaaaaaaaaaaaaaaaaaaaaaaaaaaaaaaaaaaaugcaucccccccccccccccccccccccccccccccaaaggcucuuuucagagccaccagaauu

SEQ ID NO: 3772 - RNA, 1907 nt, Artificial Sequence
  mRNA product Design g-5 comprising derived and/or modified sequence from HRSV(A2)__F-del_DSCav1_mut3 (opt2)
gggagacccgugacccggaaguuguacggcuacgcgacuuucccucccacaaacccucgcgcccuuccuuuccuacuugggcccggcagaaagcuuaccauggagcuccucauccucaaggccaacgccaucaccaccauccucaccgccgucaccuucugcuucgccuccggccagaacaucaccgaggaguucuaccaguccaccugcuccgccgucuccaagggcuaccucggcgcccuccgcaccggcugguacaccuccgucaucaccaucgagcucuccaacaucaaggagaucaagugcaacggcaccgacgccaaggucaagcucaucaagcaggagcucgacaaguacaagaacgccgucaccgaccuccagcuccucaugcaguccacccccgccaccggcuccggcuccgccaucugcuccggcgucgccgucugcaagguccuccaccucgagggcgaggucaacaagaucaaguccgcccuccucuccaccaacaaggccgucgucucccucuccaacggcgucuccguccucaccuucaagguccucgaccucaagaacuacaucgacaagcagcuccuccccauccucaacaagcaguccugcuccauccccaacaucgagaccgucaucgaguuccagcagaagaacaaccgccuccucgagaucacccgcgaguucuccgucaacgccggcgucaccacccccgucuccaccuacaugcucaccaacuccgagcuccucucccucaucaacgacaugcccaucaccaacgaccagaagaagcucauguccaacaacguccagaucguccgccagcaguccuacuccaucaugugcaucaucaaggaggagguccucgccuacgucguccagcucccccucuacggcgucaucgacacccccugcuggaagcuccacaccuccccccucugcaccaccaacaccaaggagggcuccaacaucugccucacccgcaccgaccgcggcugguacugcgacaacgccggcuccgucuccuucuucccccaggccgagaccugcaagguccaguccaaccgcgucuucugcgacaccaugaacucccucacccuccccuccgaggucaaccucugcaacgucgacaucuucaaccccaaguacgacugcaagaucaugaccuccaagaccgacgucuccuccuccgucaucaccucccucggcgccaucgucuccugcuacggcaagaccaagugcaccgccuccaacaagaaccgcggcaucaucaagaccuucuccaacggcugcgacuacgucuccaacaagggcgucgacaccgucuccgucggcaacacccucuacugcgucaacaagcaggagggccagucccucuacgucaagggcgagcccaucaucaacuucuacgacccccucgucuuccccuccgacgaguucgacgccuccaucucccaggucaacgagaagaucaaccagucccucgccuucauccgcaaguccgacgagcuccuccacaacgucaacgccggcaaguccaccaccaacaucaugaucaccaccaucaucaucgucaucaucgucauccuccucucccucaucgccgucggccuccuccucuacugcaaggcccgcugaggacuaguaauaaggaaacuguaugaaugucugugggcaggaagugaagagauccuucuguaaagguuuuuggaauuaugucugcugaauaauaaacuuuuuugaaauaauaaaucugguagaaaaaugagaucuaaaaaaaaaaaaaaaaaaaaaaaaaaaaaaaaaaaaaaaaaaaaaaaaaaaaaaaaaaaaaaaaugcaucccccccccccccccccccccccccccccccaaaggcucuuuucagagccaccagaauu

SEQ ID NO: 3773 - RNA, 1907 nt, Artificial Sequence
  mRNA product Design g-5 comprising derived and/or modified sequence from HRSV(A2)__F-del_DSCav1_mut3 (opt3)
gggagacccgugacccggaaguuguacggcuacgcgacuuucccucccacaaacccucgcgcccuuccuuuccuacuugggcccggcagaaagcuuaccauggagcugcucauccuuaaggccaacgcuauuaccacaauacugacugcagugacguucugcuuugccagcggccagaauaucaccgaagaguucuaccaauccacauguucugcggucucaaaaggguauuugggagcuuuaagaacugguugguacaccaguguuauuacaaucgaacugagcaacauuaaggagaucaaaugcaauggcaccgacgccaaggugaaacuaauaaagcaggaacucgauaaguauaaaaacgcaguaacugaccugcagcuucugaugcaguccacacccgccaccgggucuggaucggcuaucuguucaggcguggcagucugcaagguguugcaccucgagggugagguuaauaaaauuaagagcgcccugcugaguacgaacaaagcuguggucucccucucuaauggggugagcguauuaacuuuuaagguucuggaucuuaagaacuacaucgacaaacaauugcugccuauucuaaauaagcaguccuguucaaucccaaacauagaaaccgugauugaguuccagcagaaaaauaacaggcuccuggaaaucacacgggaguuuagugucaaugccggagugacuaccccggugagcacauauaugcuuaccaacucugagcuguugucccucauuaaugauaugcccaucacgaacgaccaaaagaaacugaugucaaacaauguccagaucguucgccagcagagcuacaguauuaugugcauaaucaaggaagagguguuagcguauguagugcaacugccucucuacggcgucauugauacuccauguuggaaacuucauacaucuccccugugcaccacuaacacaaaggaaggcuccaauaucuguuugacccgaacggaccgugggugguacugcgauaacgcaggaagcgugucguucuuuccucaggccgagaccuguaagguucagucuaauagaguguucugcgacacaaugaacucccuaacucugccaucagaagucaaucucugcaacguggauauauuuaaucccaaauaugacuguaagauuaugaccaguaaaacagauguaagcuccucuguuaucacuagccugggugcuaucgugucaugcuacggcaagaccaaauguacagccaguaacaagaauagggggauuaucaagaccuucuccaacggaugcgacuaugucagcaauaaaggcguggacacugucucuguggguaacacgcuuuacuguguuaauaagcaagaggggcagucacuguaugugaaaggagagccuauuauaaacuuuuacgauccauugguauucccgagugacgaauuugaugcaagcaucucccaggucaacgagaagauuaaucagucucucgcuuucauccggaaaucggacgaacuguuacacaacgugaaugccggcaagagcacaaccaacaucaugauuacuaccauaaucauuguuaucauugugauccugcuaucccucauagcggucggccugcuuuuguauugcaaggcccgcugaggacuaguaauaaggaaacuguaugaaugucugugggcaggaagugaagagauccuucuguaaagguuuuuggaauuaugucugcugaauaauaaacuuuuuugaaauaauaaaucugguagaaaaaugagaucuaaaaaaaaaaaaaaaaaaaaaaaaaaaaaaaaaaaaaaaaaaaaaaaaaaaaaaaaaaaaaaaaugcaucccccccccccccccccccccccccccccccaaaggcucuuuucagagccaccagaauu

SEQ ID NO: 3774 - RNA, 1907 nt, Artificial Sequence
  mRNA product Design g-5 comprising derived and/or modified sequence from HRSV(A2)__F-del_DSCav1_mut3 (opt4)
gggagacccgugacccggaaguuguacggcuacgcgacuuucccucccacaaacccucgcgcccuuccuuuccuacuugggcccggcagaaagcuuaccauggagcugcugauccugaaggccaacgccaucaccaccauccugaccgccgugaccuucugcuucgccagcggccagaacaucaccgaggaguucuaccagagcaccugcagcgccgugagcaagggcuaccugggcgcccugagaaccggcugguacaccagcgugaucaccaucgagcugagcaacaucaaggagaucaagugcaacggcaccgacgccaaggugaagcugaucaagcaggagcuggacaaguacaagaacgccgugaccgaccugcagcugcugaugcagagcacccccgccaccggcagcggcagcgccaucugcagcggcguggccgugugcaaggugcugcaccuggagggcgaggugaacaagaucaagagcgcccugcugagcaccaacaaggccguggugagccugagcaacggcgugagcgugcugaccuucaaggugcuggaccugaagaacuacaucgacaagcagcugcugcccauccugaacaagcagagcugcagcauccccaacaucgagaccgugaucgaguuccagcagaagaacaacagacugcuggagaucaccagagaguucagcgugaacgccggcgugaccacccccgugagcaccuacaugcugaccaacagcgagcugcugagccugaucaacgacaugcccaucaccaacgaccagaagaagcugaugagcaacaacgugcagaucgugagacagcagagcuacagcaucaugugcaucaucaaggaggaggugcuggccuacguggugcagcugccccuguacggcgugaucgacacccccugcuggaagcugcacaccagcccccugugcaccaccaacaccaaggagggcagcaacaucugccugaccagaaccgacagaggcugguacugcgacaacgccggcagcgugagcuucuucccccaggccgagaccugcaaggugcagagcaacagaguguucugcgacaccaugaacagccugacccugcccagcgaggugaaccugugcaacguggacaucuucaaccccaaguacgacugcaagaucaugaccagcaagaccgacgugagcagcagcgugaucaccagccugggcgccaucgugagcugcuacggcaagaccaagugcaccgccagcaacaagaacagaggcaucaucaagaccuucagcaacggcugcgacuacgugagcaacaagggcguggacaccgugagcgugggcaacacccuguacugcgugaacaagcaggagggccagagccuguacgugaagggcgagcccaucaucaacuucuacgacccccugguguuccccagcgacgaguucgacgccagcaucagccaggugaacgagaagaucaaccagagccuggccuucaucagaaagagcgacgagcugcugcacaacgugaacgccggcaagagcaccaccaacaucaugaucaccaccaucaucaucgugaucaucgugauccugcugagccugaucgccgugggccugcugcuguacugcaaggccagaugaggacuaguaauaaggaaacuguaugaaugucugugggcaggaagugaagagauccuucuguaaagguuuuuggaauuaugucugcugaauaauaaacuuuuuugaaauaauaaaucugguagaaaaaugagaucuaaaaaaaaaaaaaaaaaaaaaaaaaaaaaaaaaaaaaaaaaaaaaaaaaaaaaaaaaaaaaaaaugcaucccccccccccccccccccccccccccccccaaaggcucuuuucagagccaccagaauu

SEQ ID NO: 3775 - RNA, 1907 nt, Artificial Sequence
  mRNA product Design g-5 comprising derived and/or modified sequence from HRSV(A2)__F-del_DSCav1_mut3 (opt5)
gggagacccgugacccggaaguuguacggcuacgcgacuuucccucccacaaacccucgcgcccuuccuuuccuacuugggcccggcagaaagcuuaccauggagcugcucauccugaaggccaacgcuauuaccacaauccuuacggccgugaccuucugcuuugcgagcggccagaauauuacagaagaguucuaccaauccaccuguucugcugucagcaaaggguaucugggagcccucagaacaggcugguacaccuccguuaucacaauugaacugucuaacaucaaggagaucaaaugcaaugggaccgacgccaaggugaaacuuauuaagcaggaacuggauaaguauaaaaacgcugugacggaccuccagcugcugaugcagagcacccccgccacaggauccggcucugcuaucuguagcggggucgccgugugcaagguucuccaccuggagggagaggugaauaaaauuaaguccgcgcuucugagcaccaacaaagccgucgugucucucuccaauggcguuagcgugcugacauuuaagguccuugaucugaagaacuacaucgacaaacaacuccugccuauucugaauaagcagucuuguuccaucccgaacauugaaaccgugaucgaguuccagcagaaaaauaaccggcuccuggaaaucacgcgcgaguuuagcgugaaugcuggcgucacaacccccguuucuacauauaugcuuaccaacuccgagcugcucagccugauuaaugauaugccuaucaccaacgaccaaaagaaacuuauguccaacaaugugcagauugugagacagcagucuuacagcaucaugugcauuaucaaggaagagguccuggccuaugugguucaacucccccuguacggggugaucgauacaccuuguuggaaacugcauacgagcccccucugcaccacaaacaccaaggaaggauccaauauuugucugacacggaccgaccgcggcugguacugcgauaacgcugggucugucuccuucuuuccucaggccgagacguguaaggugcagagcaauagaguuuucugcgacacaaugaacucucuuacccugccgagcgaagugaaucucugcaacgucgauaucuuuaaucccaaauaugacuguaagauuaugaccuccaaaacagaugugucuagcuccgucaucaccagccugggagcgauugugucuugcuacggcaagacaaaauguacggccuccaacaagaaucgggggaucaucaagaccuucagcaacggaugcgacuauguuucuaauaaaggcguggacacagucuccgugggcaacacccuuuacuguguuaauaagcaagaggggcagagccuguaugugaaaggagagccuauuaucaacuuuuacgauccccucgucuucccuuccgacgaauuugaugcuucuauuagccaggugaacgagaagaucaaucagucccuggccuucauucgcaaaucugacgaacugcuccacaacgugaaugcuggcaagagcacaaccaacaucaugauuacgaccaucaucauuguuaucauugucauccugcuuucccugauugccguggggcuccugcuguauugcaaggccagaugaggacuaguaauaaggaaacuguaugaaugucugugggcaggaagugaagagauccuucuguaaagguuuuuggaauuaugucugcugaauaauaaacuuuuuugaaauaauaaaucugguagaaaaaugagaucuaaaaaaaaaaaaaaaaaaaaaaaaaaaaaaaaaaaaaaaaaaaaaaaaaaaaaaaaaaaaaaaaugcaucccccccccccccccccccccccccccccccaaaggcucuuuucagagccaccagaauu

SEQ ID NO: 3776 - RNA, 1907 nt, Artificial Sequence
  mRNA product Design g-5 comprising derived and/or modified sequence from HRSV(A2)__F-del_DSCav1_mut3 (opt6)
gggagacccgugacccggaaguuguacggcuacgcgacuuucccucccacaaacccucgcgcccuuccuuuccuacuugggcccggcagaaagcuuaccauggaauuacuaauccugaaagcaaacgcaauuacuacaauacuaacagcaguaaccuuuugcuuugccucaggacaaaacauaacugaagaauuuuaccaaucaacuugcucagcagucucaaaaggcuaucuaggagcacuacgaacagguugguauacuucagucauaacaauagaauuaucaaacauaaaagaaauuaaauguaacggaacugacgcaaaaguaaaacucaucaaacaagaacucgauaaauacaaaaacgcuguaaccgacuuacaacuacuaaugcaaucaacuccagcaacaggcuccggauccgcaauaugcagugguguagcaguaugcaaaguccuacaccuagaaggagaaguaaauaagauaaaaucugcucuacuaucaacaaauaaagcaguugucucccuaucaaauggagucucaguacucaccuucaaaguauuagaccucaaaaacuacauagacaaacaacuauuaccaauacucaacaaacaauccugcuccaucccuaacauagaaaccguaaucgaauuucaacaaaaaaauaacagacucuuagaaauaacuagagaauuuucaguuaaugcaggcgugacaacaccaguaucaacauauaugcuaacaaacuccgaacuccuaucccuaauaaacgacaugccaaucacaaacgaccaaaaaaaacuaauguccaacaacguacaaaucguaagacaacaaucauacucuauaaugugcauaauaaaagaagaaguacuggccuacguaguacaauuaccacucuacggaguaauagacaccccaugcuggaaacuccauacaucaccccuaugcacaacaaacacaaaagaaggauccaacauaugucucacuagaacagacagaggcugguacugcgacaacgcuggauccgucucauucuucccccaagcagaaacauguaaaguacaaucuaauagaguauuuugugacacaaugaacagccucacacuaccauccgaagucaaccuauguaacguagauauauuuaaucccaaauacgacugcaaaauaaugacauccaaaacagauguaucaucauccguuaucaccucacuaggagccauaguuucaugcuacggaaaaacaaaaugcacugcaucuaacaaaaauagagguauaauaaaaacauuuuccaacggcugcgacuacgucucaaacaaaggcguagacaccguaucaguaggaaauacauuauauugcguaaauaaacaagaaggccaaucccuauacguaaaaggagaacccaucauaaacuucuaugacccacuuguuuuccccucagacgaauuugacgccucaauaucacaaguaaaugaaaaaauaaaccaaucucuugccuucauuagaaaaucagacgaauuacuacacaacgucaacgcaggaaaaucaacaacaaacaucaugauaacaacgauaauaauagucauaauaguaauacuacuaucauuaaucgcagucggacuccuauuauauugcaaagcuagauaaggacuaguaauaaggaaacuguaugaaugucugugggcaggaagugaagagauccuucuguaaagguuuuuggaauuaugucugcugaauaauaaacuuuuuugaaauaauaaaucugguagaaaaaugagaucuaaaaaaaaaaaaaaaaaaaaaaaaaaaaaaaaaaaaaaaaaaaaaaaaaaaaaaaaaaaaaaaaugcaucccccccccccccccccccccccccccccccaaaggcucuuuucagagccaccagaauu

SEQ ID NO: 3777 - RNA, 1907 nt, Artificial Sequence
  mRNA product Design g-5 comprising derived and/or modified sequence from HRSV(A2)__F-del_DSCav1_mut3 (opt11)
gggagacccgugacccggaaguuguacggcuacgcgacuuucccucccacaaacccucgcgcccuuccuuuccuacuugggcccggcagaaagcuuaccauggaacuacucauacuaaaagccaacgccauaaccaccauccucaccgcaguaacuuucugcuucgcuuccggccaaaacaucaccgaagaauuuuaccaaaguaccugcagcgcagucucaaaaggauaccuaggcgcccuacgcacaggcugguacaccuccgucauuaccaucgaacucuccaacaucaaagaaauuaaaugcaacgguacagacgcaaaagucaaacucaucaaacaagaacucgacaaauacaaaaacgcagucaccgaccuccaacuccucaugcaauccacccccgccacaggcucuggcuccgccaucugcucaggcguagcagucugcaaaguccugcaccucgaaggcgaagucaacaaaaucaagucagcccuccucuccaccaacaaggccgucguaucccucucaaacggaguuagcguccucaccuucaaaguccuagaccucaaaaacuacaucgauaaacaacuacuccccauccuaaacaaacaaucaugcuccaucccaaacaucgaaaccguaaucgaguuccaacaaaagaacaaccgccuccucgaaaucacacgugaguucuccguuaacgccggcgucaccacccccgucucuacauacaugcucaccaacuccgaacuccuuucccucaucaacgacaugccaaucaccaacgaccaaaagaaacucaugucaaacaacguacaaaucguccgacaacaaagcuacuccaucaugugcaucaucaaagaagaaguccuugcauacgucguucaacuaccccucuacggcguaaucgacacucccugcuggaaacuccacaccuccccgcucugcacaaccaacaccaaagaaggcagcaacaucugccucacccgaaccgaccgcggcugguacugcgauaacgccggauccgucuccuucuucccacaagcagaaacuugcaaaguccaauccaaccgcgucuucugcgacaccaugaacucccucacacuccccuccgaagucaaccugugcaacgucgacaucuucaacccaaaauacgacugcaaaaucaugaccucaaaaaccgacgucucaucuucugucaucaccucucucggcgcuaucgucuccugcuauggcaaaaccaaaugcaccgccuccaacaagaaccgcggcauuaucaagaccuucuccaacggcugcgacuacgucuccaauaagggcgucgacaccgucucugucggcaacacccuuuacugcguaaacaaacaagaaggucaaucucucuacgucaaaggagaacccaucaucaacuucuacgacccccuggucuuccccuccgacgaguucgaugcaucaaucucccaagucaacgaaaagaucaaccaaucucucgcuuucauccgcaaauccgacgaacuccuacacaacguaaacgccggcaaauccaccacaaacaucaugaucaccaccauuaucauagucaucaucgucauccuccucuccuuaaucgccguuggccuccuucucuacugcaaagcccgauaaggacuaguaauaaggaaacuguaugaaugucugugggcaggaagugaagagauccuucuguaaagguuuuuggaauuaugucugcugaauaauaaacuuuuuugaaauaauaaaucugguagaaaaaugagaucuaaaaaaaaaaaaaaaaaaaaaaaaaaaaaaaaaaaaaaaaaaaaaaaaaaaaaaaaaaaaaaaaugcaucccccccccccccccccccccccccccccccaaaggcucuuuucagagccaccagaauu

SEQ ID NO: 3778 - RNA, 1923 nt, Artificial Sequence
  mRNA product Design h-1 comprising derived and/or modified sequence from HRSV(A2)__F-del_DSCav1_mut3 (opt1)
gggagacccgugacccggaaguuguacggcuacgcgacuuucccucccacaaacccucgcgcccuuccuuuccuacuugggcccggcagaaagcuuaccauggagcugcucauccugaaggccaacgccaucaccaccauccugacggcggugaccuucugcuucgccagcggccagaacaucaccgaggaguucuaccaguccacgugcagcgccgucuccaagggguaccucggcgcccugcggaccggcugguacaccuccgugaucaccaucgagcugagcaacaucaaggagaucaagugcaacgggaccgacgccaaggugaagcucaucaagcaggagcuggacaaguacaagaacgcggucacggaccugcagcuccugaugcaguccaccccggcaaccggcuccggcuccgccaucugcagcggcgucgccgugugcaaggugcugcaccucgagggggaggucaacaagaucaagagcgcccugcuguccaccaacaaggccguggugagccucuccaacggcgucagcgugcugaccuucaaggugcuggaccucaagaacuacaucgacaagcagcugcugcccauccugaacaagcagagcugcuccauccccaacaucgagacggugaucgaguuccagcagaagaacaaccggcuccuggagaucacccgcgaguucagcgugaacgccggggucaccacccccguguccacguacaugcugaccaacagcgagcuccugucccugaucaacgacaugccgaucaccaacgaccagaagaagcucaugagcaacaacgugcagaucguccggcagcaguccuacagcaucaugugcaucaucaaggaggaggugcuggcguacgugguccagcugccccucuacggcgugaucgacacccccugcuggaagcugcacacgagcccccugugcaccaccaacaccaaggagggguccaacaucugccucacgcgcaccgaccggggcugguacugcgacaacgccggcagcgucuccuucuucccgcaggccgagaccugcaaggugcagagcaaccgcguguucugcgacaccaugaacucccugacgcugcccagcgagguaaaccucugcaacgucgacaucuucaaccccaaguacgacugcaagaucaugaccuccaagaccgacgugagcuccagcgugaucaccucccugggggccaucgucagcugcuacggcaagacgaagugcaccgccagcaacaagaaccgggggaucaucaagaccuucuccaacggcugcgacuacgugagcaacaagggcguggacaccguguccgucgggaacacccuguacugcgugaacaagcaggagggccagagccucuacgugaagggggagcccaucaucaacuucuacgacccgcuggucuuccccuccgacgaguucgacgcgagcaucucccaggugaacgagaagaucaaccagagccuggccuucauccgcaaguccgacgagcugcuccacaacgugaacgccggcaagagcacgaccaacaucaugaucaccaccaucaucaucgucaucaucgugauccugcugucccucaucgccguggggcugcugcucuacugcaaggcccggugaggacuaguacuggcugcaucucccuuuccucuguccuccauccuucucccaggauggugaagggggaccugguacccagugauccccaccccaggauccuaaaucaugacuuaccugcuaauaaaaacucauuggaaaagugagaagaucuaaaaaaaaaaaaaaaaaaaaaaaaaaaaaaaaaaaaaaaaaaaaaaaaaaaaaaaaaaaaaaaaugcaucccccccccccccccccccccccccccccccaaaggcucuuuucagagccaccagaauu

SEQ ID NO: 3779 - RNA, 1923 nt, Artificial Sequence
  mRNA product Design h-1 comprising derived and/or modified sequence from HRSV(A2)__F-del_DSCav1_mut3 (opt1)
gggagacccgugacccggaaguuguacggcuacgcgacuuucccucccacaaacccucgcgcccuuccuuuccuacuugggcccggcagaaagcuuaccauggagcugcucauccugaaggccaacgccaucaccaccauccugacggcggugaccuucugcuucgccagcggccagaacaucaccgaggaguucuaccaguccacgugcagcgccgucuccaagggguaccucggcgcccugcgcaccgggugguacaccagcgugaucaccaucgagcuguccaacaucaaggagaucaagugcaacggcaccgacgccaaggugaagcucaucaagcaggagcuggacaaguacaagaacgcggucacggaccugcagcuccugaugcagagcacccccgccaccggguccggcagcgccaucugcuccggcguggccgugugcaagguccugcaccucgagggggaggugaacaagaucaagagcgcgcugcuguccaccaacaaggccguggucagccucuccaacggcgugagcgugcugacguucaagguccuggaccucaagaacuacaucgacaagcagcugcugccgauccucaacaagcaguccugcagcauccccaacaucgagaccgugaucgaguuccagcagaagaacaaccggcugcuggagaucacccgcgaguucuccgugaacgccggggucaccacgcccgugagcaccuacaugcucaccaacuccgagcugcugagccucaucaacgacaugcccaucaccaacgaccagaagaagcugaugagcaacaacgugcagaucguccggcagcaguccuacagcaucaugugcaucaucaaggaggaggugcuggccuacgugguccagcucccgcuguacggcgugaucgacacgcccugcuggaagcugcacaccagcccccucugcaccaccaacacgaaggagggguccaacaucugccugacccgcaccgaccggggcugguacugcgacaacgccggcuccgugagcuucuucccccaggcggagaccugcaagguccaguccaaccgcguguucugcgacacgaugaacagccugacccucccguccgaggucaaccugugcaacguggacaucuucaaccccaaguacgacugcaagaucaugaccagcaagaccgacguguccagcuccgucaucacgagccugggggccaucguguccugcuacggcaagaccaagugcaccgccagcaacaagaaccgggggaucaucaagaccuucuccaacggcugcgacuacgugagcaacaagggcgucgacacgguguccguggggaacacccucuacugcgucaacaagcaggagggccagagccuguacgugaagggggagcccaucaucaacuucuacgacccccugguguucccgagcgacgaguucgacgccuccaucagccaggucaacgagaagaucaaccagucccucgccuucauccgcaagagcgacgagcugcugcacaacgugaacgcgggcaaguccaccaccaacaucaugaucaccacgaucaucaucgugaucaucgucauccuccugagccugaucgccguggggcuccugcuguacugcaaggcccggugaggacuaguacuggcugcaucucccuuuccucuguccuccauccuucucccaggauggugaagggggaccugguacccagugauccccaccccaggauccuaaaucaugacuuaccugcuaauaaaaacucauuggaaaagugagaagaucuaaaaaaaaaaaaaaaaaaaaaaaaaaaaaaaaaaaaaaaaaaaaaaaaaaaaaaaaaaaaaaaaugcaucccccccccccccccccccccccccccccccaaaggcucuuuucagagccaccagaauu

SEQ ID NO: 3780 - RNA, 1923 nt, Artificial Sequence
  mRNA product Design h-1 comprising derived and/or modified sequence from HRSV(A2)__F-del_DSCav1_mut3 (opt2)
gggagacccgugacccggaaguuguacggcuacgcgacuuucccucccacaaacccucgcgcccuuccuuuccuacuugggcccggcagaaagcuuaccauggagcuccucauccucaaggccaacgccaucaccaccauccucaccgccgucaccuucugcuucgccuccggccagaacaucaccgaggaguucuaccaguccaccugcuccgccgucuccaagggcuaccucggcgcccuccgcaccggcugguacaccuccgucaucaccaucgagcucuccaacaucaaggagaucaagugcaacggcaccgacgccaaggucaagcucaucaagcaggagcucgacaaguacaagaacgccgucaccgaccuccagcuccucaugcaguccacccccgccaccggcuccggcuccgccaucugcuccggcgucgccgucugcaagguccuccaccucgagggcgaggucaacaagaucaaguccgcccuccucuccaccaacaaggccgucgucucccucuccaacggcgucuccguccucaccuucaagguccucgaccucaagaacuacaucgacaagcagcuccuccccauccucaacaagcaguccugcuccauccccaacaucgagaccgucaucgaguuccagcagaagaacaaccgccuccucgagaucacccgcgaguucuccgucaacgccggcgucaccacccccgucuccaccuacaugcucaccaacuccgagcuccucucccucaucaacgacaugcccaucaccaacgaccagaagaagcucauguccaacaacguccagaucguccgccagcaguccuacuccaucaugugcaucaucaaggaggagguccucgccuacgucguccagcucccccucuacggcgucaucgacacccccugcuggaagcuccacaccuccccccucugcaccaccaacaccaaggagggcuccaacaucugccucacccgcaccgaccgcggcugguacugcgacaacgccggcuccgucuccuucuucccccaggccgagaccugcaagguccaguccaaccgcgucuucugcgacaccaugaacucccucacccuccccuccgaggucaaccucugcaacgucgacaucuucaaccccaaguacgacugcaagaucaugaccuccaagaccgacgucuccuccuccgucaucaccucccucggcgccaucgucuccugcuacggcaagaccaagugcaccgccuccaacaagaaccgcggcaucaucaagaccuucuccaacggcugcgacuacgucuccaacaagggcgucgacaccgucuccgucggcaacacccucuacugcgucaacaagcaggagggccagucccucuacgucaagggcgagcccaucaucaacuucuacgacccccucgucuuccccuccgacgaguucgacgccuccaucucccaggucaacgagaagaucaaccagucccucgccuucauccgcaaguccgacgagcuccuccacaacgucaacgccggcaaguccaccaccaacaucaugaucaccaccaucaucaucgucaucaucgucauccuccucucccucaucgccgucggccuccuccucuacugcaaggcccgcugaggacuaguacuggcugcaucucccuuuccucuguccuccauccuucucccaggauggugaagggggaccugguacccagugauccccaccccaggauccuaaaucaugacuuaccugcuaauaaaaacucauuggaaaagugagaagaucuaaaaaaaaaaaaaaaaaaaaaaaaaaaaaaaaaaaaaaaaaaaaaaaaaaaaaaaaaaaaaaaaugcaucccccccccccccccccccccccccccccccaaaggcucuuuucagagccaccagaauu

SEQ ID NO: 3781 - RNA, 1923 nt, Artificial Sequence
  mRNA product Design h-1 comprising derived and/or modified sequence from HRSV(A2)__F-del_DSCav1_mut3 (opt3)
gggagacccgugacccggaaguuguacggcuacgcgacuuucccucccacaaacccucgcgcccuuccuuuccuacuugggcccggcagaaagcuuaccauggagcugcucauccuuaaggccaacgcuauuaccacaauacugacugcagugacguucugcuuugccagcggccagaauaucaccgaagaguucuaccaauccacauguucugcggucucaaaaggguauuugggagcuuuaagaacugguugguacaccaguguuauuacaaucgaacugagcaacauuaaggagaucaaaugcaauggcaccgacgccaaggugaaacuaauaaagcaggaacucgauaaguauaaaaacgcaguaacugaccugcagcuucugaugcaguccacacccgccaccgggucuggaucggcuaucuguucaggcguggcagucugcaagguguugcaccucgagggugagguuaauaaaauuaagagcgcccugcugaguacgaacaaagcuguggucucccucucuaauggggugagcguauuaacuuuuaagguucuggaucuuaagaacuacaucgacaaacaauugcugccuauucuaaauaagcaguccuguucaaucccaaacauagaaaccgugauugaguuccagcagaaaaauaacaggcuccuggaaaucacacgggaguuuagugucaaugccggagugacuaccccggugagcacauauaugcuuaccaacucugagcuguugucccucauuaaugauaugcccaucacgaacgaccaaaagaaacugaugucaaacaauguccagaucguucgccagcagagcuacaguauuaugugcauaaucaaggaagagguguuagcguauguagugcaacugccucucuacggcgucauugauacuccauguuggaaacuucauacaucuccccugugcaccacuaacacaaaggaaggcuccaauaucuguuugacccgaacggaccgugggugguacugcgauaacgcaggaagcgugucguucuuuccucaggccgagaccuguaagguucagucuaauagaguguucugcgacacaaugaacucccuaacucugccaucagaagucaaucucugcaacguggauauauuuaaucccaaauaugacuguaagauuaugaccaguaaaacagauguaagcuccucuguuaucacuagccugggugcuaucgugucaugcuacggcaagaccaaauguacagccaguaacaagaauagggggauuaucaagaccuucuccaacggaugcgacuaugucagcaauaaaggcguggacacugucucuguggguaacacgcuuuacuguguuaauaagcaagaggggcagucacuguaugugaaaggagagccuauuauaaacuuuuacgauccauugguauucccgagugacgaauuugaugcaagcaucucccaggucaacgagaagauuaaucagucucucgcuuucauccggaaaucggacgaacuguuacacaacgugaaugccggcaagagcacaaccaacaucaugauuacuaccauaaucauuguuaucauugugauccugcuaucccucauagcggucggccugcuuuuguauugcaaggcccgcugaggacuaguacuggcugcaucucccuuuccucuguccuccauccuucucccaggauggugaagggggaccugguacccagugauccccaccccaggauccuaaaucaugacuuaccugcuaauaaaaacucauuggaaaagugagaagaucuaaaaaaaaaaaaaaaaaaaaaaaaaaaaaaaaaaaaaaaaaaaaaaaaaaaaaaaaaaaaaaaaugcaucccccccccccccccccccccccccccccccaaaggcucuuuucagagccaccagaauu

SEQ ID NO: 3782 - RNA, 1923 nt, Artificial Sequence
  mRNA product Design h-1 comprising derived and/or modified sequence from HRSV(A2)__F-del_DSCav1_mut3 (opt4)
gggagacccgugacccggaaguuguacggcuacgcgacuuucccucccacaaacccucgcgcccuuccuuuccuacuugggcccggcagaaagcuuaccauggagcugcugauccugaaggccaacgccaucaccaccauccugaccgccgugaccuucugcuucgccagcggccagaacaucaccgaggaguucuaccagagcaccugcagcgccgugagcaagggcuaccugggcgcccugagaaccggcugguacaccagcgugaucaccaucgagcugagcaacaucaaggagaucaagugcaacggcaccgacgccaaggugaagcugaucaagcaggagcuggacaaguacaagaacgccgugaccgaccugcagcugcugaugcagagcacccccgccaccggcagcggcagcgccaucugcagcggcguggccgugugcaaggugcugcaccuggagggcgaggugaacaagaucaagagcgcccugcugagcaccaacaaggccguggugagccugagcaacggcgugagcgugcugaccuucaaggugcuggaccugaagaacuacaucgacaagcagcugcugcccauccugaacaagcagagcugcagcauccccaacaucgagaccgugaucgaguuccagcagaagaacaacagacugcuggagaucaccagagaguucagcgugaacgccggcgugaccacccccgugagcaccuacaugcugaccaacagcgagcugcugagccugaucaacgacaugcccaucaccaacgaccagaagaagcugaugagcaacaacgugcagaucgugagacagcagagcuacagcaucaugugcaucaucaaggaggaggugcuggccuacguggugcagcugccccuguacggcgugaucgacacccccugcuggaagcugcacaccagcccccugugcaccaccaacaccaaggagggcagcaacaucugccugaccagaaccgacagaggcugguacugcgacaacgccggcagcgugagcuucuucccccaggccgagaccugcaaggugcagagcaacagaguguucugcgacaccaugaacagccugacccugcccagcgaggugaaccugugcaacguggacaucuucaaccccaaguacgacugcaagaucaugaccagcaagaccgacgugagcagcagcgugaucaccagccugggcgccaucgugagcugcuacggcaagaccaagugcaccgccagcaacaagaacagaggcaucaucaagaccuucagcaacggcugcgacuacgugagcaacaagggcguggacaccgugagcgugggcaacacccuguacugcgugaacaagcaggagggccagagccuguacgugaagggcgagcccaucaucaacuucuacgacccccugguguuccccagcgacgaguucgacgccagcaucagccaggugaacgagaagaucaaccagagccuggccuucaucagaaagagcgacgagcugcugcacaacgugaacgccggcaagagcaccaccaacaucaugaucaccaccaucaucaucgugaucaucgugauccugcugagccugaucgccgugggccugcugcuguacugcaaggccagaugaggacuaguacuggcugcaucucccuuuccucuguccuccauccuucucccaggauggugaagggggaccugguacccagugauccccaccccaggauccuaaaucaugacuuaccugcuaauaaaaacucauuggaaaagugagaagaucuaaaaaaaaaaaaaaaaaaaaaaaaaaaaaaaaaaaaaaaaaaaaaaaaaaaaaaaaaaaaaaaaugcaucccccccccccccccccccccccccccccccaaaggcucuuuucagagccaccagaauu

SEQ ID NO: 3783 - RNA, 1923 nt, Artificial Sequence
  mRNA product Design h-1 comprising derived and/or modified sequence from HRSV(A2)__F-del_DSCav1_mut3 (opt5)
gggagacccgugacccggaaguuguacggcuacgcgacuuucccucccacaaacccucgcgcccuuccuuuccuacuugggcccggcagaaagcuuaccauggagcugcucauccugaaggccaacgcuauuaccacaauccuuacggccgugaccuucugcuuugcgagcggccagaauauuacagaagaguucuaccaauccaccuguucugcugucagcaaaggguaucugggagcccucagaacaggcugguacaccuccguuaucacaauugaacugucuaacaucaaggagaucaaaugcaaugggaccgacgccaaggugaaacuuauuaagcaggaacuggauaaguauaaaaacgcugugacggaccuccagcugcugaugcagagcacccccgccacaggauccggcucugcuaucuguagcggggucgccgugugcaagguucuccaccuggagggagaggugaauaaaauuaaguccgcgcuucugagcaccaacaaagccgucgugucucucuccaauggcguuagcgugcugacauuuaagguccuugaucugaagaacuacaucgacaaacaacuccugccuauucugaauaagcagucuuguuccaucccgaacauugaaaccgugaucgaguuccagcagaaaaauaaccggcuccuggaaaucacgcgcgaguuuagcgugaaugcuggcgucacaacccccguuucuacauauaugcuuaccaacuccgagcugcucagccugauuaaugauaugccuaucaccaacgaccaaaagaaacuuauguccaacaaugugcagauugugagacagcagucuuacagcaucaugugcauuaucaaggaagagguccuggccuaugugguucaacucccccuguacggggugaucgauacaccuuguuggaaacugcauacgagcccccucugcaccacaaacaccaaggaaggauccaauauuugucugacacggaccgaccgcggcugguacugcgauaacgcugggucugucuccuucuuuccucaggccgagacguguaaggugcagagcaauagaguuuucugcgacacaaugaacucucuuacccugccgagcgaagugaaucucugcaacgucgauaucuuuaaucccaaauaugacuguaagauuaugaccuccaaaacagaugugucuagcuccgucaucaccagccugggagcgauugugucuugcuacggcaagacaaaauguacggccuccaacaagaaucgggggaucaucaagaccuucagcaacggaugcgacuauguuucuaauaaaggcguggacacagucuccgugggcaacacccuuuacuguguuaauaagcaagaggggcagagccuguaugugaaaggagagccuauuaucaacuuuuacgauccccucgucuucccuuccgacgaauuugaugcuucuauuagccaggugaacgagaagaucaaucagucccuggccuucauucgcaaaucugacgaacugcuccacaacgugaaugcuggcaagagcacaaccaacaucaugauuacgaccaucaucauuguuaucauugucauccugcuuucccugauugccguggggcuccugcuguauugcaaggccagaugaggacuaguacuggcugcaucucccuuuccucuguccuccauccuucucccaggauggugaagggggaccugguacccagugauccccaccccaggauccuaaaucaugacuuaccugcuaauaaaaacucauuggaaaagugagaagaucuaaaaaaaaaaaaaaaaaaaaaaaaaaaaaaaaaaaaaaaaaaaaaaaaaaaaaaaaaaaaaaaaugcaucccccccccccccccccccccccccccccccaaaggcucuuuucagagccaccagaauu

SEQ ID NO: 3784 - RNA, 1923 nt, Artificial Sequence
  mRNA product Design h-1 comprising derived and/or modified sequence from HRSV(A2)__F-del_DSCav1_mut3 (opt6)
gggagacccgugacccggaaguuguacggcuacgcgacuuucccucccacaaacccucgcgcccuuccuuuccuacuugggcccggcagaaagcuuaccauggaauuacuaauccugaaagcaaacgcaauuacuacaauacuaacagcaguaaccuuuugcuuugccucaggacaaaacauaacugaagaauuuuaccaaucaacuugcucagcagucucaaaaggcuaucuaggagcacuacgaacagguugguauacuucagucauaacaauagaauuaucaaacauaaaagaaauuaaauguaacggaacugacgcaaaaguaaaacucaucaaacaagaacucgauaaauacaaaaacgcuguaaccgacuuacaacuacuaaugcaaucaacuccagcaacaggcuccggauccgcaauaugcagugguguagcaguaugcaaaguccuacaccuagaaggagaaguaaauaagauaaaaucugcucuacuaucaacaaauaaagcaguugucucccuaucaaauggagucucaguacucaccuucaaaguauuagaccucaaaaacuacauagacaaacaacuauuaccaauacucaacaaacaauccugcuccaucccuaacauagaaaccguaaucgaauuucaacaaaaaaauaacagacucuuagaaauaacuagagaauuuucaguuaaugcaggcgugacaacaccaguaucaacauauaugcuaacaaacuccgaacuccuaucccuaauaaacgacaugccaaucacaaacgaccaaaaaaaacuaauguccaacaacguacaaaucguaagacaacaaucauacucuauaaugugcauaauaaaagaagaaguacuggccuacguaguacaauuaccacucuacggaguaauagacaccccaugcuggaaacuccauacaucaccccuaugcacaacaaacacaaaagaaggauccaacauaugucucacuagaacagacagaggcugguacugcgacaacgcuggauccgucucauucuucccccaagcagaaacauguaaaguacaaucuaauagaguauuuugugacacaaugaacagccucacacuaccauccgaagucaaccuauguaacguagauauauuuaaucccaaauacgacugcaaaauaaugacauccaaaacagauguaucaucauccguuaucaccucacuaggagccauaguuucaugcuacggaaaaacaaaaugcacugcaucuaacaaaaauagagguauaauaaaaacauuuuccaacggcugcgacuacgucucaaacaaaggcguagacaccguaucaguaggaaauacauuauauugcguaaauaaacaagaaggccaaucccuauacguaaaaggagaacccaucauaaacuucuaugacccacuuguuuuccccucagacgaauuugacgccucaauaucacaaguaaaugaaaaaauaaaccaaucucuugccuucauuagaaaaucagacgaauuacuacacaacgucaacgcaggaaaaucaacaacaaacaucaugauaacaacgauaauaauagucauaauaguaauacuacuaucauuaaucgcagucggacuccuauuauauugcaaagcuagauaaggacuaguacuggcugcaucucccuuuccucuguccuccauccuucucccaggauggugaagggggaccugguacccagugauccccaccccaggauccuaaaucaugacuuaccugcuaauaaaaacucauuggaaaagugagaagaucuaaaaaaaaaaaaaaaaaaaaaaaaaaaaaaaaaaaaaaaaaaaaaaaaaaaaaaaaaaaaaaaaugcaucccccccccccccccccccccccccccccccaaaggcucuuuucagagccaccagaauu

SEQ ID NO: 3785 - RNA, 1923 nt, Artificial Sequence
  mRNA product Design h-1 comprising derived and/or modified sequence from HRSV(A2)__F-del_DSCav1_mut3 (opt11)
gggagacccgugacccggaaguuguacggcuacgcgacuuucccucccacaaacccucgcgcccuuccuuuccuacuugggcccggcagaaagcuuaccauggaacuacucauacuaaaagccaacgccauaaccaccauccucaccgcaguaacuuucugcuucgcuuccggccaaaacaucaccgaagaauuuuaccaaaguaccugcagcgcagucucaaaaggauaccuaggcgcccuacgcacaggcugguacaccuccgucauuaccaucgaacucuccaacaucaaagaaauuaaaugcaacgguacagacgcaaaagucaaacucaucaaacaagaacucgacaaauacaaaaacgcagucaccgaccuccaacuccucaugcaauccacccccgccacaggcucuggcuccgccaucugcucaggcguagcagucugcaaaguccugcaccucgaaggcgaagucaacaaaaucaagucagcccuccucuccaccaacaaggccgucguaucccucucaaacggaguuagcguccucaccuucaaaguccuagaccucaaaaacuacaucgauaaacaacuacuccccauccuaaacaaacaaucaugcuccaucccaaacaucgaaaccguaaucgaguuccaacaaaagaacaaccgccuccucgaaaucacacgugaguucuccguuaacgccggcgucaccacccccgucucuacauacaugcucaccaacuccgaacuccuuucccucaucaacgacaugccaaucaccaacgaccaaaagaaacucaugucaaacaacguacaaaucguccgacaacaaagcuacuccaucaugugcaucaucaaagaagaaguccuugcauacgucguucaacuaccccucuacggcguaaucgacacucccugcuggaaacuccacaccuccccgcucugcacaaccaacaccaaagaaggcagcaacaucugccucacccgaaccgaccgcggcugguacugcgauaacgccggauccgucuccuucuucccacaagcagaaacuugcaaaguccaauccaaccgcgucuucugcgacaccaugaacucccucacacuccccuccgaagucaaccugugcaacgucgacaucuucaacccaaaauacgacugcaaaaucaugaccucaaaaaccgacgucucaucuucugucaucaccucucucggcgcuaucgucuccugcuauggcaaaaccaaaugcaccgccuccaacaagaaccgcggcauuaucaagaccuucuccaacggcugcgacuacgucuccaauaagggcgucgacaccgucucugucggcaacacccuuuacugcguaaacaaacaagaaggucaaucucucuacgucaaaggagaacccaucaucaacuucuacgacccccuggucuuccccuccgacgaguucgaugcaucaaucucccaagucaacgaaaagaucaaccaaucucucgcuuucauccgcaaauccgacgaacuccuacacaacguaaacgccggcaaauccaccacaaacaucaugaucaccaccauuaucauagucaucaucgucauccuccucuccuuaaucgccguuggccuccuucucuacugcaaagcccgauaaggacuaguacuggcugcaucucccuuuccucuguccuccauccuucucccaggauggugaagggggaccugguacccagugauccccaccccaggauccuaaaucaugacuuaccugcuaauaaaaacucauuggaaaagugagaagaucuaaaaaaaaaaaaaaaaaaaaaaaaaaaaaaaaaaaaaaaaaaaaaaaaaaaaaaaaaaaaaaaaugcaucccccccccccccccccccccccccccccccaaaggcucuuuucagagccaccagaauu

SEQ ID NO: 3786 - RNA, 2139 nt, Artificial Sequence
  mRNA product Design h-2 comprising derived and/or modified sequence from HRSV(A2)__F-del_DSCav1_mut3 (opt1)
gggagacccgugacccggaaguuguacggcuacgcgacuuucccucccacaaacccucgcgcccuuccuuuccuacuugggcccggcagaaagcuuaccauggagcugcucauccugaaggccaacgccaucaccaccauccugacggcggugaccuucugcuucgccagcggccagaacaucaccgaggaguucuaccaguccacgugcagcgccgucuccaagggguaccucggcgcccugcggaccggcugguacaccuccgugaucaccaucgagcugagcaacaucaaggagaucaagugcaacgggaccgacgccaaggugaagcucaucaagcaggagcuggacaaguacaagaacgcggucacggaccugcagcuccugaugcaguccaccccggcaaccggcuccggcuccgccaucugcagcggcgucgccgugugcaaggugcugcaccucgagggggaggucaacaagaucaagagcgcccugcuguccaccaacaaggccguggugagccucuccaacggcgucagcgugcugaccuucaaggugcuggaccucaagaacuacaucgacaagcagcugcugcccauccugaacaagcagagcugcuccauccccaacaucgagacggugaucgaguuccagcagaagaacaaccggcuccuggagaucacccgcgaguucagcgugaacgccggggucaccacccccguguccacguacaugcugaccaacagcgagcuccugucccugaucaacgacaugccgaucaccaacgaccagaagaagcucaugagcaacaacgugcagaucguccggcagcaguccuacagcaucaugugcaucaucaaggaggaggugcuggcguacgugguccagcugccccucuacggcgugaucgacacccccugcuggaagcugcacacgagcccccugugcaccaccaacaccaaggagggguccaacaucugccucacgcgcaccgaccggggcugguacugcgacaacgccggcagcgucuccuucuucccgcaggccgagaccugcaaggugcagagcaaccgcguguucugcgacaccaugaacucccugacgcugcccagcgagguaaaccucugcaacgucgacaucuucaaccccaaguacgacugcaagaucaugaccuccaagaccgacgugagcuccagcgugaucaccucccugggggccaucgucagcugcuacggcaagacgaagugcaccgccagcaacaagaaccgggggaucaucaagaccuucuccaacggcugcgacuacgugagcaacaagggcguggacaccguguccgucgggaacacccuguacugcgugaacaagcaggagggccagagccucuacgugaagggggagcccaucaucaacuucuacgacccgcuggucuuccccuccgacgaguucgacgcgagcaucucccaggugaacgagaagaucaaccagagccuggccuucauccgcaaguccgacgagcugcuccacaacgugaacgccggcaagagcacgaccaacaucaugaucaccaccaucaucaucgucaucaucgugauccugcugucccucaucgccguggggcugcugcucuacugcaaggcccggugaggacuagugaagggaacacccaaauuuaauucagccuuaagcacaauuaauuaagagugaaacguaauuguacaagcaguuggucacccaccauagggcaugaucaacaccgcaaccuuuccuuuuucccccagugauucugaaaaaccccucuucccuucagcuugcuuagauguuccaaauuuaguaagcuuaaggcggccuacagaagaaaaagaaaaaaaaggccacaaaaguucccucucacuuucaguaaauaaaauaaaagcagcaacagaaauaaagaaauaaaugaaauucaaaaugaaauaaauauuguguugugcagcauuaaaaaaucaauaaaaauuaaaaaugagcaagaucuaaaaaaaaaaaaaaaaaaaaaaaaaaaaaaaaaaaaaaaaaaaaaaaaaaaaaaaaaaaaaaaaugcaucccccccccccccccccccccccccccccccaaaggcucuuuucagagccaccagaauu

SEQ ID NO: 3787 - RNA, 2139 nt, Artificial Sequence
  mRNA product Design h-2 comprising derived and/or modified sequence from HRSV(A2)__F-del_DSCav1_mut3 (opt1)
gggagacccgugacccggaaguuguacggcuacgcgacuuucccucccacaaacccucgcgcccuuccuuuccuacuugggcccggcagaaagcuuaccauggagcugcucauccugaaggccaacgccaucaccaccauccugacggcggugaccuucugcuucgccagcggccagaacaucaccgaggaguucuaccaguccacgugcagcgccgucuccaagggguaccucggcgcccugcgcaccgggugguacaccagcgugaucaccaucgagcuguccaacaucaaggagaucaagugcaacggcaccgacgccaaggugaagcucaucaagcaggagcuggacaaguacaagaacgcggucacggaccugcagcuccugaugcagagcacccccgccaccggguccggcagcgccaucugcuccggcguggccgugugcaagguccugcaccucgagggggaggugaacaagaucaagagcgcgcugcuguccaccaacaaggccguggucagccucuccaacggcgugagcgugcugacguucaagguccuggaccucaagaacuacaucgacaagcagcugcugccgauccucaacaagcaguccugcagcauccccaacaucgagaccgugaucgaguuccagcagaagaacaaccggcugcuggagaucacccgcgaguucuccgugaacgccggggucaccacgcccgugagcaccuacaugcucaccaacuccgagcugcugagccucaucaacgacaugcccaucaccaacgaccagaagaagcugaugagcaacaacgugcagaucguccggcagcaguccuacagcaucaugugcaucaucaaggaggaggugcuggccuacgugguccagcucccgcuguacggcgugaucgacacgcccugcuggaagcugcacaccagcccccucugcaccaccaacacgaaggagggguccaacaucugccugacccgcaccgaccggggcugguacugcgacaacgccggcuccgugagcuucuucccccaggcggagaccugcaagguccaguccaaccgcguguucugcgacacgaugaacagccugacccucccguccgaggucaaccugugcaacguggacaucuucaaccccaaguacgacugcaagaucaugaccagcaagaccgacguguccagcuccgucaucacgagccugggggccaucguguccugcuacggcaagaccaagugcaccgccagcaacaagaaccgggggaucaucaagaccuucuccaacggcugcgacuacgugagcaacaagggcgucgacacgguguccguggggaacacccucuacugcgucaacaagcaggagggccagagccuguacgugaagggggagcccaucaucaacuucuacgacccccugguguucccgagcgacgaguucgacgccuccaucagccaggucaacgagaagaucaaccagucccucgccuucauccgcaagagcgacgagcugcugcacaacgugaacgcgggcaaguccaccaccaacaucaugaucaccacgaucaucaucgugaucaucgucauccuccugagccugaucgccguggggcuccugcuguacugcaaggcccggugaggacuagugaagggaacacccaaauuuaauucagccuuaagcacaauuaauuaagagugaaacguaauuguacaagcaguuggucacccaccauagggcaugaucaacaccgcaaccuuuccuuuuucccccagugauucugaaaaaccccucuucccuucagcuugcuuagauguuccaaauuuaguaagcuuaaggcggccuacagaagaaaaagaaaaaaaaggccacaaaaguucccucucacuuucaguaaauaaaauaaaagcagcaacagaaauaaagaaauaaaugaaauucaaaaugaaauaaauauuguguugugcagcauuaaaaaaucaauaaaaauuaaaaaugagcaagaucuaaaaaaaaaaaaaaaaaaaaaaaaaaaaaaaaaaaaaaaaaaaaaaaaaaaaaaaaaaaaaaaaugcaucccccccccccccccccccccccccccccccaaaggcucuuuucagagccaccagaauu

SEQ ID NO: 3788 - RNA, 2139 nt, Artificial Sequence
  mRNA product Design h-2 comprising derived and/or modified sequence from HRSV(A2)__F-del_DSCav1_mut3 (opt2)
gggagacccgugacccggaaguuguacggcuacgcgacuuucccucccacaaacccucgcgcccuuccuuuccuacuugggcccggcagaaagcuuaccauggagcuccucauccucaaggccaacgccaucaccaccauccucaccgccgucaccuucugcuucgccuccggccagaacaucaccgaggaguucuaccaguccaccugcuccgccgucuccaagggcuaccucggcgcccuccgcaccggcugguacaccuccgucaucaccaucgagcucuccaacaucaaggagaucaagugcaacggcaccgacgccaaggucaagcucaucaagcaggagcucgacaaguacaagaacgccgucaccgaccuccagcuccucaugcaguccacccccgccaccggcuccggcuccgccaucugcuccggcgucgccgucugcaagguccuccaccucgagggcgaggucaacaagaucaaguccgcccuccucuccaccaacaaggccgucgucucccucuccaacggcgucuccguccucaccuucaagguccucgaccucaagaacuacaucgacaagcagcuccuccccauccucaacaagcaguccugcuccauccccaacaucgagaccgucaucgaguuccagcagaagaacaaccgccuccucgagaucacccgcgaguucuccgucaacgccggcgucaccacccccgucuccaccuacaugcucaccaacuccgagcuccucucccucaucaacgacaugcccaucaccaacgaccagaagaagcucauguccaacaacguccagaucguccgccagcaguccuacuccaucaugugcaucaucaaggaggagguccucgccuacgucguccagcucccccucuacggcgucaucgacacccccugcuggaagcuccacaccuccccccucugcaccaccaacaccaaggagggcuccaacaucugccucacccgcaccgaccgcggcugguacugcgacaacgccggcuccgucuccuucuucccccaggccgagaccugcaagguccaguccaaccgcgucuucugcgacaccaugaacucccucacccuccccuccgaggucaaccucugcaacgucgacaucuucaaccccaaguacgacugcaagaucaugaccuccaagaccgacgucuccuccuccgucaucaccucccucggcgccaucgucuccugcuacggcaagaccaagugcaccgccuccaacaagaaccgcggcaucaucaagaccuucuccaacggcugcgacuacgucuccaacaagggcgucgacaccgucuccgucggcaacacccucuacugcgucaacaagcaggagggccagucccucuacgucaagggcgagcccaucaucaacuucuacgacccccucgucuuccccuccgacgaguucgacgccuccaucucccaggucaacgagaagaucaaccagucccucgccuucauccgcaaguccgacgagcuccuccacaacgucaacgccggcaaguccaccaccaacaucaugaucaccaccaucaucaucgucaucaucgucauccuccucucccucaucgccgucggccuccuccucuacugcaaggcccgcugaggacuagugaagggaacacccaaauuuaauucagccuuaagcacaauuaauuaagagugaaacguaauuguacaagcaguuggucacccaccauagggcaugaucaacaccgcaaccuuuccuuuuucccccagugauucugaaaaaccccucuucccuucagcuugcuuagauguuccaaauuuaguaagcuuaaggcggccuacagaagaaaaagaaaaaaaaggccacaaaaguucccucucacuuucaguaaauaaaauaaaagcagcaacagaaauaaagaaauaaaugaaauucaaaaugaaauaaauauuguguugugcagcauuaaaaaaucaauaaaaauuaaaaaugagcaagaucuaaaaaaaaaaaaaaaaaaaaaaaaaaaaaaaaaaaaaaaaaaaaaaaaaaaaaaaaaaaaaaaaugcaucccccccccccccccccccccccccccccccaaaggcucuuuucagagccaccagaauu

SEQ ID NO: 3789 - RNA, 2139 nt, Artificial Sequence
  mRNA product Design h-2 comprising derived and/or modified sequence from HRSV(A2)__F-del_DSCav1_mut3 (opt3)
gggagacccgugacccggaaguuguacggcuacgcgacuuucccucccacaaacccucgcgcccuuccuuuccuacuugggcccggcagaaagcuuaccauggagcugcucauccuuaaggccaacgcuauuaccacaauacugacugcagugacguucugcuuugccagcggccagaauaucaccgaagaguucuaccaauccacauguucugcggucucaaaaggguauuugggagcuuuaagaacugguugguacaccaguguuauuacaaucgaacugagcaacauuaaggagaucaaaugcaauggcaccgacgccaaggugaaacuaauaaagcaggaacucgauaaguauaaaaacgcaguaacugaccugcagcuucugaugcaguccacacccgccaccgggucuggaucggcuaucuguucaggcguggcagucugcaagguguugcaccucgagggugagguuaauaaaauuaagagcgcccugcugaguacgaacaaagcuguggucucccucucuaauggggugagcguauuaacuuuuaagguucuggaucuuaagaacuacaucgacaaacaauugcugccuauucuaaauaagcaguccuguucaaucccaaacauagaaaccgugauugaguuccagcagaaaaauaacaggcuccuggaaaucacacgggaguuuagugucaaugccggagugacuaccccggugagcacauauaugcuuaccaacucugagcuguugucccucauuaaugauaugcccaucacgaacgaccaaaagaaacugaugucaaacaauguccagaucguucgccagcagagcuacaguauuaugugcauaaucaaggaagagguguuagcguauguagugcaacugccucucuacggcgucauugauacuccauguuggaaacuucauacaucuccccugugcaccacuaacacaaaggaaggcuccaauaucuguuugacccgaacggaccgugggugguacugcgauaacgcaggaagcgugucguucuuuccucaggccgagaccuguaagguucagucuaauagaguguucugcgacacaaugaacucccuaacucugccaucagaagucaaucucugcaacguggauauauuuaaucccaaauaugacuguaagauuaugaccaguaaaacagauguaagcuccucuguuaucacuagccugggugcuaucgugucaugcuacggcaagaccaaauguacagccaguaacaagaauagggggauuaucaagaccuucuccaacggaugcgacuaugucagcaauaaaggcguggacacugucucuguggguaacacgcuuuacuguguuaauaagcaagaggggcagucacuguaugugaaaggagagccuauuauaaacuuuuacgauccauugguauucccgagugacgaauuugaugcaagcaucucccaggucaacgagaagauuaaucagucucucgcuuucauccggaaaucggacgaacuguuacacaacgugaaugccggcaagagcacaaccaacaucaugauuacuaccauaaucauuguuaucauugugauccugcuaucccucauagcggucggccugcuuuuguauugcaaggcccgcugaggacuagugaagggaacacccaaauuuaauucagccuuaagcacaauuaauuaagagugaaacguaauuguacaagcaguuggucacccaccauagggcaugaucaacaccgcaaccuuuccuuuuucccccagugauucugaaaaaccccucuucccuucagcuugcuuagauguuccaaauuuaguaagcuuaaggcggccuacagaagaaaaagaaaaaaaaggccacaaaaguucccucucacuuucaguaaauaaaauaaaagcagcaacagaaauaaagaaauaaaugaaauucaaaaugaaauaaauauuguguugugcagcauuaaaaaaucaauaaaaauuaaaaaugagcaagaucuaaaaaaaaaaaaaaaaaaaaaaaaaaaaaaaaaaaaaaaaaaaaaaaaaaaaaaaaaaaaaaaaugcaucccccccccccccccccccccccccccccccaaaggcucuuuucagagccaccagaauu

SEQ ID NO: 3790 - RNA, 2139 nt, Artificial Sequence
  mRNA product Design h-2 comprising derived and/or modified sequence from HRSV(A2)__F-del_DSCav1_mut3 (opt4)
gggagacccgugacccggaaguuguacggcuacgcgacuuucccucccacaaacccucgcgcccuuccuuuccuacuugggcccggcagaaagcuuaccauggagcugcugauccugaaggccaacgccaucaccaccauccugaccgccgugaccuucugcuucgccagcggccagaacaucaccgaggaguucuaccagagcaccugcagcgccgugagcaagggcuaccugggcgcccugagaaccggcugguacaccagcgugaucaccaucgagcugagcaacaucaaggagaucaagugcaacggcaccgacgccaaggugaagcugaucaagcaggagcuggacaaguacaagaacgccgugaccgaccugcagcugcugaugcagagcacccccgccaccggcagcggcagcgccaucugcagcggcguggccgugugcaaggugcugcaccuggagggcgaggugaacaagaucaagagcgcccugcugagcaccaacaaggccguggugagccugagcaacggcgugagcgugcugaccuucaaggugcuggaccugaagaacuacaucgacaagcagcugcugcccauccugaacaagcagagcugcagcauccccaacaucgagaccgugaucgaguuccagcagaagaacaacagacugcuggagaucaccagagaguucagcgugaacgccggcgugaccacccccgugagcaccuacaugcugaccaacagcgagcugcugagccugaucaacgacaugcccaucaccaacgaccagaagaagcugaugagcaacaacgugcagaucgugagacagcagagcuacagcaucaugugcaucaucaaggaggaggugcuggccuacguggugcagcugccccuguacggcgugaucgacacccccugcuggaagcugcacaccagcccccugugcaccaccaacaccaaggagggcagcaacaucugccugaccagaaccgacagaggcugguacugcgacaacgccggcagcgugagcuucuucccccaggccgagaccugcaaggugcagagcaacagaguguucugcgacaccaugaacagccugacccugcccagcgaggugaaccugugcaacguggacaucuucaaccccaaguacgacugcaagaucaugaccagcaagaccgacgugagcagcagcgugaucaccagccugggcgccaucgugagcugcuacggcaagaccaagugcaccgccagcaacaagaacagaggcaucaucaagaccuucagcaacggcugcgacuacgugagcaacaagggcguggacaccgugagcgugggcaacacccuguacugcgugaacaagcaggagggccagagccuguacgugaagggcgagcccaucaucaacuucuacgacccccugguguuccccagcgacgaguucgacgccagcaucagccaggugaacgagaagaucaaccagagccuggccuucaucagaaagagcgacgagcugcugcacaacgugaacgccggcaagagcaccaccaacaucaugaucaccaccaucaucaucgugaucaucgugauccugcugagccugaucgccgugggccugcugcuguacugcaaggccagaugaggacuagugaagggaacacccaaauuuaauucagccuuaagcacaauuaauuaagagugaaacguaauuguacaagcaguuggucacccaccauagggcaugaucaacaccgcaaccuuuccuuuuucccccagugauucugaaaaaccccucuucccuucagcuugcuuagauguuccaaauuuaguaagcuuaaggcggccuacagaagaaaaagaaaaaaaaggccacaaaaguucccucucacuuucaguaaauaaaauaaaagcagcaacagaaauaaagaaauaaaugaaauucaaaaugaaauaaauauuguguugugcagcauuaaaaaaucaauaaaaauuaaaaaugagcaagaucuaaaaaaaaaaaaaaaaaaaaaaaaaaaaaaaaaaaaaaaaaaaaaaaaaaaaaaaaaaaaaaaaugcaucccccccccccccccccccccccccccccccaaaggcucuuuucagagccaccagaauu

SEQ ID NO: 3791 - RNA, 2139 nt, Artificial Sequence
  mRNA product Design h-2 comprising derived and/or modified sequence from HRSV(A2)__F-del_DSCav1_mut3 (opt5)
gggagacccgugacccggaaguuguacggcuacgcgacuuucccucccacaaacccucgcgcccuuccuuuccuacuugggcccggcagaaagcuuaccauggagcugcucauccugaaggccaacgcuauuaccacaauccuuacggccgugaccuucugcuuugcgagcggccagaauauuacagaagaguucuaccaauccaccuguucugcugucagcaaaggguaucugggagcccucagaacaggcugguacaccuccguuaucacaauugaacugucuaacaucaaggagaucaaaugcaaugggaccgacgccaaggugaaacuuauuaagcaggaacuggauaaguauaaaaacgcugugacggaccuccagcugcugaugcagagcacccccgccacaggauccggcucugcuaucuguagcggggucgccgugugcaagguucuccaccuggagggagaggugaauaaaauuaaguccgcgcuucugagcaccaacaaagccgucgugucucucuccaauggcguuagcgugcugacauuuaagguccuugaucugaagaacuacaucgacaaacaacuccugccuauucugaauaagcagucuuguuccaucccgaacauugaaaccgugaucgaguuccagcagaaaaauaaccggcuccuggaaaucacgcgcgaguuuagcgugaaugcuggcgucacaacccccguuucuacauauaugcuuaccaacuccgagcugcucagccugauuaaugauaugccuaucaccaacgaccaaaagaaacuuauguccaacaaugugcagauugugagacagcagucuuacagcaucaugugcauuaucaaggaagagguccuggccuaugugguucaacucccccuguacggggugaucgauacaccuuguuggaaacugcauacgagcccccucugcaccacaaacaccaaggaaggauccaauauuugucugacacggaccgaccgcggcugguacugcgauaacgcugggucugucuccuucuuuccucaggccgagacguguaaggugcagagcaauagaguuuucugcgacacaaugaacucucuuacccugccgagcgaagugaaucucugcaacgucgauaucuuuaaucccaaauaugacuguaagauuaugaccuccaaaacagaugugucuagcuccgucaucaccagccugggagcgauugugucuugcuacggcaagacaaaauguacggccuccaacaagaaucgggggaucaucaagaccuucagcaacggaugcgacuauguuucuaauaaaggcguggacacagucuccgugggcaacacccuuuacuguguuaauaagcaagaggggcagagccuguaugugaaaggagagccuauuaucaacuuuuacgauccccucgucuucccuuccgacgaauuugaugcuucuauuagccaggugaacgagaagaucaaucagucccuggccuucauucgcaaaucugacgaacugcuccacaacgugaaugcuggcaagagcacaaccaacaucaugauuacgaccaucaucauuguuaucauugucauccugcuuucccugauugccguggggcuccugcuguauugcaaggccagaugaggacuagugaagggaacacccaaauuuaauucagccuuaagcacaauuaauuaagagugaaacguaauuguacaagcaguuggucacccaccauagggcaugaucaacaccgcaaccuuuccuuuuucccccagugauucugaaaaaccccucuucccuucagcuugcuuagauguuccaaauuuaguaagcuuaaggcggccuacagaagaaaaagaaaaaaaaggccacaaaaguucccucucacuuucaguaaauaaaauaaaagcagcaacagaaauaaagaaauaaaugaaauucaaaaugaaauaaauauuguguugugcagcauuaaaaaaucaauaaaaauuaaaaaugagcaagaucuaaaaaaaaaaaaaaaaaaaaaaaaaaaaaaaaaaaaaaaaaaaaaaaaaaaaaaaaaaaaaaaaugcaucccccccccccccccccccccccccccccccaaaggcucuuuucagagccaccagaauu

SEQ ID NO: 3792 - RNA, 2139 nt, Artificial Sequence
  mRNA product Design h-2 comprising derived and/or modified sequence from HRSV(A2)__F-del_DSCav1_mut3 (opt6)
gggagacccgugacccggaaguuguacggcuacgcgacuuucccucccacaaacccucgcgcccuuccuuuccuacuugggcccggcagaaagcuuaccauggaauuacuaauccugaaagcaaacgcaauuacuacaauacuaacagcaguaaccuuuugcuuugccucaggacaaaacauaacugaagaauuuuaccaaucaacuugcucagcagucucaaaaggcuaucuaggagcacuacgaacagguugguauacuucagucauaacaauagaauuaucaaacauaaaagaaauuaaauguaacggaacugacgcaaaaguaaaacucaucaaacaagaacucgauaaauacaaaaacgcuguaaccgacuuacaacuacuaaugcaaucaacuccagcaacaggcuccggauccgcaauaugcagugguguagcaguaugcaaaguccuacaccuagaaggagaaguaaauaagauaaaaucugcucuacuaucaacaaauaaagcaguugucucccuaucaaauggagucucaguacucaccuucaaaguauuagaccucaaaaacuacauagacaaacaacuauuaccaauacucaacaaacaauccugcuccaucccuaacauagaaaccguaaucgaauuucaacaaaaaaauaacagacucuuagaaauaacuagagaauuuucaguuaaugcaggcgugacaacaccaguaucaacauauaugcuaacaaacuccgaacuccuaucccuaauaaacgacaugccaaucacaaacgaccaaaaaaaacuaauguccaacaacguacaaaucguaagacaacaaucauacucuauaaugugcauaauaaaagaagaaguacuggccuacguaguacaauuaccacucuacggaguaauagacaccccaugcuggaaacuccauacaucaccccuaugcacaacaaacacaaaagaaggauccaacauaugucucacuagaacagacagaggcugguacugcgacaacgcuggauccgucucauucuucccccaagcagaaacauguaaaguacaaucuaauagaguauuuugugacacaaugaacagccucacacuaccauccgaagucaaccuauguaacguagauauauuuaaucccaaauacgacugcaaaauaaugacauccaaaacagauguaucaucauccguuaucaccucacuaggagccauaguuucaugcuacggaaaaacaaaaugcacugcaucuaacaaaaauagagguauaauaaaaacauuuuccaacggcugcgacuacgucucaaacaaaggcguagacaccguaucaguaggaaauacauuauauugcguaaauaaacaagaaggccaaucccuauacguaaaaggagaacccaucauaaacuucuaugacccacuuguuuuccccucagacgaauuugacgccucaauaucacaaguaaaugaaaaaauaaaccaaucucuugccuucauuagaaaaucagacgaauuacuacacaacgucaacgcaggaaaaucaacaacaaacaucaugauaacaacgauaauaauagucauaauaguaauacuacuaucauuaaucgcagucggacuccuauuauauugcaaagcuagauaaggacuagugaagggaacacccaaauuuaauucagccuuaagcacaauuaauuaagagugaaacguaauuguacaagcaguuggucacccaccauagggcaugaucaacaccgcaaccuuuccuuuuucccccagugauucugaaaaaccccucuucccuucagcuugcuuagauguuccaaauuuaguaagcuuaaggcggccuacagaagaaaaagaaaaaaaaggccacaaaaguucccucucacuuucaguaaauaaaauaaaagcagcaacagaaauaaagaaauaaaugaaauucaaaaugaaauaaauauuguguugugcagcauuaaaaaaucaauaaaaauuaaaaaugagcaagaucuaaaaaaaaaaaaaaaaaaaaaaaaaaaaaaaaaaaaaaaaaaaaaaaaaaaaaaaaaaaaaaaaugcaucccccccccccccccccccccccccccccccaaaggcucuuuucagagccaccagaauu

SEQ ID NO: 3793 - RNA, 2139 nt, Artificial Sequence
  mRNA product Design h-2 comprising derived and/or modified sequence from HRSV(A2)__F-del_DSCav1_mut3 (opt11)
gggagacccgugacccggaaguuguacggcuacgcgacuuucccucccacaaacccucgcgcccuuccuuuccuacuugggcccggcagaaagcuuaccauggaacuacucauacuaaaagccaacgccauaaccaccauccucaccgcaguaacuuucugcuucgcuuccggccaaaacaucaccgaagaauuuuaccaaaguaccugcagcgcagucucaaaaggauaccuaggcgcccuacgcacaggcugguacaccuccgucauuaccaucgaacucuccaacaucaaagaaauuaaaugcaacgguacagacgcaaaagucaaacucaucaaacaagaacucgacaaauacaaaaacgcagucaccgaccuccaacuccucaugcaauccacccccgccacaggcucuggcuccgccaucugcucaggcguagcagucugcaaaguccugcaccucgaaggcgaagucaacaaaaucaagucagcccuccucuccaccaacaaggccgucguaucccucucaaacggaguuagcguccucaccuucaaaguccuagaccucaaaaacuacaucgauaaacaacuacuccccauccuaaacaaacaaucaugcuccaucccaaacaucgaaaccguaaucgaguuccaacaaaagaacaaccgccuccucgaaaucacacgugaguucuccguuaacgccggcgucaccacccccgucucuacauacaugcucaccaacuccgaacuccuuucccucaucaacgacaugccaaucaccaacgaccaaaagaaacucaugucaaacaacguacaaaucguccgacaacaaagcuacuccaucaugugcaucaucaaagaagaaguccuugcauacgucguucaacuaccccucuacggcguaaucgacacucccugcuggaaacuccacaccuccccgcucugcacaaccaacaccaaagaaggcagcaacaucugccucacccgaaccgaccgcggcugguacugcgauaacgccggauccgucuccuucuucccacaagcagaaacuugcaaaguccaauccaaccgcgucuucugcgacaccaugaacucccucacacuccccuccgaagucaaccugugcaacgucgacaucuucaacccaaaauacgacugcaaaaucaugaccucaaaaaccgacgucucaucuucugucaucaccucucucggcgcuaucgucuccugcuauggcaaaaccaaaugcaccgccuccaacaagaaccgcggcauuaucaagaccuucuccaacggcugcgacuacgucuccaauaagggcgucgacaccgucucugucggcaacacccuuuacugcguaaacaaacaagaaggucaaucucucuacgucaaaggagaacccaucaucaacuucuacgacccccuggucuuccccuccgacgaguucgaugcaucaaucucccaagucaacgaaaagaucaaccaaucucucgcuuucauccgcaaauccgacgaacuccuacacaacguaaacgccggcaaauccaccacaaacaucaugaucaccaccauuaucauagucaucaucgucauccuccucuccuuaaucgccguuggccuccuucucuacugcaaagcccgauaaggacuagugaagggaacacccaaauuuaauucagccuuaagcacaauuaauuaagagugaaacguaauuguacaagcaguuggucacccaccauagggcaugaucaacaccgcaaccuuuccuuuuucccccagugauucugaaaaaccccucuucccuucagcuugcuuagauguuccaaauuuaguaagcuuaaggcggccuacagaagaaaaagaaaaaaaaggccacaaaaguucccucucacuuucaguaaauaaaauaaaagcagcaacagaaauaaagaaauaaaugaaauucaaaaugaaauaaauauuguguugugcagcauuaaaaaaucaauaaaaauuaaaaaugagcaagaucuaaaaaaaaaaaaaaaaaaaaaaaaaaaaaaaaaaaaaaaaaaaaaaaaaaaaaaaaaaaaaaaaugcaucccccccccccccccccccccccccccccccaaaggcucuuuucagagccaccagaauu

SEQ ID NO: 3794 - RNA, 1919 nt, Artificial Sequence
  mRNA product Design h-3 comprising derived and/or modified sequence from HRSV(A2)__F-del_DSCav1_mut3 (opt1)
gggagacccgugacccggaaguuguacggcuacgcgacuuucccucccacaaacccucgcgcccuuccuuuccuacuugggcccggcagaaagcuuaccauggagcugcucauccugaaggccaacgccaucaccaccauccugacggcggugaccuucugcuucgccagcggccagaacaucaccgaggaguucuaccaguccacgugcagcgccgucuccaagggguaccucggcgcccugcggaccggcugguacaccuccgugaucaccaucgagcugagcaacaucaaggagaucaagugcaacgggaccgacgccaaggugaagcucaucaagcaggagcuggacaaguacaagaacgcggucacggaccugcagcuccugaugcaguccaccccggcaaccggcuccggcuccgccaucugcagcggcgucgccgugugcaaggugcugcaccucgagggggaggucaacaagaucaagagcgcccugcuguccaccaacaaggccguggugagccucuccaacggcgucagcgugcugaccuucaaggugcuggaccucaagaacuacaucgacaagcagcugcugcccauccugaacaagcagagcugcuccauccccaacaucgagacggugaucgaguuccagcagaagaacaaccggcuccuggagaucacccgcgaguucagcgugaacgccggggucaccacccccguguccacguacaugcugaccaacagcgagcuccugucccugaucaacgacaugccgaucaccaacgaccagaagaagcucaugagcaacaacgugcagaucguccggcagcaguccuacagcaucaugugcaucaucaaggaggaggugcuggcguacgugguccagcugccccucuacggcgugaucgacacccccugcuggaagcugcacacgagcccccugugcaccaccaacaccaaggagggguccaacaucugccucacgcgcaccgaccggggcugguacugcgacaacgccggcagcgucuccuucuucccgcaggccgagaccugcaaggugcagagcaaccgcguguucugcgacaccaugaacucccugacgcugcccagcgagguaaaccucugcaacgucgacaucuucaaccccaaguacgacugcaagaucaugaccuccaagaccgacgugagcuccagcgugaucaccucccugggggccaucgucagcugcuacggcaagacgaagugcaccgccagcaacaagaaccgggggaucaucaagaccuucuccaacggcugcgacuacgugagcaacaagggcguggacaccguguccgucgggaacacccuguacugcgugaacaagcaggagggccagagccucuacgugaagggggagcccaucaucaacuucuacgacccgcuggucuuccccuccgacgaguucgacgcgagcaucucccaggugaacgagaagaucaaccagagccuggccuucauccgcaaguccgacgagcugcuccacaacgugaacgccggcaagagcacgaccaacaucaugaucaccaccaucaucaucgucaucaucgugauccugcugucccucaucgccguggggcugcugcucuacugcaaggcccggugaggacuaguggaagcauuuuccuggcugauuaaaagaaauuacucagcuauggucaucuguuccuguuagaaggcuaugcagcauauuauauacuaugcgcauguuaugaaaugcauaauaaaaaauuuuaaaaaaucuaaaagaucuaaaaaaaaaaaaaaaaaaaaaaaaaaaaaaaaaaaaaaaaaaaaaaaaaaaaaaaaaaaaaaaaugcaucccccccccccccccccccccccccccccccaaaggcucuuuucagagccaccagaauu

SEQ ID NO: 3795 - RNA, 1919 nt, Artificial Sequence
  mRNA product Design h-3 comprising derived and/or modified sequence from HRSV(A2)__F-del_DSCav1_mut3 (opt1)
gggagacccgugacccggaaguuguacggcuacgcgacuuucccucccacaaacccucgcgcccuuccuuuccuacuugggcccggcagaaagcuuaccauggagcugcucauccugaaggccaacgccaucaccaccauccugacggcggugaccuucugcuucgccagcggccagaacaucaccgaggaguucuaccaguccacgugcagcgccgucuccaagggguaccucggcgcccugcgcaccgggugguacaccagcgugaucaccaucgagcuguccaacaucaaggagaucaagugcaacggcaccgacgccaaggugaagcucaucaagcaggagcuggacaaguacaagaacgcggucacggaccugcagcuccugaugcagagcacccccgccaccggguccggcagcgccaucugcuccggcguggccgugugcaagguccugcaccucgagggggaggugaacaagaucaagagcgcgcugcuguccaccaacaaggccguggucagccucuccaacggcgugagcgugcugacguucaagguccuggaccucaagaacuacaucgacaagcagcugcugccgauccucaacaagcaguccugcagcauccccaacaucgagaccgugaucgaguuccagcagaagaacaaccggcugcuggagaucacccgcgaguucuccgugaacgccggggucaccacgcccgugagcaccuacaugcucaccaacuccgagcugcugagccucaucaacgacaugcccaucaccaacgaccagaagaagcugaugagcaacaacgugcagaucguccggcagcaguccuacagcaucaugugcaucaucaaggaggaggugcuggccuacgugguccagcucccgcuguacggcgugaucgacacgcccugcuggaagcugcacaccagcccccucugcaccaccaacacgaaggagggguccaacaucugccugacccgcaccgaccggggcugguacugcgacaacgccggcuccgugagcuucuucccccaggcggagaccugcaagguccaguccaaccgcguguucugcgacacgaugaacagccugacccucccguccgaggucaaccugugcaacguggacaucuucaaccccaaguacgacugcaagaucaugaccagcaagaccgacguguccagcuccgucaucacgagccugggggccaucguguccugcuacggcaagaccaagugcaccgccagcaacaagaaccgggggaucaucaagaccuucuccaacggcugcgacuacgugagcaacaagggcgucgacacgguguccguggggaacacccucuacugcgucaacaagcaggagggccagagccuguacgugaagggggagcccaucaucaacuucuacgacccccugguguucccgagcgacgaguucgacgccuccaucagccaggucaacgagaagaucaaccagucccucgccuucauccgcaagagcgacgagcugcugcacaacgugaacgcgggcaaguccaccaccaacaucaugaucaccacgaucaucaucgugaucaucgucauccuccugagccugaucgccguggggcuccugcuguacugcaaggcccggugaggacuaguggaagcauuuuccuggcugauuaaaagaaauuacucagcuauggucaucuguuccuguuagaaggcuaugcagcauauuauauacuaugcgcauguuaugaaaugcauaauaaaaaauuuuaaaaaaucuaaaagaucuaaaaaaaaaaaaaaaaaaaaaaaaaaaaaaaaaaaaaaaaaaaaaaaaaaaaaaaaaaaaaaaaugcaucccccccccccccccccccccccccccccccaaaggcucuuuucagagccaccagaauu

SEQ ID NO: 3796 - RNA, 1919 nt, Artificial Sequence
  mRNA product Design h-3 comprising derived and/or modified sequence from HRSV(A2)__F-del_DSCav1_mut3 (opt2)
gggagacccgugacccggaaguuguacggcuacgcgacuuucccucccacaaacccucgcgcccuuccuuuccuacuugggcccggcagaaagcuuaccauggagcuccucauccucaaggccaacgccaucaccaccauccucaccgccgucaccuucugcuucgccuccggccagaacaucaccgaggaguucuaccaguccaccugcuccgccgucuccaagggcuaccucggcgcccuccgcaccggcugguacaccuccgucaucaccaucgagcucuccaacaucaaggagaucaagugcaacggcaccgacgccaaggucaagcucaucaagcaggagcucgacaaguacaagaacgccgucaccgaccuccagcuccucaugcaguccacccccgccaccggcuccggcuccgccaucugcuccggcgucgccgucugcaagguccuccaccucgagggcgaggucaacaagaucaaguccgcccuccucuccaccaacaaggccgucgucucccucuccaacggcgucuccguccucaccuucaagguccucgaccucaagaacuacaucgacaagcagcuccuccccauccucaacaagcaguccugcuccauccccaacaucgagaccgucaucgaguuccagcagaagaacaaccgccuccucgagaucacccgcgaguucuccgucaacgccggcgucaccacccccgucuccaccuacaugcucaccaacuccgagcuccucucccucaucaacgacaugcccaucaccaacgaccagaagaagcucauguccaacaacguccagaucguccgccagcaguccuacuccaucaugugcaucaucaaggaggagguccucgccuacgucguccagcucccccucuacggcgucaucgacacccccugcuggaagcuccacaccuccccccucugcaccaccaacaccaaggagggcuccaacaucugccucacccgcaccgaccgcggcugguacugcgacaacgccggcuccgucuccuucuucccccaggccgagaccugcaagguccaguccaaccgcgucuucugcgacaccaugaacucccucacccuccccuccgaggucaaccucugcaacgucgacaucuucaaccccaaguacgacugcaagaucaugaccuccaagaccgacgucuccuccuccgucaucaccucccucggcgccaucgucuccugcuacggcaagaccaagugcaccgccuccaacaagaaccgcggcaucaucaagaccuucuccaacggcugcgacuacgucuccaacaagggcgucgacaccgucuccgucggcaacacccucuacugcgucaacaagcaggagggccagucccucuacgucaagggcgagcccaucaucaacuucuacgacccccucgucuuccccuccgacgaguucgacgccuccaucucccaggucaacgagaagaucaaccagucccucgccuucauccgcaaguccgacgagcuccuccacaacgucaacgccggcaaguccaccaccaacaucaugaucaccaccaucaucaucgucaucaucgucauccuccucucccucaucgccgucggccuccuccucuacugcaaggcccgcugaggacuaguggaagcauuuuccuggcugauuaaaagaaauuacucagcuauggucaucuguuccuguuagaaggcuaugcagcauauuauauacuaugcgcauguuaugaaaugcauaauaaaaaauuuuaaaaaaucuaaaagaucuaaaaaaaaaaaaaaaaaaaaaaaaaaaaaaaaaaaaaaaaaaaaaaaaaaaaaaaaaaaaaaaaugcaucccccccccccccccccccccccccccccccaaaggcucuuuucagagccaccagaauu

SEQ ID NO: 3797 - RNA, 1919 nt, Artificial Sequence
  mRNA product Design h-3 comprising derived and/or modified sequence from HRSV(A2)__F-del_DSCav1_mut3 (opt3)
gggagacccgugacccggaaguuguacggcuacgcgacuuucccucccacaaacccucgcgcccuuccuuuccuacuugggcccggcagaaagcuuaccauggagcugcucauccuuaaggccaacgcuauuaccacaauacugacugcagugacguucugcuuugccagcggccagaauaucaccgaagaguucuaccaauccacauguucugcggucucaaaaggguauuugggagcuuuaagaacugguugguacaccaguguuauuacaaucgaacugagcaacauuaaggagaucaaaugcaauggcaccgacgccaaggugaaacuaauaaagcaggaacucgauaaguauaaaaacgcaguaacugaccugcagcuucugaugcaguccacacccgccaccgggucuggaucggcuaucuguucaggcguggcagucugcaagguguugcaccucgagggugagguuaauaaaauuaagagcgcccugcugaguacgaacaaagcuguggucucccucucuaauggggugagcguauuaacuuuuaagguucuggaucuuaagaacuacaucgacaaacaauugcugccuauucuaaauaagcaguccuguucaaucccaaacauagaaaccgugauugaguuccagcagaaaaauaacaggcuccuggaaaucacacgggaguuuagugucaaugccggagugacuaccccggugagcacauauaugcuuaccaacucugagcuguugucccucauuaaugauaugcccaucacgaacgaccaaaagaaacugaugucaaacaauguccagaucguucgccagcagagcuacaguauuaugugcauaaucaaggaagagguguuagcguauguagugcaacugccucucuacggcgucauugauacuccauguuggaaacuucauacaucuccccugugcaccacuaacacaaaggaaggcuccaauaucuguuugacccgaacggaccgugggugguacugcgauaacgcaggaagcgugucguucuuuccucaggccgagaccuguaagguucagucuaauagaguguucugcgacacaaugaacucccuaacucugccaucagaagucaaucucugcaacguggauauauuuaaucccaaauaugacuguaagauuaugaccaguaaaacagauguaagcuccucuguuaucacuagccugggugcuaucgugucaugcuacggcaagaccaaauguacagccaguaacaagaauagggggauuaucaagaccuucuccaacggaugcgacuaugucagcaauaaaggcguggacacugucucuguggguaacacgcuuuacuguguuaauaagcaagaggggcagucacuguaugugaaaggagagccuauuauaaacuuuuacgauccauugguauucccgagugacgaauuugaugcaagcaucucccaggucaacgagaagauuaaucagucucucgcuuucauccggaaaucggacgaacuguuacacaacgugaaugccggcaagagcacaaccaacaucaugauuacuaccauaaucauuguuaucauugugauccugcuaucccucauagcggucggccugcuuuuguauugcaaggcccgcugaggacuaguggaagcauuuuccuggcugauuaaaagaaauuacucagcuauggucaucuguuccuguuagaaggcuaugcagcauauuauauacuaugcgcauguuaugaaaugcauaauaaaaaauuuuaaaaaaucuaaaagaucuaaaaaaaaaaaaaaaaaaaaaaaaaaaaaaaaaaaaaaaaaaaaaaaaaaaaaaaaaaaaaaaaugcaucccccccccccccccccccccccccccccccaaaggcucuuuucagagccaccagaauu

SEQ ID NO: 3798 - RNA, 1919 nt, Artificial Sequence
  mRNA product Design h-3 comprising derived and/or modified sequence from HRSV(A2)__F-del_DSCav1_mut3 (opt4)
gggagacccgugacccggaaguuguacggcuacgcgacuuucccucccacaaacccucgcgcccuuccuuuccuacuugggcccggcagaaagcuuaccauggagcugcugauccugaaggccaacgccaucaccaccauccugaccgccgugaccuucugcuucgccagcggccagaacaucaccgaggaguucuaccagagcaccugcagcgccgugagcaagggcuaccugggcgcccugagaaccggcugguacaccagcgugaucaccaucgagcugagcaacaucaaggagaucaagugcaacggcaccgacgccaaggugaagcugaucaagcaggagcuggacaaguacaagaacgccgugaccgaccugcagcugcugaugcagagcacccccgccaccggcagcggcagcgccaucugcagcggcguggccgugugcaaggugcugcaccuggagggcgaggugaacaagaucaagagcgcccugcugagcaccaacaaggccguggugagccugagcaacggcgugagcgugcugaccuucaaggugcuggaccugaagaacuacaucgacaagcagcugcugcccauccugaacaagcagagcugcagcauccccaacaucgagaccgugaucgaguuccagcagaagaacaacagacugcuggagaucaccagagaguucagcgugaacgccggcgugaccacccccgugagcaccuacaugcugaccaacagcgagcugcugagccugaucaacgacaugcccaucaccaacgaccagaagaagcugaugagcaacaacgugcagaucgugagacagcagagcuacagcaucaugugcaucaucaaggaggaggugcuggccuacguggugcagcugccccuguacggcgugaucgacacccccugcuggaagcugcacaccagcccccugugcaccaccaacaccaaggagggcagcaacaucugccugaccagaaccgacagaggcugguacugcgacaacgccggcagcgugagcuucuucccccaggccgagaccugcaaggugcagagcaacagaguguucugcgacaccaugaacagccugacccugcccagcgaggugaaccugugcaacguggacaucuucaaccccaaguacgacugcaagaucaugaccagcaagaccgacgugagcagcagcgugaucaccagccugggcgccaucgugagcugcuacggcaagaccaagugcaccgccagcaacaagaacagaggcaucaucaagaccuucagcaacggcugcgacuacgugagcaacaagggcguggacaccgugagcgugggcaacacccuguacugcgugaacaagcaggagggccagagccuguacgugaagggcgagcccaucaucaacuucuacgacccccugguguuccccagcgacgaguucgacgccagcaucagccaggugaacgagaagaucaaccagagccuggccuucaucagaaagagcgacgagcugcugcacaacgugaacgccggcaagagcaccaccaacaucaugaucaccaccaucaucaucgugaucaucgugauccugcugagccugaucgccgugggccugcugcuguacugcaaggccagaugaggacuaguggaagcauuuuccuggcugauuaaaagaaauuacucagcuauggucaucuguuccuguuagaaggcuaugcagcauauuauauacuaugcgcauguuaugaaaugcauaauaaaaaauuuuaaaaaaucuaaaagaucuaaaaaaaaaaaaaaaaaaaaaaaaaaaaaaaaaaaaaaaaaaaaaaaaaaaaaaaaaaaaaaaaugcaucccccccccccccccccccccccccccccccaaaggcucuuuucagagccaccagaauu

SEQ ID NO: 3799 - RNA, 1919 nt, Artificial Sequence
  mRNA product Design h-3 comprising derived and/or modified sequence from HRSV(A2)__F-del_DSCav1_mut3 (opt5)
gggagacccgugacccggaaguuguacggcuacgcgacuuucccucccacaaacccucgcgcccuuccuuuccuacuugggcccggcagaaagcuuaccauggagcugcucauccugaaggccaacgcuauuaccacaauccuuacggccgugaccuucugcuuugcgagcggccagaauauuacagaagaguucuaccaauccaccuguucugcugucagcaaaggguaucugggagcccucagaacaggcugguacaccuccguuaucacaauugaacugucuaacaucaaggagaucaaaugcaaugggaccgacgccaaggugaaacuuauuaagcaggaacuggauaaguauaaaaacgcugugacggaccuccagcugcugaugcagagcacccccgccacaggauccggcucugcuaucuguagcggggucgccgugugcaagguucuccaccuggagggagaggugaauaaaauuaaguccgcgcuucugagcaccaacaaagccgucgugucucucuccaauggcguuagcgugcugacauuuaagguccuugaucugaagaacuacaucgacaaacaacuccugccuauucugaauaagcagucuuguuccaucccgaacauugaaaccgugaucgaguuccagcagaaaaauaaccggcuccuggaaaucacgcgcgaguuuagcgugaaugcuggcgucacaacccccguuucuacauauaugcuuaccaacuccgagcugcucagccugauuaaugauaugccuaucaccaacgaccaaaagaaacuuauguccaacaaugugcagauugugagacagcagucuuacagcaucaugugcauuaucaaggaagagguccuggccuaugugguucaacucccccuguacggggugaucgauacaccuuguuggaaacugcauacgagcccccucugcaccacaaacaccaaggaaggauccaauauuugucugacacggaccgaccgcggcugguacugcgauaacgcugggucugucuccuucuuuccucaggccgagacguguaaggugcagagcaauagaguuuucugcgacacaaugaacucucuuacccugccgagcgaagugaaucucugcaacgucgauaucuuuaaucccaaauaugacuguaagauuaugaccuccaaaacagaugugucuagcuccgucaucaccagccugggagcgauugugucuugcuacggcaagacaaaauguacggccuccaacaagaaucgggggaucaucaagaccuucagcaacggaugcgacuauguuucuaauaaaggcguggacacagucuccgugggcaacacccuuuacuguguuaauaagcaagaggggcagagccuguaugugaaaggagagccuauuaucaacuuuuacgauccccucgucuucccuuccgacgaauuugaugcuucuauuagccaggugaacgagaagaucaaucagucccuggccuucauucgcaaaucugacgaacugcuccacaacgugaaugcuggcaagagcacaaccaacaucaugauuacgaccaucaucauuguuaucauugucauccugcuuucccugauugccguggggcuccugcuguauugcaaggccagaugaggacuaguggaagcauuuuccuggcugauuaaaagaaauuacucagcuauggucaucuguuccuguuagaaggcuaugcagcauauuauauacuaugcgcauguuaugaaaugcauaauaaaaaauuuuaaaaaaucuaaaagaucuaaaaaaaaaaaaaaaaaaaaaaaaaaaaaaaaaaaaaaaaaaaaaaaaaaaaaaaaaaaaaaaaugcaucccccccccccccccccccccccccccccccaaaggcucuuuucagagccaccagaauu

SEQ ID NO: 3800 - RNA, 1919 nt, Artificial Sequence
  mRNA product Design h-3 comprising derived and/or modified sequence from HRSV(A2)__F-del_DSCav1_mut3 (opt6)
gggagacccgugacccggaaguuguacggcuacgcgacuuucccucccacaaacccucgcgcccuuccuuuccuacuugggcccggcagaaagcuuaccauggaauuacuaauccugaaagcaaacgcaauuacuacaauacuaacagcaguaaccuuuugcuuugccucaggacaaaacauaacugaagaauuuuaccaaucaacuugcucagcagucucaaaaggcuaucuaggagcacuacgaacagguugguauacuucagucauaacaauagaauuaucaaacauaaaagaaauuaaauguaacggaacugacgcaaaaguaaaacucaucaaacaagaacucgauaaauacaaaaacgcuguaaccgacuuacaacuacuaaugcaaucaacuccagcaacaggcuccggauccgcaauaugcagugguguagcaguaugcaaaguccuacaccuagaaggagaaguaaauaagauaaaaucugcucuacuaucaacaaauaaagcaguugucucccuaucaaauggagucucaguacucaccuucaaaguauuagaccucaaaaacuacauagacaaacaacuauuaccaauacucaacaaacaauccugcuccaucccuaacauagaaaccguaaucgaauuucaacaaaaaaauaacagacucuuagaaauaacuagagaauuuucaguuaaugcaggcgugacaacaccaguaucaacauauaugcuaacaaacuccgaacuccuaucccuaauaaacgacaugccaaucacaaacgaccaaaaaaaacuaauguccaacaacguacaaaucguaagacaacaaucauacucuauaaugugcauaauaaaagaagaaguacuggccuacguaguacaauuaccacucuacggaguaauagacaccccaugcuggaaacuccauacaucaccccuaugcacaacaaacacaaaagaaggauccaacauaugucucacuagaacagacagaggcugguacugcgacaacgcuggauccgucucauucuucccccaagcagaaacauguaaaguacaaucuaauagaguauuuugugacacaaugaacagccucacacuaccauccgaagucaaccuauguaacguagauauauuuaaucccaaauacgacugcaaaauaaugacauccaaaacagauguaucaucauccguuaucaccucacuaggagccauaguuucaugcuacggaaaaacaaaaugcacugcaucuaacaaaaauagagguauaauaaaaacauuuuccaacggcugcgacuacgucucaaacaaaggcguagacaccguaucaguaggaaauacauuauauugcguaaauaaacaagaaggccaaucccuauacguaaaaggagaacccaucauaaacuucuaugacccacuuguuuuccccucagacgaauuugacgccucaauaucacaaguaaaugaaaaaauaaaccaaucucuugccuucauuagaaaaucagacgaauuacuacacaacgucaacgcaggaaaaucaacaacaaacaucaugauaacaacgauaauaauagucauaauaguaauacuacuaucauuaaucgcagucggacuccuauuauauugcaaagcuagauaaggacuaguggaagcauuuuccuggcugauuaaaagaaauuacucagcuauggucaucuguuccuguuagaaggcuaugcagcauauuauauacuaugcgcauguuaugaaaugcauaauaaaaaauuuuaaaaaaucuaaaagaucuaaaaaaaaaaaaaaaaaaaaaaaaaaaaaaaaaaaaaaaaaaaaaaaaaaaaaaaaaaaaaaaaugcaucccccccccccccccccccccccccccccccaaaggcucuuuucagagccaccagaauu

SEQ ID NO: 3801 - RNA, 1919 nt, Artificial Sequence
  mRNA product Design h-3 comprising derived and/or modified sequence from HRSV(A2)__F-del_DSCav1_mut3 (opt11)
gggagacccgugacccggaaguuguacggcuacgcgacuuucccucccacaaacccucgcgcccuuccuuuccuacuugggcccggcagaaagcuuaccauggaacuacucauacuaaaagccaacgccauaaccaccauccucaccgcaguaacuuucugcuucgcuuccggccaaaacaucaccgaagaauuuuaccaaaguaccugcagcgcagucucaaaaggauaccuaggcgcccuacgcacaggcugguacaccuccgucauuaccaucgaacucuccaacaucaaagaaauuaaaugcaacgguacagacgcaaaagucaaacucaucaaacaagaacucgacaaauacaaaaacgcagucaccgaccuccaacuccucaugcaauccacccccgccacaggcucuggcuccgccaucugcucaggcguagcagucugcaaaguccugcaccucgaaggcgaagucaacaaaaucaagucagcccuccucuccaccaacaaggccgucguaucccucucaaacggaguuagcguccucaccuucaaaguccuagaccucaaaaacuacaucgauaaacaacuacuccccauccuaaacaaacaaucaugcuccaucccaaacaucgaaaccguaaucgaguuccaacaaaagaacaaccgccuccucgaaaucacacgugaguucuccguuaacgccggcgucaccacccccgucucuacauacaugcucaccaacuccgaacuccuuucccucaucaacgacaugccaaucaccaacgaccaaaagaaacucaugucaaacaacguacaaaucguccgacaacaaagcuacuccaucaugugcaucaucaaagaagaaguccuugcauacgucguucaacuaccccucuacggcguaaucgacacucccugcuggaaacuccacaccuccccgcucugcacaaccaacaccaaagaaggcagcaacaucugccucacccgaaccgaccgcggcugguacugcgauaacgccggauccgucuccuucuucccacaagcagaaacuugcaaaguccaauccaaccgcgucuucugcgacaccaugaacucccucacacuccccuccgaagucaaccugugcaacgucgacaucuucaacccaaaauacgacugcaaaaucaugaccucaaaaaccgacgucucaucuucugucaucaccucucucggcgcuaucgucuccugcuauggcaaaaccaaaugcaccgccuccaacaagaaccgcggcauuaucaagaccuucuccaacggcugcgacuacgucuccaauaagggcgucgacaccgucucugucggcaacacccuuuacugcguaaacaaacaagaaggucaaucucucuacgucaaaggagaacccaucaucaacuucuacgacccccuggucuuccccuccgacgaguucgaugcaucaaucucccaagucaacgaaaagaucaaccaaucucucgcuuucauccgcaaauccgacgaacuccuacacaacguaaacgccggcaaauccaccacaaacaucaugaucaccaccauuaucauagucaucaucgucauccuccucuccuuaaucgccguuggccuccuucucuacugcaaagcccgauaaggacuaguggaagcauuuuccuggcugauuaaaagaaauuacucagcuauggucaucuguuccuguuagaaggcuaugcagcauauuauauacuaugcgcauguuaugaaaugcauaauaaaaaauuuuaaaaaaucuaaaagaucuaaaaaaaaaaaaaaaaaaaaaaaaaaaaaaaaaaaaaaaaaaaaaaaaaaaaaaaaaaaaaaaaugcaucccccccccccccccccccccccccccccccaaaggcucuuuucagagccaccagaauu

SEQ ID NO: 3802 - RNA, 1982 nt, Artificial Sequence
  mRNA product Design h-4 comprising derived and/or modified sequence from HRSV(A2)__F-del_DSCav1_mut3 (opt1)
gggagagggcgcuuggcuugcaaggacccugagcugcggcauugaagcacacccaacccaacucgacugaagucagccucacugaaccggaucugagaaucuucucucucugggcuugccagggcucuccgaaccuagcuagcauccucuucaauuccaacuagaaagcuuaccauggagcugcucauccugaaggccaacgccaucaccaccauccugacggcggugaccuucugcuucgccagcggccagaacaucaccgaggaguucuaccaguccacgugcagcgccgucuccaagggguaccucggcgcccugcggaccggcugguacaccuccgugaucaccaucgagcugagcaacaucaaggagaucaagugcaacgggaccgacgccaaggugaagcucaucaagcaggagcuggacaaguacaagaacgcggucacggaccugcagcuccugaugcaguccaccccggcaaccggcuccggcuccgccaucugcagcggcgucgccgugugcaaggugcugcaccucgagggggaggucaacaagaucaagagcgcccugcuguccaccaacaaggccguggugagccucuccaacggcgucagcgugcugaccuucaaggugcuggaccucaagaacuacaucgacaagcagcugcugcccauccugaacaagcagagcugcuccauccccaacaucgagacggugaucgaguuccagcagaagaacaaccggcuccuggagaucacccgcgaguucagcgugaacgccggggucaccacccccguguccacguacaugcugaccaacagcgagcuccugucccugaucaacgacaugccgaucaccaacgaccagaagaagcucaugagcaacaacgugcagaucguccggcagcaguccuacagcaucaugugcaucaucaaggaggaggugcuggcguacgugguccagcugccccucuacggcgugaucgacacccccugcuggaagcugcacacgagcccccugugcaccaccaacaccaaggagggguccaacaucugccucacgcgcaccgaccggggcugguacugcgacaacgccggcagcgucuccuucuucccgcaggccgagaccugcaaggugcagagcaaccgcguguucugcgacaccaugaacucccugacgcugcccagcgagguaaaccucugcaacgucgacaucuucaaccccaaguacgacugcaagaucaugaccuccaagaccgacgugagcuccagcgugaucaccucccugggggccaucgucagcugcuacggcaagacgaagugcaccgccagcaacaagaaccgggggaucaucaagaccuucuccaacggcugcgacuacgugagcaacaagggcguggacaccguguccgucgggaacacccuguacugcgugaacaagcaggagggccagagccucuacgugaagggggagcccaucaucaacuucuacgacccgcuggucuuccccuccgacgaguucgacgcgagcaucucccaggugaacgagaagaucaaccagagccuggccuucauccgcaaguccgacgagcugcuccacaacgugaacgccggcaagagcacgaccaacaucaugaucaccaccaucaucaucgucaucaucgugauccugcugucccucaucgccguggggcugcugcucuacugcaaggcccggugaggacuaguaauaaggaaacuguaugaaugucugugggcaggaagugaagagauccuucuguaaagguuuuuggaauuaugucugcugaauaauaaacuuuuuugaaauaauaaaucugguagaaaaaugagaucuaaaaaaaaaaaaaaaaaaaaaaaaaaaaaaaaaaaaaaaaaaaaaaaaaaaaaaaaaaaaaaaaugcaucccccccccccccccccccccccccccccccaaaggcucuuuucagagccaccagaauu

SEQ ID NO: 3803 - RNA, 1982 nt, Artificial Sequence
  mRNA product Design h-4 comprising derived and/or modified sequence from HRSV(A2)__F-del_DSCav1_mut3 (opt1)
gggagagggcgcuuggcuugcaaggacccugagcugcggcauugaagcacacccaacccaacucgacugaagucagccucacugaaccggaucugagaaucuucucucucugggcuugccagggcucuccgaaccuagcuagcauccucuucaauuccaacuagaaagcuuaccauggagcugcucauccugaaggccaacgccaucaccaccauccugacggcggugaccuucugcuucgccagcggccagaacaucaccgaggaguucuaccaguccacgugcagcgccgucuccaagggguaccucggcgcccugcgcaccgggugguacaccagcgugaucaccaucgagcuguccaacaucaaggagaucaagugcaacggcaccgacgccaaggugaagcucaucaagcaggagcuggacaaguacaagaacgcggucacggaccugcagcuccugaugcagagcacccccgccaccggguccggcagcgccaucugcuccggcguggccgugugcaagguccugcaccucgagggggaggugaacaagaucaagagcgcgcugcuguccaccaacaaggccguggucagccucuccaacggcgugagcgugcugacguucaagguccuggaccucaagaacuacaucgacaagcagcugcugccgauccucaacaagcaguccugcagcauccccaacaucgagaccgugaucgaguuccagcagaagaacaaccggcugcuggagaucacccgcgaguucuccgugaacgccggggucaccacgcccgugagcaccuacaugcucaccaacuccgagcugcugagccucaucaacgacaugcccaucaccaacgaccagaagaagcugaugagcaacaacgugcagaucguccggcagcaguccuacagcaucaugugcaucaucaaggaggaggugcuggccuacgugguccagcucccgcuguacggcgugaucgacacgcccugcuggaagcugcacaccagcccccucugcaccaccaacacgaaggagggguccaacaucugccugacccgcaccgaccggggcugguacugcgacaacgccggcuccgugagcuucuucccccaggcggagaccugcaagguccaguccaaccgcguguucugcgacacgaugaacagccugacccucccguccgaggucaaccugugcaacguggacaucuucaaccccaaguacgacugcaagaucaugaccagcaagaccgacguguccagcuccgucaucacgagccugggggccaucguguccugcuacggcaagaccaagugcaccgccagcaacaagaaccgggggaucaucaagaccuucuccaacggcugcgacuacgugagcaacaagggcgucgacacgguguccguggggaacacccucuacugcgucaacaagcaggagggccagagccuguacgugaagggggagcccaucaucaacuucuacgacccccugguguucccgagcgacgaguucgacgccuccaucagccaggucaacgagaagaucaaccagucccucgccuucauccgcaagagcgacgagcugcugcacaacgugaacgcgggcaaguccaccaccaacaucaugaucaccacgaucaucaucgugaucaucgucauccuccugagccugaucgccguggggcuccugcuguacugcaaggcccggugaggacuaguaauaaggaaacuguaugaaugucugugggcaggaagugaagagauccuucuguaaagguuuuuggaauuaugucugcugaauaauaaacuuuuuugaaauaauaaaucugguagaaaaaugagaucuaaaaaaaaaaaaaaaaaaaaaaaaaaaaaaaaaaaaaaaaaaaaaaaaaaaaaaaaaaaaaaaaugcaucccccccccccccccccccccccccccccccaaaggcucuuuucagagccaccagaauu

SEQ ID NO: 3804 - RNA, 1982 nt, Artificial Sequence
  mRNA product Design h-4 comprising derived and/or modified sequence from HRSV(A2)__F-del_DSCav1_mut3 (opt2)
gggagagggcgcuuggcuugcaaggacccugagcugcggcauugaagcacacccaacccaacucgacugaagucagccucacugaaccggaucugagaaucuucucucucugggcuugccagggcucuccgaaccuagcuagcauccucuucaauuccaacuagaaagcuuaccauggagcuccucauccucaaggccaacgccaucaccaccauccucaccgccgucaccuucugcuucgccuccggccagaacaucaccgaggaguucuaccaguccaccugcuccgccgucuccaagggcuaccucggcgcccuccgcaccggcugguacaccuccgucaucaccaucgagcucuccaacaucaaggagaucaagugcaacggcaccgacgccaaggucaagcucaucaagcaggagcucgacaaguacaagaacgccgucaccgaccuccagcuccucaugcaguccacccccgccaccggcuccggcuccgccaucugcuccggcgucgccgucugcaagguccuccaccucgagggcgaggucaacaagaucaaguccgcccuccucuccaccaacaaggccgucgucucccucuccaacggcgucuccguccucaccuucaagguccucgaccucaagaacuacaucgacaagcagcuccuccccauccucaacaagcaguccugcuccauccccaacaucgagaccgucaucgaguuccagcagaagaacaaccgccuccucgagaucacccgcgaguucuccgucaacgccggcgucaccacccccgucuccaccuacaugcucaccaacuccgagcuccucucccucaucaacgacaugcccaucaccaacgaccagaagaagcucauguccaacaacguccagaucguccgccagcaguccuacuccaucaugugcaucaucaaggaggagguccucgccuacgucguccagcucccccucuacggcgucaucgacacccccugcuggaagcuccacaccuccccccucugcaccaccaacaccaaggagggcuccaacaucugccucacccgcaccgaccgcggcugguacugcgacaacgccggcuccgucuccuucuucccccaggccgagaccugcaagguccaguccaaccgcgucuucugcgacaccaugaacucccucacccuccccuccgaggucaaccucugcaacgucgacaucuucaaccccaaguacgacugcaagaucaugaccuccaagaccgacgucuccuccuccgucaucaccucccucggcgccaucgucuccugcuacggcaagaccaagugcaccgccuccaacaagaaccgcggcaucaucaagaccuucuccaacggcugcgacuacgucuccaacaagggcgucgacaccgucuccgucggcaacacccucuacugcgucaacaagcaggagggccagucccucuacgucaagggcgagcccaucaucaacuucuacgacccccucgucuuccccuccgacgaguucgacgccuccaucucccaggucaacgagaagaucaaccagucccucgccuucauccgcaaguccgacgagcuccuccacaacgucaacgccggcaaguccaccaccaacaucaugaucaccaccaucaucaucgucaucaucgucauccuccucucccucaucgccgucggccuccuccucuacugcaaggcccgcugaggacuaguaauaaggaaacuguaugaaugucugugggcaggaagugaagagauccuucuguaaagguuuuuggaauuaugucugcugaauaauaaacuuuuuugaaauaauaaaucugguagaaaaaugagaucuaaaaaaaaaaaaaaaaaaaaaaaaaaaaaaaaaaaaaaaaaaaaaaaaaaaaaaaaaaaaaaaaugcaucccccccccccccccccccccccccccccccaaaggcucuuuucagagccaccagaauu

SEQ ID NO: 3805 - RNA, 1982 nt, Artificial Sequence
  mRNA product Design h-4 comprising derived and/or modified sequence from HRSV(A2)__F-del_DSCav1_mut3 (opt3)
gggagagggcgcuuggcuugcaaggacccugagcugcggcauugaagcacacccaacccaacucgacugaagucagccucacugaaccggaucugagaaucuucucucucugggcuugccagggcucuccgaaccuagcuagcauccucuucaauuccaacuagaaagcuuaccauggagcugcucauccuuaaggccaacgcuauuaccacaauacugacugcagugacguucugcuuugccagcggccagaauaucaccgaagaguucuaccaauccacauguucugcggucucaaaaggguauuugggagcuuuaagaacugguugguacaccaguguuauuacaaucgaacugagcaacauuaaggagaucaaaugcaauggcaccgacgccaaggugaaacuaauaaagcaggaacucgauaaguauaaaaacgcaguaacugaccugcagcuucugaugcaguccacacccgccaccgggucuggaucggcuaucuguucaggcguggcagucugcaagguguugcaccucgagggugagguuaauaaaauuaagagcgcccugcugaguacgaacaaagcuguggucucccucucuaauggggugagcguauuaacuuuuaagguucuggaucuuaagaacuacaucgacaaacaauugcugccuauucuaaauaagcaguccuguucaaucccaaacauagaaaccgugauugaguuccagcagaaaaauaacaggcuccuggaaaucacacgggaguuuagugucaaugccggagugacuaccccggugagcacauauaugcuuaccaacucugagcuguugucccucauuaaugauaugcccaucacgaacgaccaaaagaaacugaugucaaacaauguccagaucguucgccagcagagcuacaguauuaugugcauaaucaaggaagagguguuagcguauguagugcaacugccucucuacggcgucauugauacuccauguuggaaacuucauacaucuccccugugcaccacuaacacaaaggaaggcuccaauaucuguuugacccgaacggaccgugggugguacugcgauaacgcaggaagcgugucguucuuuccucaggccgagaccuguaagguucagucuaauagaguguucugcgacacaaugaacucccuaacucugccaucagaagucaaucucugcaacguggauauauuuaaucccaaauaugacuguaagauuaugaccaguaaaacagauguaagcuccucuguuaucacuagccugggugcuaucgugucaugcuacggcaagaccaaauguacagccaguaacaagaauagggggauuaucaagaccuucuccaacggaugcgacuaugucagcaauaaaggcguggacacugucucuguggguaacacgcuuuacuguguuaauaagcaagaggggcagucacuguaugugaaaggagagccuauuauaaacuuuuacgauccauugguauucccgagugacgaauuugaugcaagcaucucccaggucaacgagaagauuaaucagucucucgcuuucauccggaaaucggacgaacuguuacacaacgugaaugccggcaagagcacaaccaacaucaugauuacuaccauaaucauuguuaucauugugauccugcuaucccucauagcggucggccugcuuuuguauugcaaggcccgcugaggacuaguaauaaggaaacuguaugaaugucugugggcaggaagugaagagauccuucuguaaagguuuuuggaauuaugucugcugaauaauaaacuuuuuugaaauaauaaaucugguagaaaaaugagaucuaaaaaaaaaaaaaaaaaaaaaaaaaaaaaaaaaaaaaaaaaaaaaaaaaaaaaaaaaaaaaaaaugcaucccccccccccccccccccccccccccccccaaaggcucuuuucagagccaccagaauu

SEQ ID NO: 3806 - RNA, 1982 nt, Artificial Sequence
  mRNA product Design h-4 comprising derived and/or modified sequence from HRSV(A2)__F-del_DSCav1_mut3 (opt4)
gggagagggcgcuuggcuugcaaggacccugagcugcggcauugaagcacacccaacccaacucgacugaagucagccucacugaaccggaucugagaaucuucucucucugggcuugccagggcucuccgaaccuagcuagcauccucuucaauuccaacuagaaagcuuaccauggagcugcugauccugaaggccaacgccaucaccaccauccugaccgccgugaccuucugcuucgccagcggccagaacaucaccgaggaguucuaccagagcaccugcagcgccgugagcaagggcuaccugggcgcccugagaaccggcugguacaccagcgugaucaccaucgagcugagcaacaucaaggagaucaagugcaacggcaccgacgccaaggugaagcugaucaagcaggagcuggacaaguacaagaacgccgugaccgaccugcagcugcugaugcagagcacccccgccaccggcagcggcagcgccaucugcagcggcguggccgugugcaaggugcugcaccuggagggcgaggugaacaagaucaagagcgcccugcugagcaccaacaaggccguggugagccugagcaacggcgugagcgugcugaccuucaaggugcuggaccugaagaacuacaucgacaagcagcugcugcccauccugaacaagcagagcugcagcauccccaacaucgagaccgugaucgaguuccagcagaagaacaacagacugcuggagaucaccagagaguucagcgugaacgccggcgugaccacccccgugagcaccuacaugcugaccaacagcgagcugcugagccugaucaacgacaugcccaucaccaacgaccagaagaagcugaugagcaacaacgugcagaucgugagacagcagagcuacagcaucaugugcaucaucaaggaggaggugcuggccuacguggugcagcugccccuguacggcgugaucgacacccccugcuggaagcugcacaccagcccccugugcaccaccaacaccaaggagggcagcaacaucugccugaccagaaccgacagaggcugguacugcgacaacgccggcagcgugagcuucuucccccaggccgagaccugcaaggugcagagcaacagaguguucugcgacaccaugaacagccugacccugcccagcgaggugaaccugugcaacguggacaucuucaaccccaaguacgacugcaagaucaugaccagcaagaccgacgugagcagcagcgugaucaccagccugggcgccaucgugagcugcuacggcaagaccaagugcaccgccagcaacaagaacagaggcaucaucaagaccuucagcaacggcugcgacuacgugagcaacaagggcguggacaccgugagcgugggcaacacccuguacugcgugaacaagcaggagggccagagccuguacgugaagggcgagcccaucaucaacuucuacgacccccugguguuccccagcgacgaguucgacgccagcaucagccaggugaacgagaagaucaaccagagccuggccuucaucagaaagagcgacgagcugcugcacaacgugaacgccggcaagagcaccaccaacaucaugaucaccaccaucaucaucgugaucaucgugauccugcugagccugaucgccgugggccugcugcuguacugcaaggccagaugaggacuaguaauaaggaaacuguaugaaugucugugggcaggaagugaagagauccuucuguaaagguuuuuggaauuaugucugcugaauaauaaacuuuuuugaaauaauaaaucugguagaaaaaugagaucuaaaaaaaaaaaaaaaaaaaaaaaaaaaaaaaaaaaaaaaaaaaaaaaaaaaaaaaaaaaaaaaaugcaucccccccccccccccccccccccccccccccaaaggcucuuuucagagccaccagaauu

SEQ ID NO: 3807 - RNA, 1982 nt, Artificial Sequence
  mRNA product Design h-4 comprising derived and/or modified sequence from HRSV(A2)__F-del_DSCav1_mut3 (opt5)
gggagagggcgcuuggcuugcaaggacccugagcugcggcauugaagcacacccaacccaacucgacugaagucagccucacugaaccggaucugagaaucuucucucucugggcuugccagggcucuccgaaccuagcuagcauccucuucaauuccaacuagaaagcuuaccauggagcugcucauccugaaggccaacgcuauuaccacaauccuuacggccgugaccuucugcuuugcgagcggccagaauauuacagaagaguucuaccaauccaccuguucugcugucagcaaaggguaucugggagcccucagaacaggcugguacaccuccguuaucacaauugaacugucuaacaucaaggagaucaaaugcaaugggaccgacgccaaggugaaacuuauuaagcaggaacuggauaaguauaaaaacgcugugacggaccuccagcugcugaugcagagcacccccgccacaggauccggcucugcuaucuguagcggggucgccgugugcaagguucuccaccuggagggagaggugaauaaaauuaaguccgcgcuucugagcaccaacaaagccgucgugucucucuccaauggcguuagcgugcugacauuuaagguccuugaucugaagaacuacaucgacaaacaacuccugccuauucugaauaagcagucuuguuccaucccgaacauugaaaccgugaucgaguuccagcagaaaaauaaccggcuccuggaaaucacgcgcgaguuuagcgugaaugcuggcgucacaacccccguuucuacauauaugcuuaccaacuccgagcugcucagccugauuaaugauaugccuaucaccaacgaccaaaagaaacuuauguccaacaaugugcagauugugagacagcagucuuacagcaucaugugcauuaucaaggaagagguccuggccuaugugguucaacucccccuguacggggugaucgauacaccuuguuggaaacugcauacgagcccccucugcaccacaaacaccaaggaaggauccaauauuugucugacacggaccgaccgcggcugguacugcgauaacgcugggucugucuccuucuuuccucaggccgagacguguaaggugcagagcaauagaguuuucugcgacacaaugaacucucuuacccugccgagcgaagugaaucucugcaacgucgauaucuuuaaucccaaauaugacuguaagauuaugaccuccaaaacagaugugucuagcuccgucaucaccagccugggagcgauugugucuugcuacggcaagacaaaauguacggccuccaacaagaaucgggggaucaucaagaccuucagcaacggaugcgacuauguuucuaauaaaggcguggacacagucuccgugggcaacacccuuuacuguguuaauaagcaagaggggcagagccuguaugugaaaggagagccuauuaucaacuuuuacgauccccucgucuucccuuccgacgaauuugaugcuucuauuagccaggugaacgagaagaucaaucagucccuggccuucauucgcaaaucugacgaacugcuccacaacgugaaugcuggcaagagcacaaccaacaucaugauuacgaccaucaucauuguuaucauugucauccugcuuucccugauugccguggggcuccugcuguauugcaaggccagaugaggacuaguaauaaggaaacuguaugaaugucugugggcaggaagugaagagauccuucuguaaagguuuuuggaauuaugucugcugaauaauaaacuuuuuugaaauaauaaaucugguagaaaaaugagaucuaaaaaaaaaaaaaaaaaaaaaaaaaaaaaaaaaaaaaaaaaaaaaaaaaaaaaaaaaaaaaaaaugcaucccccccccccccccccccccccccccccccaaaggcucuuuucagagccaccagaauu

SEQ ID NO: 3808 - RNA, 1982 nt, Artificial Sequence
  mRNA product Design h-4 comprising derived and/or modified sequence from HRSV(A2)__F-del_DSCav1_mut3 (opt6)
gggagagggcgcuuggcuugcaaggacccugagcugcggcauugaagcacacccaacccaacucgacugaagucagccucacugaaccggaucugagaaucuucucucucugggcuugccagggcucuccgaaccuagcuagcauccucuucaauuccaacuagaaagcuuaccauggaauuacuaauccugaaagcaaacgcaauuacuacaauacuaacagcaguaaccuuuugcuuugccucaggacaaaacauaacugaagaauuuuaccaaucaacuugcucagcagucucaaaaggcuaucuaggagcacuacgaacagguugguauacuucagucauaacaauagaauuaucaaacauaaaagaaauuaaauguaacggaacugacgcaaaaguaaaacucaucaaacaagaacucgauaaauacaaaaacgcuguaaccgacuuacaacuacuaaugcaaucaacuccagcaacaggcuccggauccgcaauaugcagugguguagcaguaugcaaaguccuacaccuagaaggagaaguaaauaagauaaaaucugcucuacuaucaacaaauaaagcaguugucucccuaucaaauggagucucaguacucaccuucaaaguauuagaccucaaaaacuacauagacaaacaacuauuaccaauacucaacaaacaauccugcuccaucccuaacauagaaaccguaaucgaauuucaacaaaaaaauaacagacucuuagaaauaacuagagaauuuucaguuaaugcaggcgugacaacaccaguaucaacauauaugcuaacaaacuccgaacuccuaucccuaauaaacgacaugccaaucacaaacgaccaaaaaaaacuaauguccaacaacguacaaaucguaagacaacaaucauacucuauaaugugcauaauaaaagaagaaguacuggccuacguaguacaauuaccacucuacggaguaauagacaccccaugcuggaaacuccauacaucaccccuaugcacaacaaacacaaaagaaggauccaacauaugucucacuagaacagacagaggcugguacugcgacaacgcuggauccgucucauucuucccccaagcagaaacauguaaaguacaaucuaauagaguauuuugugacacaaugaacagccucacacuaccauccgaagucaaccuauguaacguagauauauuuaaucccaaauacgacugcaaaauaaugacauccaaaacagauguaucaucauccguuaucaccucacuaggagccauaguuucaugcuacggaaaaacaaaaugcacugcaucuaacaaaaauagagguauaauaaaaacauuuuccaacggcugcgacuacgucucaaacaaaggcguagacaccguaucaguaggaaauacauuauauugcguaaauaaacaagaaggccaaucccuauacguaaaaggagaacccaucauaaacuucuaugacccacuuguuuuccccucagacgaauuugacgccucaauaucacaaguaaaugaaaaaauaaaccaaucucuugccuucauuagaaaaucagacgaauuacuacacaacgucaacgcaggaaaaucaacaacaaacaucaugauaacaacgauaauaauagucauaauaguaauacuacuaucauuaaucgcagucggacuccuauuauauugcaaagcuagauaaggacuaguaauaaggaaacuguaugaaugucugugggcaggaagugaagagauccuucuguaaagguuuuuggaauuaugucugcugaauaauaaacuuuuuugaaauaauaaaucugguagaaaaaugagaucuaaaaaaaaaaaaaaaaaaaaaaaaaaaaaaaaaaaaaaaaaaaaaaaaaaaaaaaaaaaaaaaaugcaucccccccccccccccccccccccccccccccaaaggcucuuuucagagccaccagaauu

SEQ ID NO: 3809 - RNA, 1982 nt, Artificial Sequence
  mRNA product Design h-4 comprising derived and/or modified sequence from HRSV(A2)__F-del_DSCav1_mut3 (opt11)
gggagagggcgcuuggcuugcaaggacccugagcugcggcauugaagcacacccaacccaacucgacugaagucagccucacugaaccggaucugagaaucuucucucucugggcuugccagggcucuccgaaccuagcuagcauccucuucaauuccaacuagaaagcuuaccauggaacuacucauacuaaaagccaacgccauaaccaccauccucaccgcaguaacuuucugcuucgcuuccggccaaaacaucaccgaagaauuuuaccaaaguaccugcagcgcagucucaaaaggauaccuaggcgcccuacgcacaggcugguacaccuccgucauuaccaucgaacucuccaacaucaaagaaauuaaaugcaacgguacagacgcaaaagucaaacucaucaaacaagaacucgacaaauacaaaaacgcagucaccgaccuccaacuccucaugcaauccacccccgccacaggcucuggcuccgccaucugcucaggcguagcagucugcaaaguccugcaccucgaaggcgaagucaacaaaaucaagucagcccuccucuccaccaacaaggccgucguaucccucucaaacggaguuagcguccucaccuucaaaguccuagaccucaaaaacuacaucgauaaacaacuacuccccauccuaaacaaacaaucaugcuccaucccaaacaucgaaaccguaaucgaguuccaacaaaagaacaaccgccuccucgaaaucacacgugaguucuccguuaacgccggcgucaccacccccgucucuacauacaugcucaccaacuccgaacuccuuucccucaucaacgacaugccaaucaccaacgaccaaaagaaacucaugucaaacaacguacaaaucguccgacaacaaagcuacuccaucaugugcaucaucaaagaagaaguccuugcauacgucguucaacuaccccucuacggcguaaucgacacucccugcuggaaacuccacaccuccccgcucugcacaaccaacaccaaagaaggcagcaacaucugccucacccgaaccgaccgcggcugguacugcgauaacgccggauccgucuccuucuucccacaagcagaaacuugcaaaguccaauccaaccgcgucuucugcgacaccaugaacucccucacacuccccuccgaagucaaccugugcaacgucgacaucuucaacccaaaauacgacugcaaaaucaugaccucaaaaaccgacgucucaucuucugucaucaccucucucggcgcuaucgucuccugcuauggcaaaaccaaaugcaccgccuccaacaagaaccgcggcauuaucaagaccuucuccaacggcugcgacuacgucuccaauaagggcgucgacaccgucucugucggcaacacccuuuacugcguaaacaaacaagaaggucaaucucucuacgucaaaggagaacccaucaucaacuucuacgacccccuggucuuccccuccgacgaguucgaugcaucaaucucccaagucaacgaaaagaucaaccaaucucucgcuuucauccgcaaauccgacgaacuccuacacaacguaaacgccggcaaauccaccacaaacaucaugaucaccaccauuaucauagucaucaucgucauccuccucuccuuaaucgccguuggccuccuucucuacugcaaagcccgauaaggacuaguaauaaggaaacuguaugaaugucugugggcaggaagugaagagauccuucuguaaagguuuuuggaauuaugucugcugaauaauaaacuuuuuugaaauaauaaaucugguagaaaaaugagaucuaaaaaaaaaaaaaaaaaaaaaaaaaaaaaaaaaaaaaaaaaaaaaaaaaaaaaaaaaaaaaaaaugcaucccccccccccccccccccccccccccccccaaaggcucuuuucagagccaccagaauu

SEQ ID NO: 3810 - RNA, 1998 nt, Artificial Sequence
  mRNA product Design h-5 comprising derived and/or modified sequence from HRSV(A2)__F-del_DSCav1_mut3 (opt1)
gggagagggcgcuuggcuugcaaggacccugagcugcggcauugaagcacacccaacccaacucgacugaagucagccucacugaaccggaucugagaaucuucucucucugggcuugccagggcucuccgaaccuagcuagcauccucuucaauuccaacuagaaagcuuaccauggagcugcucauccugaaggccaacgccaucaccaccauccugacggcggugaccuucugcuucgccagcggccagaacaucaccgaggaguucuaccaguccacgugcagcgccgucuccaagggguaccucggcgcccugcggaccggcugguacaccuccgugaucaccaucgagcugagcaacaucaaggagaucaagugcaacgggaccgacgccaaggugaagcucaucaagcaggagcuggacaaguacaagaacgcggucacggaccugcagcuccugaugcaguccaccccggcaaccggcuccggcuccgccaucugcagcggcgucgccgugugcaaggugcugcaccucgagggggaggucaacaagaucaagagcgcccugcuguccaccaacaaggccguggugagccucuccaacggcgucagcgugcugaccuucaaggugcuggaccucaagaacuacaucgacaagcagcugcugcccauccugaacaagcagagcugcuccauccccaacaucgagacggugaucgaguuccagcagaagaacaaccggcuccuggagaucacccgcgaguucagcgugaacgccggggucaccacccccguguccacguacaugcugaccaacagcgagcuccugucccugaucaacgacaugccgaucaccaacgaccagaagaagcucaugagcaacaacgugcagaucguccggcagcaguccuacagcaucaugugcaucaucaaggaggaggugcuggcguacgugguccagcugccccucuacggcgugaucgacacccccugcuggaagcugcacacgagcccccugugcaccaccaacaccaaggagggguccaacaucugccucacgcgcaccgaccggggcugguacugcgacaacgccggcagcgucuccuucuucccgcaggccgagaccugcaaggugcagagcaaccgcguguucugcgacaccaugaacucccugacgcugcccagcgagguaaaccucugcaacgucgacaucuucaaccccaaguacgacugcaagaucaugaccuccaagaccgacgugagcuccagcgugaucaccucccugggggccaucgucagcugcuacggcaagacgaagugcaccgccagcaacaagaaccgggggaucaucaagaccuucuccaacggcugcgacuacgugagcaacaagggcguggacaccguguccgucgggaacacccuguacugcgugaacaagcaggagggccagagccucuacgugaagggggagcccaucaucaacuucuacgacccgcuggucuuccccuccgacgaguucgacgcgagcaucucccaggugaacgagaagaucaaccagagccuggccuucauccgcaaguccgacgagcugcuccacaacgugaacgccggcaagagcacgaccaacaucaugaucaccaccaucaucaucgucaucaucgugauccugcugucccucaucgccguggggcugcugcucuacugcaaggcccggugaggacuaguacuggcugcaucucccuuuccucuguccuccauccuucucccaggauggugaagggggaccugguacccagugauccccaccccaggauccuaaaucaugacuuaccugcuaauaaaaacucauuggaaaagugagaagaucuaaaaaaaaaaaaaaaaaaaaaaaaaaaaaaaaaaaaaaaaaaaaaaaaaaaaaaaaaaaaaaaaugcaucccccccccccccccccccccccccccccccaaaggcucuuuucagagccaccagaauu

SEQ ID NO: 3811 - RNA, 1998 nt, Artificial Sequence
  mRNA product Design h-5 comprising derived and/or modified sequence from HRSV(A2)__F-del_DSCav1_mut3 (opt1)
gggagagggcgcuuggcuugcaaggacccugagcugcggcauugaagcacacccaacccaacucgacugaagucagccucacugaaccggaucugagaaucuucucucucugggcuugccagggcucuccgaaccuagcuagcauccucuucaauuccaacuagaaagcuuaccauggagcugcucauccugaaggccaacgccaucaccaccauccugacggcggugaccuucugcuucgccagcggccagaacaucaccgaggaguucuaccaguccacgugcagcgccgucuccaagggguaccucggcgcccugcgcaccgggugguacaccagcgugaucaccaucgagcuguccaacaucaaggagaucaagugcaacggcaccgacgccaaggugaagcucaucaagcaggagcuggacaaguacaagaacgcggucacggaccugcagcuccugaugcagagcacccccgccaccggguccggcagcgccaucugcuccggcguggccgugugcaagguccugcaccucgagggggaggugaacaagaucaagagcgcgcugcuguccaccaacaaggccguggucagccucuccaacggcgugagcgugcugacguucaagguccuggaccucaagaacuacaucgacaagcagcugcugccgauccucaacaagcaguccugcagcauccccaacaucgagaccgugaucgaguuccagcagaagaacaaccggcugcuggagaucacccgcgaguucuccgugaacgccggggucaccacgcccgugagcaccuacaugcucaccaacuccgagcugcugagccucaucaacgacaugcccaucaccaacgaccagaagaagcugaugagcaacaacgugcagaucguccggcagcaguccuacagcaucaugugcaucaucaaggaggaggugcuggccuacgugguccagcucccgcuguacggcgugaucgacacgcccugcuggaagcugcacaccagcccccucugcaccaccaacacgaaggagggguccaacaucugccugacccgcaccgaccggggcugguacugcgacaacgccggcuccgugagcuucuucccccaggcggagaccugcaagguccaguccaaccgcguguucugcgacacgaugaacagccugacccucccguccgaggucaaccugugcaacguggacaucuucaaccccaaguacgacugcaagaucaugaccagcaagaccgacguguccagcuccgucaucacgagccugggggccaucguguccugcuacggcaagaccaagugcaccgccagcaacaagaaccgggggaucaucaagaccuucuccaacggcugcgacuacgugagcaacaagggcgucgacacgguguccguggggaacacccucuacugcgucaacaagcaggagggccagagccuguacgugaagggggagcccaucaucaacuucuacgacccccugguguucccgagcgacgaguucgacgccuccaucagccaggucaacgagaagaucaaccagucccucgccuucauccgcaagagcgacgagcugcugcacaacgugaacgcgggcaaguccaccaccaacaucaugaucaccacgaucaucaucgugaucaucgucauccuccugagccugaucgccguggggcuccugcuguacugcaaggcccggugaggacuaguacuggcugcaucucccuuuccucuguccuccauccuucucccaggauggugaagggggaccugguacccagugauccccaccccaggauccuaaaucaugacuuaccugcuaauaaaaacucauuggaaaagugagaagaucuaaaaaaaaaaaaaaaaaaaaaaaaaaaaaaaaaaaaaaaaaaaaaaaaaaaaaaaaaaaaaaaaugcaucccccccccccccccccccccccccccccccaaaggcucuuuucagagccaccagaauu

SEQ ID NO: 3812 - RNA, 1998 nt, Artificial Sequence
  mRNA product Design h-5 comprising derived and/or modified sequence from HRSV(A2)__F-del_DSCav1_mut3 (opt2)
gggagagggcgcuuggcuugcaaggacccugagcugcggcauugaagcacacccaacccaacucgacugaagucagccucacugaaccggaucugagaaucuucucucucugggcuugccagggcucuccgaaccuagcuagcauccucuucaauuccaacuagaaagcuuaccauggagcuccucauccucaaggccaacgccaucaccaccauccucaccgccgucaccuucugcuucgccuccggccagaacaucaccgaggaguucuaccaguccaccugcuccgccgucuccaagggcuaccucggcgcccuccgcaccggcugguacaccuccgucaucaccaucgagcucuccaacaucaaggagaucaagugcaacggcaccgacgccaaggucaagcucaucaagcaggagcucgacaaguacaagaacgccgucaccgaccuccagcuccucaugcaguccacccccgccaccggcuccggcuccgccaucugcuccggcgucgccgucugcaagguccuccaccucgagggcgaggucaacaagaucaaguccgcccuccucuccaccaacaaggccgucgucucccucuccaacggcgucuccguccucaccuucaagguccucgaccucaagaacuacaucgacaagcagcuccuccccauccucaacaagcaguccugcuccauccccaacaucgagaccgucaucgaguuccagcagaagaacaaccgccuccucgagaucacccgcgaguucuccgucaacgccggcgucaccacccccgucuccaccuacaugcucaccaacuccgagcuccucucccucaucaacgacaugcccaucaccaacgaccagaagaagcucauguccaacaacguccagaucguccgccagcaguccuacuccaucaugugcaucaucaaggaggagguccucgccuacgucguccagcucccccucuacggcgucaucgacacccccugcuggaagcuccacaccuccccccucugcaccaccaacaccaaggagggcuccaacaucugccucacccgcaccgaccgcggcugguacugcgacaacgccggcuccgucuccuucuucccccaggccgagaccugcaagguccaguccaaccgcgucuucugcgacaccaugaacucccucacccuccccuccgaggucaaccucugcaacgucgacaucuucaaccccaaguacgacugcaagaucaugaccuccaagaccgacgucuccuccuccgucaucaccucccucggcgccaucgucuccugcuacggcaagaccaagugcaccgccuccaacaagaaccgcggcaucaucaagaccuucuccaacggcugcgacuacgucuccaacaagggcgucgacaccgucuccgucggcaacacccucuacugcgucaacaagcaggagggccagucccucuacgucaagggcgagcccaucaucaacuucuacgacccccucgucuuccccuccgacgaguucgacgccuccaucucccaggucaacgagaagaucaaccagucccucgccuucauccgcaaguccgacgagcuccuccacaacgucaacgccggcaaguccaccaccaacaucaugaucaccaccaucaucaucgucaucaucgucauccuccucucccucaucgccgucggccuccuccucuacugcaaggcccgcugaggacuaguacuggcugcaucucccuuuccucuguccuccauccuucucccaggauggugaagggggaccugguacccagugauccccaccccaggauccuaaaucaugacuuaccugcuaauaaaaacucauuggaaaagugagaagaucuaaaaaaaaaaaaaaaaaaaaaaaaaaaaaaaaaaaaaaaaaaaaaaaaaaaaaaaaaaaaaaaaugcaucccccccccccccccccccccccccccccccaaaggcucuuuucagagccaccagaauu

SEQ ID NO: 3813 - RNA, 1998 nt, Artificial Sequence
  mRNA product Design h-5 comprising derived and/or modified sequence from HRSV(A2)__F-del_DSCav1_mut3 (opt3)
gggagagggcgcuuggcuugcaaggacccugagcugcggcauugaagcacacccaacccaacucgacugaagucagccucacugaaccggaucugagaaucuucucucucugggcuugccagggcucuccgaaccuagcuagcauccucuucaauuccaacuagaaagcuuaccauggagcugcucauccuuaaggccaacgcuauuaccacaauacugacugcagugacguucugcuuugccagcggccagaauaucaccgaagaguucuaccaauccacauguucugcggucucaaaaggguauuugggagcuuuaagaacugguugguacaccaguguuauuacaaucgaacugagcaacauuaaggagaucaaaugcaauggcaccgacgccaaggugaaacuaauaaagcaggaacucgauaaguauaaaaacgcaguaacugaccugcagcuucugaugcaguccacacccgccaccgggucuggaucggcuaucuguucaggcguggcagucugcaagguguugcaccucgagggugagguuaauaaaauuaagagcgcccugcugaguacgaacaaagcuguggucucccucucuaauggggugagcguauuaacuuuuaagguucuggaucuuaagaacuacaucgacaaacaauugcugccuauucuaaauaagcaguccuguucaaucccaaacauagaaaccgugauugaguuccagcagaaaaauaacaggcuccuggaaaucacacgggaguuuagugucaaugccggagugacuaccccggugagcacauauaugcuuaccaacucugagcuguugucccucauuaaugauaugcccaucacgaacgaccaaaagaaacugaugucaaacaauguccagaucguucgccagcagagcuacaguauuaugugcauaaucaaggaagagguguuagcguauguagugcaacugccucucuacggcgucauugauacuccauguuggaaacuucauacaucuccccugugcaccacuaacacaaaggaaggcuccaauaucuguuugacccgaacggaccgugggugguacugcgauaacgcaggaagcgugucguucuuuccucaggccgagaccuguaagguucagucuaauagaguguucugcgacacaaugaacucccuaacucugccaucagaagucaaucucugcaacguggauauauuuaaucccaaauaugacuguaagauuaugaccaguaaaacagauguaagcuccucuguuaucacuagccugggugcuaucgugucaugcuacggcaagaccaaauguacagccaguaacaagaauagggggauuaucaagaccuucuccaacggaugcgacuaugucagcaauaaaggcguggacacugucucuguggguaacacgcuuuacuguguuaauaagcaagaggggcagucacuguaugugaaaggagagccuauuauaaacuuuuacgauccauugguauucccgagugacgaauuugaugcaagcaucucccaggucaacgagaagauuaaucagucucucgcuuucauccggaaaucggacgaacuguuacacaacgugaaugccggcaagagcacaaccaacaucaugauuacuaccauaaucauuguuaucauugugauccugcuaucccucauagcggucggccugcuuuuguauugcaaggcccgcugaggacuaguacuggcugcaucucccuuuccucuguccuccauccuucucccaggauggugaagggggaccugguacccagugauccccaccccaggauccuaaaucaugacuuaccugcuaauaaaaacucauuggaaaagugagaagaucuaaaaaaaaaaaaaaaaaaaaaaaaaaaaaaaaaaaaaaaaaaaaaaaaaaaaaaaaaaaaaaaaugcaucccccccccccccccccccccccccccccccaaaggcucuuuucagagccaccagaauu

SEQ ID NO: 3814 - RNA, 1998 nt, Artificial Sequence
  mRNA product Design h-5 comprising derived and/or modified sequence from HRSV(A2)__F-del_DSCav1_mut3 (opt4)
gggagagggcgcuuggcuugcaaggacccugagcugcggcauugaagcacacccaacccaacucgacugaagucagccucacugaaccggaucugagaaucuucucucucugggcuugccagggcucuccgaaccuagcuagcauccucuucaauuccaacuagaaagcuuaccauggagcugcugauccugaaggccaacgccaucaccaccauccugaccgccgugaccuucugcuucgccagcggccagaacaucaccgaggaguucuaccagagcaccugcagcgccgugagcaagggcuaccugggcgcccugagaaccggcugguacaccagcgugaucaccaucgagcugagcaacaucaaggagaucaagugcaacggcaccgacgccaaggugaagcugaucaagcaggagcuggacaaguacaagaacgccgugaccgaccugcagcugcugaugcagagcacccccgccaccggcagcggcagcgccaucugcagcggcguggccgugugcaaggugcugcaccuggagggcgaggugaacaagaucaagagcgcccugcugagcaccaacaaggccguggugagccugagcaacggcgugagcgugcugaccuucaaggugcuggaccugaagaacuacaucgacaagcagcugcugcccauccugaacaagcagagcugcagcauccccaacaucgagaccgugaucgaguuccagcagaagaacaacagacugcuggagaucaccagagaguucagcgugaacgccggcgugaccacccccgugagcaccuacaugcugaccaacagcgagcugcugagccugaucaacgacaugcccaucaccaacgaccagaagaagcugaugagcaacaacgugcagaucgugagacagcagagcuacagcaucaugugcaucaucaaggaggaggugcuggccuacguggugcagcugccccuguacggcgugaucgacacccccugcuggaagcugcacaccagcccccugugcaccaccaacaccaaggagggcagcaacaucugccugaccagaaccgacagaggcugguacugcgacaacgccggcagcgugagcuucuucccccaggccgagaccugcaaggugcagagcaacagaguguucugcgacaccaugaacagccugacccugcccagcgaggugaaccugugcaacguggacaucuucaaccccaaguacgacugcaagaucaugaccagcaagaccgacgugagcagcagcgugaucaccagccugggcgccaucgugagcugcuacggcaagaccaagugcaccgccagcaacaagaacagaggcaucaucaagaccuucagcaacggcugcgacuacgugagcaacaagggcguggacaccgugagcgugggcaacacccuguacugcgugaacaagcaggagggccagagccuguacgugaagggcgagcccaucaucaacuucuacgacccccugguguuccccagcgacgaguucgacgccagcaucagccaggugaacgagaagaucaaccagagccuggccuucaucagaaagagcgacgagcugcugcacaacgugaacgccggcaagagcaccaccaacaucaugaucaccaccaucaucaucgugaucaucgugauccugcugagccugaucgccgugggccugcugcuguacugcaaggccagaugaggacuaguacuggcugcaucucccuuuccucuguccuccauccuucucccaggauggugaagggggaccugguacccagugauccccaccccaggauccuaaaucaugacuuaccugcuaauaaaaacucauuggaaaagugagaagaucuaaaaaaaaaaaaaaaaaaaaaaaaaaaaaaaaaaaaaaaaaaaaaaaaaaaaaaaaaaaaaaaaugcaucccccccccccccccccccccccccccccccaaaggcucuuuucagagccaccagaauu

SEQ ID NO: 3815 - RNA, 1998 nt, Artificial Sequence
  mRNA product Design h-5 comprising derived and/or modified sequence from HRSV(A2)__F-del_DSCav1_mut3 (opt5)
gggagagggcgcuuggcuugcaaggacccugagcugcggcauugaagcacacccaacccaacucgacugaagucagccucacugaaccggaucugagaaucuucucucucugggcuugccagggcucuccgaaccuagcuagcauccucuucaauuccaacuagaaagcuuaccauggagcugcucauccugaaggccaacgcuauuaccacaauccuuacggccgugaccuucugcuuugcgagcggccagaauauuacagaagaguucuaccaauccaccuguucugcugucagcaaaggguaucugggagcccucagaacaggcugguacaccuccguuaucacaauugaacugucuaacaucaaggagaucaaaugcaaugggaccgacgccaaggugaaacuuauuaagcaggaacuggauaaguauaaaaacgcugugacggaccuccagcugcugaugcagagcacccccgccacaggauccggcucugcuaucuguagcggggucgccgugugcaagguucuccaccuggagggagaggugaauaaaauuaaguccgcgcuucugagcaccaacaaagccgucgugucucucuccaauggcguuagcgugcugacauuuaagguccuugaucugaagaacuacaucgacaaacaacuccugccuauucugaauaagcagucuuguuccaucccgaacauugaaaccgugaucgaguuccagcagaaaaauaaccggcuccuggaaaucacgcgcgaguuuagcgugaaugcuggcgucacaacccccguuucuacauauaugcuuaccaacuccgagcugcucagccugauuaaugauaugccuaucaccaacgaccaaaagaaacuuauguccaacaaugugcagauugugagacagcagucuuacagcaucaugugcauuaucaaggaagagguccuggccuaugugguucaacucccccuguacggggugaucgauacaccuuguuggaaacugcauacgagcccccucugcaccacaaacaccaaggaaggauccaauauuugucugacacggaccgaccgcggcugguacugcgauaacgcugggucugucuccuucuuuccucaggccgagacguguaaggugcagagcaauagaguuuucugcgacacaaugaacucucuuacccugccgagcgaagugaaucucugcaacgucgauaucuuuaaucccaaauaugacuguaagauuaugaccuccaaaacagaugugucuagcuccgucaucaccagccugggagcgauugugucuugcuacggcaagacaaaauguacggccuccaacaagaaucgggggaucaucaagaccuucagcaacggaugcgacuauguuucuaauaaaggcguggacacagucuccgugggcaacacccuuuacuguguuaauaagcaagaggggcagagccuguaugugaaaggagagccuauuaucaacuuuuacgauccccucgucuucccuuccgacgaauuugaugcuucuauuagccaggugaacgagaagaucaaucagucccuggccuucauucgcaaaucugacgaacugcuccacaacgugaaugcuggcaagagcacaaccaacaucaugauuacgaccaucaucauuguuaucauugucauccugcuuucccugauugccguggggcuccugcuguauugcaaggccagaugaggacuaguacuggcugcaucucccuuuccucuguccuccauccuucucccaggauggugaagggggaccugguacccagugauccccaccccaggauccuaaaucaugacuuaccugcuaauaaaaacucauuggaaaagugagaagaucuaaaaaaaaaaaaaaaaaaaaaaaaaaaaaaaaaaaaaaaaaaaaaaaaaaaaaaaaaaaaaaaaugcaucccccccccccccccccccccccccccccccaaaggcucuuuucagagccaccagaauu

SEQ ID NO: 3816 - RNA, 1998 nt, Artificial Sequence
  mRNA product Design h-5 comprising derived and/or modified sequence from HRSV(A2)__F-del_DSCav1_mut3 (opt6)
gggagagggcgcuuggcuugcaaggacccugagcugcggcauugaagcacacccaacccaacucgacugaagucagccucacugaaccggaucugagaaucuucucucucugggcuugccagggcucuccgaaccuagcuagcauccucuucaauuccaacuagaaagcuuaccauggaauuacuaauccugaaagcaaacgcaauuacuacaauacuaacagcaguaaccuuuugcuuugccucaggacaaaacauaacugaagaauuuuaccaaucaacuugcucagcagucucaaaaggcuaucuaggagcacuacgaacagguugguauacuucagucauaacaauagaauuaucaaacauaaaagaaauuaaauguaacggaacugacgcaaaaguaaaacucaucaaacaagaacucgauaaauacaaaaacgcuguaaccgacuuacaacuacuaaugcaaucaacuccagcaacaggcuccggauccgcaauaugcagugguguagcaguaugcaaaguccuacaccuagaaggagaaguaaauaagauaaaaucugcucuacuaucaacaaauaaagcaguugucucccuaucaaauggagucucaguacucaccuucaaaguauuagaccucaaaaacuacauagacaaacaacuauuaccaauacucaacaaacaauccugcuccaucccuaacauagaaaccguaaucgaauuucaacaaaaaaauaacagacucuuagaaauaacuagagaauuuucaguuaaugcaggcgugacaacaccaguaucaacauauaugcuaacaaacuccgaacuccuaucccuaauaaacgacaugccaaucacaaacgaccaaaaaaaacuaauguccaacaacguacaaaucguaagacaacaaucauacucuauaaugugcauaauaaaagaagaaguacuggccuacguaguacaauuaccacucuacggaguaauagacaccccaugcuggaaacuccauacaucaccccuaugcacaacaaacacaaaagaaggauccaacauaugucucacuagaacagacagaggcugguacugcgacaacgcuggauccgucucauucuucccccaagcagaaacauguaaaguacaaucuaauagaguauuuugugacacaaugaacagccucacacuaccauccgaagucaaccuauguaacguagauauauuuaaucccaaauacgacugcaaaauaaugacauccaaaacagauguaucaucauccguuaucaccucacuaggagccauaguuucaugcuacggaaaaacaaaaugcacugcaucuaacaaaaauagagguauaauaaaaacauuuuccaacggcugcgacuacgucucaaacaaaggcguagacaccguaucaguaggaaauacauuauauugcguaaauaaacaagaaggccaaucccuauacguaaaaggagaacccaucauaaacuucuaugacccacuuguuuuccccucagacgaauuugacgccucaauaucacaaguaaaugaaaaaauaaaccaaucucuugccuucauuagaaaaucagacgaauuacuacacaacgucaacgcaggaaaaucaacaacaaacaucaugauaacaacgauaauaauagucauaauaguaauacuacuaucauuaaucgcagucggacuccuauuauauugcaaagcuagauaaggacuaguacuggcugcaucucccuuuccucuguccuccauccuucucccaggauggugaagggggaccugguacccagugauccccaccccaggauccuaaaucaugacuuaccugcuaauaaaaacucauuggaaaagugagaagaucuaaaaaaaaaaaaaaaaaaaaaaaaaaaaaaaaaaaaaaaaaaaaaaaaaaaaaaaaaaaaaaaaugcaucccccccccccccccccccccccccccccccaaaggcucuuuucagagccaccagaauu

SEQ ID NO: 3817 - RNA, 1998 nt, Artificial Sequence
  mRNA product Design h-5 comprising derived and/or modified sequence from HRSV(A2)__F-del_DSCav1_mut3 (opt11)
gggagagggcgcuuggcuugcaaggacccugagcugcggcauugaagcacacccaacccaacucgacugaagucagccucacugaaccggaucugagaaucuucucucucugggcuugccagggcucuccgaaccuagcuagcauccucuucaauuccaacuagaaagcuuaccauggaacuacucauacuaaaagccaacgccauaaccaccauccucaccgcaguaacuuucugcuucgcuuccggccaaaacaucaccgaagaauuuuaccaaaguaccugcagcgcagucucaaaaggauaccuaggcgcccuacgcacaggcugguacaccuccgucauuaccaucgaacucuccaacaucaaagaaauuaaaugcaacgguacagacgcaaaagucaaacucaucaaacaagaacucgacaaauacaaaaacgcagucaccgaccuccaacuccucaugcaauccacccccgccacaggcucuggcuccgccaucugcucaggcguagcagucugcaaaguccugcaccucgaaggcgaagucaacaaaaucaagucagcccuccucuccaccaacaaggccgucguaucccucucaaacggaguuagcguccucaccuucaaaguccuagaccucaaaaacuacaucgauaaacaacuacuccccauccuaaacaaacaaucaugcuccaucccaaacaucgaaaccguaaucgaguuccaacaaaagaacaaccgccuccucgaaaucacacgugaguucuccguuaacgccggcgucaccacccccgucucuacauacaugcucaccaacuccgaacuccuuucccucaucaacgacaugccaaucaccaacgaccaaaagaaacucaugucaaacaacguacaaaucguccgacaacaaagcuacuccaucaugugcaucaucaaagaagaaguccuugcauacgucguucaacuaccccucuacggcguaaucgacacucccugcuggaaacuccacaccuccccgcucugcacaaccaacaccaaagaaggcagcaacaucugccucacccgaaccgaccgcggcugguacugcgauaacgccggauccgucuccuucuucccacaagcagaaacuugcaaaguccaauccaaccgcgucuucugcgacaccaugaacucccucacacuccccuccgaagucaaccugugcaacgucgacaucuucaacccaaaauacgacugcaaaaucaugaccucaaaaaccgacgucucaucuucugucaucaccucucucggcgcuaucgucuccugcuauggcaaaaccaaaugcaccgccuccaacaagaaccgcggcauuaucaagaccuucuccaacggcugcgacuacgucuccaauaagggcgucgacaccgucucugucggcaacacccuuuacugcguaaacaaacaagaaggucaaucucucuacgucaaaggagaacccaucaucaacuucuacgacccccuggucuuccccuccgacgaguucgaugcaucaaucucccaagucaacgaaaagaucaaccaaucucucgcuuucauccgcaaauccgacgaacuccuacacaacguaaacgccggcaaauccaccacaaacaucaugaucaccaccauuaucauagucaucaucgucauccuccucuccuuaaucgccguuggccuccuucucuacugcaaagcccgauaaggacuaguacuggcugcaucucccuuuccucuguccuccauccuucucccaggauggugaagggggaccugguacccagugauccccaccccaggauccuaaaucaugacuuaccugcuaauaaaaacucauuggaaaagugagaagaucuaaaaaaaaaaaaaaaaaaaaaaaaaaaaaaaaaaaaaaaaaaaaaaaaaaaaaaaaaaaaaaaaugcaucccccccccccccccccccccccccccccccaaaggcucuuuucagagccaccagaauu

SEQ ID NO: 3818 - RNA, 1931 nt, Artificial Sequence
  mRNA product Design i-1 comprising derived and/or modified sequence from HRSV(A2)__F-del_DSCav1_mut3 (opt1)
gggagagggcgcuuggcuugcaaggacccugagcugcggcauugaagcacacccaacccaacucgacugaagucagccucacugaaccggaucugagaaucuucucucucugggcuugccagggcucuccgaaccuagcuagcauccucuucaauuccaacuagaaagcuuaccauggagcugcucauccugaaggccaacgccaucaccaccauccugacggcggugaccuucugcuucgccagcggccagaacaucaccgaggaguucuaccaguccacgugcagcgccgucuccaagggguaccucggcgcccugcggaccggcugguacaccuccgugaucaccaucgagcugagcaacaucaaggagaucaagugcaacgggaccgacgccaaggugaagcucaucaagcaggagcuggacaaguacaagaacgcggucacggaccugcagcuccugaugcaguccaccccggcaaccggcuccggcuccgccaucugcagcggcgucgccgugugcaaggugcugcaccucgagggggaggucaacaagaucaagagcgcccugcuguccaccaacaaggccguggugagccucuccaacggcgucagcgugcugaccuucaaggugcuggaccucaagaacuacaucgacaagcagcugcugcccauccugaacaagcagagcugcuccauccccaacaucgagacggugaucgaguuccagcagaagaacaaccggcuccuggagaucacccgcgaguucagcgugaacgccggggucaccacccccguguccacguacaugcugaccaacagcgagcuccugucccugaucaacgacaugccgaucaccaacgaccagaagaagcucaugagcaacaacgugcagaucguccggcagcaguccuacagcaucaugugcaucaucaaggaggaggugcuggcguacgugguccagcugccccucuacggcgugaucgacacccccugcuggaagcugcacacgagcccccugugcaccaccaacaccaaggagggguccaacaucugccucacgcgcaccgaccggggcugguacugcgacaacgccggcagcgucuccuucuucccgcaggccgagaccugcaaggugcagagcaaccgcguguucugcgacaccaugaacucccugacgcugcccagcgagguaaaccucugcaacgucgacaucuucaaccccaaguacgacugcaagaucaugaccuccaagaccgacgugagcuccagcgugaucaccucccugggggccaucgucagcugcuacggcaagacgaagugcaccgccagcaacaagaaccgggggaucaucaagaccuucuccaacggcugcgacuacgugagcaacaagggcguggacaccguguccgucgggaacacccuguacugcgugaacaagcaggagggccagagccucuacgugaagggggagcccaucaucaacuucuacgacccgcuggucuuccccuccgacgaguucgacgcgagcaucucccaggugaacgagaagaucaaccagagccuggccuucauccgcaaguccgacgagcugcuccacaacgugaacgccggcaagagcacgaccaacaucaugaucaccaccaucaucaucgucaucaucgugauccugcugucccucaucgccguggggcugcugcucuacugcaaggcccggugaggacuaguguccaccugucccuccugggcugcuggauugucucguuuuccugccaaauaaacaggaucagcgcuuuacagaucuaaaaaaaaaaaaaaaaaaaaaaaaaaaaaaaaaaaaaaaaaaaaaaaaaaaaaaaaaaaaaaaaugcaucccccccccccccccccccccccccccccccaaaggcucuuuucagagccaccagaauu

SEQ ID NO: 3819 - RNA, 1931 nt, Artificial Sequence
  mRNA product Design i-1 comprising derived and/or modified sequence from HRSV(A2)__F-del_DSCav1_mut3 (opt1)
gggagagggcgcuuggcuugcaaggacccugagcugcggcauugaagcacacccaacccaacucgacugaagucagccucacugaaccggaucugagaaucuucucucucugggcuugccagggcucuccgaaccuagcuagcauccucuucaauuccaacuagaaagcuuaccauggagcugcucauccugaaggccaacgccaucaccaccauccugacggcggugaccuucugcuucgccagcggccagaacaucaccgaggaguucuaccaguccacgugcagcgccgucuccaagggguaccucggcgcccugcgcaccgggugguacaccagcgugaucaccaucgagcuguccaacaucaaggagaucaagugcaacggcaccgacgccaaggugaagcucaucaagcaggagcuggacaaguacaagaacgcggucacggaccugcagcuccugaugcagagcacccccgccaccggguccggcagcgccaucugcuccggcguggccgugugcaagguccugcaccucgagggggaggugaacaagaucaagagcgcgcugcuguccaccaacaaggccguggucagccucuccaacggcgugagcgugcugacguucaagguccuggaccucaagaacuacaucgacaagcagcugcugccgauccucaacaagcaguccugcagcauccccaacaucgagaccgugaucgaguuccagcagaagaacaaccggcugcuggagaucacccgcgaguucuccgugaacgccggggucaccacgcccgugagcaccuacaugcucaccaacuccgagcugcugagccucaucaacgacaugcccaucaccaacgaccagaagaagcugaugagcaacaacgugcagaucguccggcagcaguccuacagcaucaugugcaucaucaaggaggaggugcuggccuacgugguccagcucccgcuguacggcgugaucgacacgcccugcuggaagcugcacaccagcccccucugcaccaccaacacgaaggagggguccaacaucugccugacccgcaccgaccggggcugguacugcgacaacgccggcuccgugagcuucuucccccaggcggagaccugcaagguccaguccaaccgcguguucugcgacacgaugaacagccugacccucccguccgaggucaaccugugcaacguggacaucuucaaccccaaguacgacugcaagaucaugaccagcaagaccgacguguccagcuccgucaucacgagccugggggccaucguguccugcuacggcaagaccaagugcaccgccagcaacaagaaccgggggaucaucaagaccuucuccaacggcugcgacuacgugagcaacaagggcgucgacacgguguccguggggaacacccucuacugcgucaacaagcaggagggccagagccuguacgugaagggggagcccaucaucaacuucuacgacccccugguguucccgagcgacgaguucgacgccuccaucagccaggucaacgagaagaucaaccagucccucgccuucauccgcaagagcgacgagcugcugcacaacgugaacgcgggcaaguccaccaccaacaucaugaucaccacgaucaucaucgugaucaucgucauccuccugagccugaucgccguggggcuccugcuguacugcaaggcccggugaggacuaguguccaccugucccuccugggcugcuggauugucucguuuuccugccaaauaaacaggaucagcgcuuuacagaucuaaaaaaaaaaaaaaaaaaaaaaaaaaaaaaaaaaaaaaaaaaaaaaaaaaaaaaaaaaaaaaaaugcaucccccccccccccccccccccccccccccccaaaggcucuuuucagagccaccagaauu

SEQ ID NO: 3820 - RNA, 1931 nt, Artificial Sequence
  mRNA product Design i-1 comprising derived and/or modified sequence from HRSV(A2)__F-del_DSCav1_mut3 (opt2)
gggagagggcgcuuggcuugcaaggacccugagcugcggcauugaagcacacccaacccaacucgacugaagucagccucacugaaccggaucugagaaucuucucucucugggcuugccagggcucuccgaaccuagcuagcauccucuucaauuccaacuagaaagcuuaccauggagcuccucauccucaaggccaacgccaucaccaccauccucaccgccgucaccuucugcuucgccuccggccagaacaucaccgaggaguucuaccaguccaccugcuccgccgucuccaagggcuaccucggcgcccuccgcaccggcugguacaccuccgucaucaccaucgagcucuccaacaucaaggagaucaagugcaacggcaccgacgccaaggucaagcucaucaagcaggagcucgacaaguacaagaacgccgucaccgaccuccagcuccucaugcaguccacccccgccaccggcuccggcuccgccaucugcuccggcgucgccgucugcaagguccuccaccucgagggcgaggucaacaagaucaaguccgcccuccucuccaccaacaaggccgucgucucccucuccaacggcgucuccguccucaccuucaagguccucgaccucaagaacuacaucgacaagcagcuccuccccauccucaacaagcaguccugcuccauccccaacaucgagaccgucaucgaguuccagcagaagaacaaccgccuccucgagaucacccgcgaguucuccgucaacgccggcgucaccacccccgucuccaccuacaugcucaccaacuccgagcuccucucccucaucaacgacaugcccaucaccaacgaccagaagaagcucauguccaacaacguccagaucguccgccagcaguccuacuccaucaugugcaucaucaaggaggagguccucgccuacgucguccagcucccccucuacggcgucaucgacacccccugcuggaagcuccacaccuccccccucugcaccaccaacaccaaggagggcuccaacaucugccucacccgcaccgaccgcggcugguacugcgacaacgccggcuccgucuccuucuucccccaggccgagaccugcaagguccaguccaaccgcgucuucugcgacaccaugaacucccucacccuccccuccgaggucaaccucugcaacgucgacaucuucaaccccaaguacgacugcaagaucaugaccuccaagaccgacgucuccuccuccgucaucaccucccucggcgccaucgucuccugcuacggcaagaccaagugcaccgccuccaacaagaaccgcggcaucaucaagaccuucuccaacggcugcgacuacgucuccaacaagggcgucgacaccgucuccgucggcaacacccucuacugcgucaacaagcaggagggccagucccucuacgucaagggcgagcccaucaucaacuucuacgacccccucgucuuccccuccgacgaguucgacgccuccaucucccaggucaacgagaagaucaaccagucccucgccuucauccgcaaguccgacgagcuccuccacaacgucaacgccggcaaguccaccaccaacaucaugaucaccaccaucaucaucgucaucaucgucauccuccucucccucaucgccgucggccuccuccucuacugcaaggcccgcugaggacuaguguccaccugucccuccugggcugcuggauugucucguuuuccugccaaauaaacaggaucagcgcuuuacagaucuaaaaaaaaaaaaaaaaaaaaaaaaaaaaaaaaaaaaaaaaaaaaaaaaaaaaaaaaaaaaaaaaugcaucccccccccccccccccccccccccccccccaaaggcucuuuucagagccaccagaauu

SEQ ID NO: 3821 - RNA, 1931 nt, Artificial Sequence
  mRNA product Design i-1 comprising derived and/or modified sequence from HRSV(A2)__F-del_DSCav1_mut3 (opt3)
gggagagggcgcuuggcuugcaaggacccugagcugcggcauugaagcacacccaacccaacucgacugaagucagccucacugaaccggaucugagaaucuucucucucugggcuugccagggcucuccgaaccuagcuagcauccucuucaauuccaacuagaaagcuuaccauggagcugcucauccuuaaggccaacgcuauuaccacaauacugacugcagugacguucugcuuugccagcggccagaauaucaccgaagaguucuaccaauccacauguucugcggucucaaaaggguauuugggagcuuuaagaacugguugguacaccaguguuauuacaaucgaacugagcaacauuaaggagaucaaaugcaauggcaccgacgccaaggugaaacuaauaaagcaggaacucgauaaguauaaaaacgcaguaacugaccugcagcuucugaugcaguccacacccgccaccgggucuggaucggcuaucuguucaggcguggcagucugcaagguguugcaccucgagggugagguuaauaaaauuaagagcgcccugcugaguacgaacaaagcuguggucucccucucuaauggggugagcguauuaacuuuuaagguucuggaucuuaagaacuacaucgacaaacaauugcugccuauucuaaauaagcaguccuguucaaucccaaacauagaaaccgugauugaguuccagcagaaaaauaacaggcuccuggaaaucacacgggaguuuagugucaaugccggagugacuaccccggugagcacauauaugcuuaccaacucugagcuguugucccucauuaaugauaugcccaucacgaacgaccaaaagaaacugaugucaaacaauguccagaucguucgccagcagagcuacaguauuaugugcauaaucaaggaagagguguuagcguauguagugcaacugccucucuacggcgucauugauacuccauguuggaaacuucauacaucuccccugugcaccacuaacacaaaggaaggcuccaauaucuguuugacccgaacggaccgugggugguacugcgauaacgcaggaagcgugucguucuuuccucaggccgagaccuguaagguucagucuaauagaguguucugcgacacaaugaacucccuaacucugccaucagaagucaaucucugcaacguggauauauuuaaucccaaauaugacuguaagauuaugaccaguaaaacagauguaagcuccucuguuaucacuagccugggugcuaucgugucaugcuacggcaagaccaaauguacagccaguaacaagaauagggggauuaucaagaccuucuccaacggaugcgacuaugucagcaauaaaggcguggacacugucucuguggguaacacgcuuuacuguguuaauaagcaagaggggcagucacuguaugugaaaggagagccuauuauaaacuuuuacgauccauugguauucccgagugacgaauuugaugcaagcaucucccaggucaacgagaagauuaaucagucucucgcuuucauccggaaaucggacgaacuguuacacaacgugaaugccggcaagagcacaaccaacaucaugauuacuaccauaaucauuguuaucauugugauccugcuaucccucauagcggucggccugcuuuuguauugcaaggcccgcugaggacuaguguccaccugucccuccugggcugcuggauugucucguuuuccugccaaauaaacaggaucagcgcuuuacagaucuaaaaaaaaaaaaaaaaaaaaaaaaaaaaaaaaaaaaaaaaaaaaaaaaaaaaaaaaaaaaaaaaugcaucccccccccccccccccccccccccccccccaaaggcucuuuucagagccaccagaauu

SEQ ID NO: 3822 - RNA, 1931 nt, Artificial Sequence
  mRNA product Design i-1 comprising derived and/or modified sequence from HRSV(A2)__F-del_DSCav1_mut3 (opt4)
gggagagggcgcuuggcuugcaaggacccugagcugcggcauugaagcacacccaacccaacucgacugaagucagccucacugaaccggaucugagaaucuucucucucugggcuugccagggcucuccgaaccuagcuagcauccucuucaauuccaacuagaaagcuuaccauggagcugcugauccugaaggccaacgccaucaccaccauccugaccgccgugaccuucugcuucgccagcggccagaacaucaccgaggaguucuaccagagcaccugcagcgccgugagcaagggcuaccugggcgcccugagaaccggcugguacaccagcgugaucaccaucgagcugagcaacaucaaggagaucaagugcaacggcaccgacgccaaggugaagcugaucaagcaggagcuggacaaguacaagaacgccgugaccgaccugcagcugcugaugcagagcacccccgccaccggcagcggcagcgccaucugcagcggcguggccgugugcaaggugcugcaccuggagggcgaggugaacaagaucaagagcgcccugcugagcaccaacaaggccguggugagccugagcaacggcgugagcgugcugaccuucaaggugcuggaccugaagaacuacaucgacaagcagcugcugcccauccugaacaagcagagcugcagcauccccaacaucgagaccgugaucgaguuccagcagaagaacaacagacugcuggagaucaccagagaguucagcgugaacgccggcgugaccacccccgugagcaccuacaugcugaccaacagcgagcugcugagccugaucaacgacaugcccaucaccaacgaccagaagaagcugaugagcaacaacgugcagaucgugagacagcagagcuacagcaucaugugcaucaucaaggaggaggugcuggccuacguggugcagcugccccuguacggcgugaucgacacccccugcuggaagcugcacaccagcccccugugcaccaccaacaccaaggagggcagcaacaucugccugaccagaaccgacagaggcugguacugcgacaacgccggcagcgugagcuucuucccccaggccgagaccugcaaggugcagagcaacagaguguucugcgacaccaugaacagccugacccugcccagcgaggugaaccugugcaacguggacaucuucaaccccaaguacgacugcaagaucaugaccagcaagaccgacgugagcagcagcgugaucaccagccugggcgccaucgugagcugcuacggcaagaccaagugcaccgccagcaacaagaacagaggcaucaucaagaccuucagcaacggcugcgacuacgugagcaacaagggcguggacaccgugagcgugggcaacacccuguacugcgugaacaagcaggagggccagagccuguacgugaagggcgagcccaucaucaacuucuacgacccccugguguuccccagcgacgaguucgacgccagcaucagccaggugaacgagaagaucaaccagagccuggccuucaucagaaagagcgacgagcugcugcacaacgugaacgccggcaagagcaccaccaacaucaugaucaccaccaucaucaucgugaucaucgugauccugcugagccugaucgccgugggccugcugcuguacugcaaggccagaugaggacuaguguccaccugucccuccugggcugcuggauugucucguuuuccugccaaauaaacaggaucagcgcuuuacagaucuaaaaaaaaaaaaaaaaaaaaaaaaaaaaaaaaaaaaaaaaaaaaaaaaaaaaaaaaaaaaaaaaugcaucccccccccccccccccccccccccccccccaaaggcucuuuucagagccaccagaauu

SEQ ID NO: 3823 - RNA, 1931 nt, Artificial Sequence
  mRNA product Design i-1 comprising derived and/or modified sequence from HRSV(A2)__F-del_DSCav1_mut3 (opt5)
gggagagggcgcuuggcuugcaaggacccugagcugcggcauugaagcacacccaacccaacucgacugaagucagccucacugaaccggaucugagaaucuucucucucugggcuugccagggcucuccgaaccuagcuagcauccucuucaauuccaacuagaaagcuuaccauggagcugcucauccugaaggccaacgcuauuaccacaauccuuacggccgugaccuucugcuuugcgagcggccagaauauuacagaagaguucuaccaauccaccuguucugcugucagcaaaggguaucugggagcccucagaacaggcugguacaccuccguuaucacaauugaacugucuaacaucaaggagaucaaaugcaaugggaccgacgccaaggugaaacuuauuaagcaggaacuggauaaguauaaaaacgcugugacggaccuccagcugcugaugcagagcacccccgccacaggauccggcucugcuaucuguagcggggucgccgugugcaagguucuccaccuggagggagaggugaauaaaauuaaguccgcgcuucugagcaccaacaaagccgucgugucucucuccaauggcguuagcgugcugacauuuaagguccuugaucugaagaacuacaucgacaaacaacuccugccuauucugaauaagcagucuuguuccaucccgaacauugaaaccgugaucgaguuccagcagaaaaauaaccggcuccuggaaaucacgcgcgaguuuagcgugaaugcuggcgucacaacccccguuucuacauauaugcuuaccaacuccgagcugcucagccugauuaaugauaugccuaucaccaacgaccaaaagaaacuuauguccaacaaugugcagauugugagacagcagucuuacagcaucaugugcauuaucaaggaagagguccuggccuaugugguucaacucccccuguacggggugaucgauacaccuuguuggaaacugcauacgagcccccucugcaccacaaacaccaaggaaggauccaauauuugucugacacggaccgaccgcggcugguacugcgauaacgcugggucugucuccuucuuuccucaggccgagacguguaaggugcagagcaauagaguuuucugcgacacaaugaacucucuuacccugccgagcgaagugaaucucugcaacgucgauaucuuuaaucccaaauaugacuguaagauuaugaccuccaaaacagaugugucuagcuccgucaucaccagccugggagcgauugugucuugcuacggcaagacaaaauguacggccuccaacaagaaucgggggaucaucaagaccuucagcaacggaugcgacuauguuucuaauaaaggcguggacacagucuccgugggcaacacccuuuacuguguuaauaagcaagaggggcagagccuguaugugaaaggagagccuauuaucaacuuuuacgauccccucgucuucccuuccgacgaauuugaugcuucuauuagccaggugaacgagaagaucaaucagucccuggccuucauucgcaaaucugacgaacugcuccacaacgugaaugcuggcaagagcacaaccaacaucaugauuacgaccaucaucauuguuaucauugucauccugcuuucccugauugccguggggcuccugcuguauugcaaggccagaugaggacuaguguccaccugucccuccugggcugcuggauugucucguuuuccugccaaauaaacaggaucagcgcuuuacagaucuaaaaaaaaaaaaaaaaaaaaaaaaaaaaaaaaaaaaaaaaaaaaaaaaaaaaaaaaaaaaaaaaugcaucccccccccccccccccccccccccccccccaaaggcucuuuucagagccaccagaauu

SEQ ID NO: 3824 - RNA, 1931 nt, Artificial Sequence
  mRNA product Design i-1 comprising derived and/or modified sequence from HRSV(A2)__F-del_DSCav1_mut3 (opt6)
gggagagggcgcuuggcuugcaaggacccugagcugcggcauugaagcacacccaacccaacucgacugaagucagccucacugaaccggaucugagaaucuucucucucugggcuugccagggcucuccgaaccuagcuagcauccucuucaauuccaacuagaaagcuuaccauggaauuacuaauccugaaagcaaacgcaauuacuacaauacuaacagcaguaaccuuuugcuuugccucaggacaaaacauaacugaagaauuuuaccaaucaacuugcucagcagucucaaaaggcuaucuaggagcacuacgaacagguugguauacuucagucauaacaauagaauuaucaaacauaaaagaaauuaaauguaacggaacugacgcaaaaguaaaacucaucaaacaagaacucgauaaauacaaaaacgcuguaaccgacuuacaacuacuaaugcaaucaacuccagcaacaggcuccggauccgcaauaugcagugguguagcaguaugcaaaguccuacaccuagaaggagaaguaaauaagauaaaaucugcucuacuaucaacaaauaaagcaguugucucccuaucaaauggagucucaguacucaccuucaaaguauuagaccucaaaaacuacauagacaaacaacuauuaccaauacucaacaaacaauccugcuccaucccuaacauagaaaccguaaucgaauuucaacaaaaaaauaacagacucuuagaaauaacuagagaauuuucaguuaaugcaggcgugacaacaccaguaucaacauauaugcuaacaaacuccgaacuccuaucccuaauaaacgacaugccaaucacaaacgaccaaaaaaaacuaauguccaacaacguacaaaucguaagacaacaaucauacucuauaaugugcauaauaaaagaagaaguacuggccuacguaguacaauuaccacucuacggaguaauagacaccccaugcuggaaacuccauacaucaccccuaugcacaacaaacacaaaagaaggauccaacauaugucucacuagaacagacagaggcugguacugcgacaacgcuggauccgucucauucuucccccaagcagaaacauguaaaguacaaucuaauagaguauuuugugacacaaugaacagccucacacuaccauccgaagucaaccuauguaacguagauauauuuaaucccaaauacgacugcaaaauaaugacauccaaaacagauguaucaucauccguuaucaccucacuaggagccauaguuucaugcuacggaaaaacaaaaugcacugcaucuaacaaaaauagagguauaauaaaaacauuuuccaacggcugcgacuacgucucaaacaaaggcguagacaccguaucaguaggaaauacauuauauugcguaaauaaacaagaaggccaaucccuauacguaaaaggagaacccaucauaaacuucuaugacccacuuguuuuccccucagacgaauuugacgccucaauaucacaaguaaaugaaaaaauaaaccaaucucuugccuucauuagaaaaucagacgaauuacuacacaacgucaacgcaggaaaaucaacaacaaacaucaugauaacaacgauaauaauagucauaauaguaauacuacuaucauuaaucgcagucggacuccuauuauauugcaaagcuagauaaggacuaguguccaccugucccuccugggcugcuggauugucucguuuuccugccaaauaaacaggaucagcgcuuuacagaucuaaaaaaaaaaaaaaaaaaaaaaaaaaaaaaaaaaaaaaaaaaaaaaaaaaaaaaaaaaaaaaaaugcaucccccccccccccccccccccccccccccccaaaggcucuuuucagagccaccagaauu

SEQ ID NO: 3825 - RNA, 1931 nt, Artificial Sequence
  mRNA product Design i-1 comprising derived and/or modified sequence from HRSV(A2)__F-del_DSCav1_mut3 (opt11)
gggagagggcgcuuggcuugcaaggacccugagcugcggcauugaagcacacccaacccaacucgacugaagucagccucacugaaccggaucugagaaucuucucucucugggcuugccagggcucuccgaaccuagcuagcauccucuucaauuccaacuagaaagcuuaccauggaacuacucauacuaaaagccaacgccauaaccaccauccucaccgcaguaacuuucugcuucgcuuccggccaaaacaucaccgaagaauuuuaccaaaguaccugcagcgcagucucaaaaggauaccuaggcgcccuacgcacaggcugguacaccuccgucauuaccaucgaacucuccaacaucaaagaaauuaaaugcaacgguacagacgcaaaagucaaacucaucaaacaagaacucgacaaauacaaaaacgcagucaccgaccuccaacuccucaugcaauccacccccgccacaggcucuggcuccgccaucugcucaggcguagcagucugcaaaguccugcaccucgaaggcgaagucaacaaaaucaagucagcccuccucuccaccaacaaggccgucguaucccucucaaacggaguuagcguccucaccuucaaaguccuagaccucaaaaacuacaucgauaaacaacuacuccccauccuaaacaaacaaucaugcuccaucccaaacaucgaaaccguaaucgaguuccaacaaaagaacaaccgccuccucgaaaucacacgugaguucuccguuaacgccggcgucaccacccccgucucuacauacaugcucaccaacuccgaacuccuuucccucaucaacgacaugccaaucaccaacgaccaaaagaaacucaugucaaacaacguacaaaucguccgacaacaaagcuacuccaucaugugcaucaucaaagaagaaguccuugcauacgucguucaacuaccccucuacggcguaaucgacacucccugcuggaaacuccacaccuccccgcucugcacaaccaacaccaaagaaggcagcaacaucugccucacccgaaccgaccgcggcugguacugcgauaacgccggauccgucuccuucuucccacaagcagaaacuugcaaaguccaauccaaccgcgucuucugcgacaccaugaacucccucacacuccccuccgaagucaaccugugcaacgucgacaucuucaacccaaaauacgacugcaaaaucaugaccucaaaaaccgacgucucaucuucugucaucaccucucucggcgcuaucgucuccugcuauggcaaaaccaaaugcaccgccuccaacaagaaccgcggcauuaucaagaccuucuccaacggcugcgacuacgucuccaauaagggcgucgacaccgucucugucggcaacacccuuuacugcguaaacaaacaagaaggucaaucucucuacgucaaaggagaacccaucaucaacuucuacgacccccuggucuuccccuccgacgaguucgaugcaucaaucucccaagucaacgaaaagaucaaccaaucucucgcuuucauccgcaaauccgacgaacuccuacacaacguaaacgccggcaaauccaccacaaacaucaugaucaccaccauuaucauagucaucaucgucauccuccucuccuuaaucgccguuggccuccuucucuacugcaaagcccgauaaggacuaguguccaccugucccuccugggcugcuggauugucucguuuuccugccaaauaaacaggaucagcgcuuuacagaucuaaaaaaaaaaaaaaaaaaaaaaaaaaaaaaaaaaaaaaaaaaaaaaaaaaaaaaaaaaaaaaaaugcaucccccccccccccccccccccccccccccccaaaggcucuuuucagagccaccagaauu

SEQ ID NO: 3826 - RNA, 1931 nt, Artificial Sequence
  mRNA product Design i-2 comprising derived and/or modified sequence from HRSV(A2)__F-del_DSCav1_mut3 (opt1)
gggagaggcgcugccuacggagguggcagccaucuccuucucggcaucaagcuuaccauggagcugcucauccugaaggccaacgccaucaccaccauccugacggcggugaccuucugcuucgccagcggccagaacaucaccgaggaguucuaccaguccacgugcagcgccgucuccaagggguaccucggcgcccugcggaccggcugguacaccuccgugaucaccaucgagcugagcaacaucaaggagaucaagugcaacgggaccgacgccaaggugaagcucaucaagcaggagcuggacaaguacaagaacgcggucacggaccugcagcuccugaugcaguccaccccggcaaccggcuccggcuccgccaucugcagcggcgucgccgugugcaaggugcugcaccucgagggggaggucaacaagaucaagagcgcccugcuguccaccaacaaggccguggugagccucuccaacggcgucagcgugcugaccuucaaggugcuggaccucaagaacuacaucgacaagcagcugcugcccauccugaacaagcagagcugcuccauccccaacaucgagacggugaucgaguuccagcagaagaacaaccggcuccuggagaucacccgcgaguucagcgugaacgccggggucaccacccccguguccacguacaugcugaccaacagcgagcuccugucccugaucaacgacaugccgaucaccaacgaccagaagaagcucaugagcaacaacgugcagaucguccggcagcaguccuacagcaucaugugcaucaucaaggaggaggugcuggcguacgugguccagcugccccucuacggcgugaucgacacccccugcuggaagcugcacacgagcccccugugcaccaccaacaccaaggagggguccaacaucugccucacgcgcaccgaccggggcugguacugcgacaacgccggcagcgucuccuucuucccgcaggccgagaccugcaaggugcagagcaaccgcguguucugcgacaccaugaacucccugacgcugcccagcgagguaaaccucugcaacgucgacaucuucaaccccaaguacgacugcaagaucaugaccuccaagaccgacgugagcuccagcgugaucaccucccugggggccaucgucagcugcuacggcaagacgaagugcaccgccagcaacaagaaccgggggaucaucaagaccuucuccaacggcugcgacuacgugagcaacaagggcguggacaccguguccgucgggaacacccuguacugcgugaacaagcaggagggccagagccucuacgugaagggggagcccaucaucaacuucuacgacccgcuggucuuccccuccgacgaguucgacgcgagcaucucccaggugaacgagaagaucaaccagagccuggccuucauccgcaaguccgacgagcugcuccacaacgugaacgccggcaagagcacgaccaacaucaugaucaccaccaucaucaucgucaucaucgugauccugcugucccucaucgccguggggcugcugcucuacugcaaggcccggugaggacuagugcaucacauuuaaaagcaucucagccuaccaugagaauaagagaaagaaaaugaagaucaauagcuuauucaucucuuuuucuuuuucguugguguaaagccaacacccugucuaaaaaacauaaauuucuuuaaucauuuugccucuuuucucugugcuucaauuaauaaaaaauggaaagaaccuagaucuaaaaaaaaaaaaaaaaaaaaaaaaaaaaaaaaaaaaaaaaaaaaaaaaaaaaaaaaaaaaaaaaugcaucccccccccccccccccccccccccccccccaaaggcucuuuucagagccaccagaauu

SEQ ID NO: 3827 - RNA, 1931 nt, Artificial Sequence
  mRNA product Design i-2 comprising derived and/or modified sequence from HRSV(A2)__F-del_DSCav1_mut3 (opt1)
gggagaggcgcugccuacggagguggcagccaucuccuucucggcaucaagcuuaccauggagcugcucauccugaaggccaacgccaucaccaccauccugacggcggugaccuucugcuucgccagcggccagaacaucaccgaggaguucuaccaguccacgugcagcgccgucuccaagggguaccucggcgcccugcgcaccgggugguacaccagcgugaucaccaucgagcuguccaacaucaaggagaucaagugcaacggcaccgacgccaaggugaagcucaucaagcaggagcuggacaaguacaagaacgcggucacggaccugcagcuccugaugcagagcacccccgccaccggguccggcagcgccaucugcuccggcguggccgugugcaagguccugcaccucgagggggaggugaacaagaucaagagcgcgcugcuguccaccaacaaggccguggucagccucuccaacggcgugagcgugcugacguucaagguccuggaccucaagaacuacaucgacaagcagcugcugccgauccucaacaagcaguccugcagcauccccaacaucgagaccgugaucgaguuccagcagaagaacaaccggcugcuggagaucacccgcgaguucuccgugaacgccggggucaccacgcccgugagcaccuacaugcucaccaacuccgagcugcugagccucaucaacgacaugcccaucaccaacgaccagaagaagcugaugagcaacaacgugcagaucguccggcagcaguccuacagcaucaugugcaucaucaaggaggaggugcuggccuacgugguccagcucccgcuguacggcgugaucgacacgcccugcuggaagcugcacaccagcccccucugcaccaccaacacgaaggagggguccaacaucugccugacccgcaccgaccggggcugguacugcgacaacgccggcuccgugagcuucuucccccaggcggagaccugcaagguccaguccaaccgcguguucugcgacacgaugaacagccugacccucccguccgaggucaaccugugcaacguggacaucuucaaccccaaguacgacugcaagaucaugaccagcaagaccgacguguccagcuccgucaucacgagccugggggccaucguguccugcuacggcaagaccaagugcaccgccagcaacaagaaccgggggaucaucaagaccuucuccaacggcugcgacuacgugagcaacaagggcgucgacacgguguccguggggaacacccucuacugcgucaacaagcaggagggccagagccuguacgugaagggggagcccaucaucaacuucuacgacccccugguguucccgagcgacgaguucgacgccuccaucagccaggucaacgagaagaucaaccagucccucgccuucauccgcaagagcgacgagcugcugcacaacgugaacgcgggcaaguccaccaccaacaucaugaucaccacgaucaucaucgugaucaucgucauccuccugagccugaucgccguggggcuccugcuguacugcaaggcccggugaggacuagugcaucacauuuaaaagcaucucagccuaccaugagaauaagagaaagaaaaugaagaucaauagcuuauucaucucuuuuucuuuuucguugguguaaagccaacacccugucuaaaaaacauaaauuucuuuaaucauuuugccucuuuucucugugcuucaauuaauaaaaaauggaaagaaccuagaucuaaaaaaaaaaaaaaaaaaaaaaaaaaaaaaaaaaaaaaaaaaaaaaaaaaaaaaaaaaaaaaaaugcaucccccccccccccccccccccccccccccccaaaggcucuuuucagagccaccagaauu

SEQ ID NO: 3828 - RNA, 1931 nt, Artificial Sequence
  mRNA product Design i-2 comprising derived and/or modified sequence from HRSV(A2)__F-del_DSCav1_mut3 (opt2)
gggagaggcgcugccuacggagguggcagccaucuccuucucggcaucaagcuuaccauggagcuccucauccucaaggccaacgccaucaccaccauccucaccgccgucaccuucugcuucgccuccggccagaacaucaccgaggaguucuaccaguccaccugcuccgccgucuccaagggcuaccucggcgcccuccgcaccggcugguacaccuccgucaucaccaucgagcucuccaacaucaaggagaucaagugcaacggcaccgacgccaaggucaagcucaucaagcaggagcucgacaaguacaagaacgccgucaccgaccuccagcuccucaugcaguccacccccgccaccggcuccggcuccgccaucugcuccggcgucgccgucugcaagguccuccaccucgagggcgaggucaacaagaucaaguccgcccuccucuccaccaacaaggccgucgucucccucuccaacggcgucuccguccucaccuucaagguccucgaccucaagaacuacaucgacaagcagcuccuccccauccucaacaagcaguccugcuccauccccaacaucgagaccgucaucgaguuccagcagaagaacaaccgccuccucgagaucacccgcgaguucuccgucaacgccggcgucaccacccccgucuccaccuacaugcucaccaacuccgagcuccucucccucaucaacgacaugcccaucaccaacgaccagaagaagcucauguccaacaacguccagaucguccgccagcaguccuacuccaucaugugcaucaucaaggaggagguccucgccuacgucguccagcucccccucuacggcgucaucgacacccccugcuggaagcuccacaccuccccccucugcaccaccaacaccaaggagggcuccaacaucugccucacccgcaccgaccgcggcugguacugcgacaacgccggcuccgucuccuucuucccccaggccgagaccugcaagguccaguccaaccgcgucuucugcgacaccaugaacucccucacccuccccuccgaggucaaccucugcaacgucgacaucuucaaccccaaguacgacugcaagaucaugaccuccaagaccgacgucuccuccuccgucaucaccucccucggcgccaucgucuccugcuacggcaagaccaagugcaccgccuccaacaagaaccgcggcaucaucaagaccuucuccaacggcugcgacuacgucuccaacaagggcgucgacaccgucuccgucggcaacacccucuacugcgucaacaagcaggagggccagucccucuacgucaagggcgagcccaucaucaacuucuacgacccccucgucuuccccuccgacgaguucgacgccuccaucucccaggucaacgagaagaucaaccagucccucgccuucauccgcaaguccgacgagcuccuccacaacgucaacgccggcaaguccaccaccaacaucaugaucaccaccaucaucaucgucaucaucgucauccuccucucccucaucgccgucggccuccuccucuacugcaaggcccgcugaggacuagugcaucacauuuaaaagcaucucagccuaccaugagaauaagagaaagaaaaugaagaucaauagcuuauucaucucuuuuucuuuuucguugguguaaagccaacacccugucuaaaaaacauaaauuucuuuaaucauuuugccucuuuucucugugcuucaauuaauaaaaaauggaaagaaccuagaucuaaaaaaaaaaaaaaaaaaaaaaaaaaaaaaaaaaaaaaaaaaaaaaaaaaaaaaaaaaaaaaaaugcaucccccccccccccccccccccccccccccccaaaggcucuuuucagagccaccagaauu

SEQ ID NO: 3829 - RNA, 1931 nt, Artificial Sequence
  mRNA product Design i-2 comprising derived and/or modified sequence from HRSV(A2)__F-del_DSCav1_mut3 (opt3)
gggagaggcgcugccuacggagguggcagccaucuccuucucggcaucaagcuuaccauggagcugcucauccuuaaggccaacgcuauuaccacaauacugacugcagugacguucugcuuugccagcggccagaauaucaccgaagaguucuaccaauccacauguucugcggucucaaaaggguauuugggagcuuuaagaacugguugguacaccaguguuauuacaaucgaacugagcaacauuaaggagaucaaaugcaauggcaccgacgccaaggugaaacuaauaaagcaggaacucgauaaguauaaaaacgcaguaacugaccugcagcuucugaugcaguccacacccgccaccgggucuggaucggcuaucuguucaggcguggcagucugcaagguguugcaccucgagggugagguuaauaaaauuaagagcgcccugcugaguacgaacaaagcuguggucucccucucuaauggggugagcguauuaacuuuuaagguucuggaucuuaagaacuacaucgacaaacaauugcugccuauucuaaauaagcaguccuguucaaucccaaacauagaaaccgugauugaguuccagcagaaaaauaacaggcuccuggaaaucacacgggaguuuagugucaaugccggagugacuaccccggugagcacauauaugcuuaccaacucugagcuguugucccucauuaaugauaugcccaucacgaacgaccaaaagaaacugaugucaaacaauguccagaucguucgccagcagagcuacaguauuaugugcauaaucaaggaagagguguuagcguauguagugcaacugccucucuacggcgucauugauacuccauguuggaaacuucauacaucuccccugugcaccacuaacacaaaggaaggcuccaauaucuguuugacccgaacggaccgugggugguacugcgauaacgcaggaagcgugucguucuuuccucaggccgagaccuguaagguucagucuaauagaguguucugcgacacaaugaacucccuaacucugccaucagaagucaaucucugcaacguggauauauuuaaucccaaauaugacuguaagauuaugaccaguaaaacagauguaagcuccucuguuaucacuagccugggugcuaucgugucaugcuacggcaagaccaaauguacagccaguaacaagaauagggggauuaucaagaccuucuccaacggaugcgacuaugucagcaauaaaggcguggacacugucucuguggguaacacgcuuuacuguguuaauaagcaagaggggcagucacuguaugugaaaggagagccuauuauaaacuuuuacgauccauugguauucccgagugacgaauuugaugcaagcaucucccaggucaacgagaagauuaaucagucucucgcuuucauccggaaaucggacgaacuguuacacaacgugaaugccggcaagagcacaaccaacaucaugauuacuaccauaaucauuguuaucauugugauccugcuaucccucauagcggucggccugcuuuuguauugcaaggcccgcugaggacuagugcaucacauuuaaaagcaucucagccuaccaugagaauaagagaaagaaaaugaagaucaauagcuuauucaucucuuuuucuuuuucguugguguaaagccaacacccugucuaaaaaacauaaauuucuuuaaucauuuugccucuuuucucugugcuucaauuaauaaaaaauggaaagaaccuagaucuaaaaaaaaaaaaaaaaaaaaaaaaaaaaaaaaaaaaaaaaaaaaaaaaaaaaaaaaaaaaaaaaugcaucccccccccccccccccccccccccccccccaaaggcucuuuucagagccaccagaauu

SEQ ID NO: 3830 - RNA, 1931 nt, Artificial Sequence
  mRNA product Design i-2 comprising derived and/or modified sequence from HRSV(A2)__F-del_DSCav1_mut3 (opt4)
gggagaggcgcugccuacggagguggcagccaucuccuucucggcaucaagcuuaccauggagcugcugauccugaaggccaacgccaucaccaccauccugaccgccgugaccuucugcuucgccagcggccagaacaucaccgaggaguucuaccagagcaccugcagcgccgugagcaagggcuaccugggcgcccugagaaccggcugguacaccagcgugaucaccaucgagcugagcaacaucaaggagaucaagugcaacggcaccgacgccaaggugaagcugaucaagcaggagcuggacaaguacaagaacgccgugaccgaccugcagcugcugaugcagagcacccccgccaccggcagcggcagcgccaucugcagcggcguggccgugugcaaggugcugcaccuggagggcgaggugaacaagaucaagagcgcccugcugagcaccaacaaggccguggugagccugagcaacggcgugagcgugcugaccuucaaggugcuggaccugaagaacuacaucgacaagcagcugcugcccauccugaacaagcagagcugcagcauccccaacaucgagaccgugaucgaguuccagcagaagaacaacagacugcuggagaucaccagagaguucagcgugaacgccggcgugaccacccccgugagcaccuacaugcugaccaacagcgagcugcugagccugaucaacgacaugcccaucaccaacgaccagaagaagcugaugagcaacaacgugcagaucgugagacagcagagcuacagcaucaugugcaucaucaaggaggaggugcuggccuacguggugcagcugccccuguacggcgugaucgacacccccugcuggaagcugcacaccagcccccugugcaccaccaacaccaaggagggcagcaacaucugccugaccagaaccgacagaggcugguacugcgacaacgccggcagcgugagcuucuucccccaggccgagaccugcaaggugcagagcaacagaguguucugcgacaccaugaacagccugacccugcccagcgaggugaaccugugcaacguggacaucuucaaccccaaguacgacugcaagaucaugaccagcaagaccgacgugagcagcagcgugaucaccagccugggcgccaucgugagcugcuacggcaagaccaagugcaccgccagcaacaagaacagaggcaucaucaagaccuucagcaacggcugcgacuacgugagcaacaagggcguggacaccgugagcgugggcaacacccuguacugcgugaacaagcaggagggccagagccuguacgugaagggcgagcccaucaucaacuucuacgacccccugguguuccccagcgacgaguucgacgccagcaucagccaggugaacgagaagaucaaccagagccuggccuucaucagaaagagcgacgagcugcugcacaacgugaacgccggcaagagcaccaccaacaucaugaucaccaccaucaucaucgugaucaucgugauccugcugagccugaucgccgugggccugcugcuguacugcaaggccagaugaggacuagugcaucacauuuaaaagcaucucagccuaccaugagaauaagagaaagaaaaugaagaucaauagcuuauucaucucuuuuucuuuuucguugguguaaagccaacacccugucuaaaaaacauaaauuucuuuaaucauuuugccucuuuucucugugcuucaauuaauaaaaaauggaaagaaccuagaucuaaaaaaaaaaaaaaaaaaaaaaaaaaaaaaaaaaaaaaaaaaaaaaaaaaaaaaaaaaaaaaaaugcaucccccccccccccccccccccccccccccccaaaggcucuuuucagagccaccagaauu

SEQ ID NO: 3831 - RNA, 1931 nt, Artificial Sequence
  mRNA product Design i-2 comprising derived and/or modified sequence from HRSV(A2)__F-del_DSCav1_mut3 (opt5)
gggagaggcgcugccuacggagguggcagccaucuccuucucggcaucaagcuuaccauggagcugcucauccugaaggccaacgcuauuaccacaauccuuacggccgugaccuucugcuuugcgagcggccagaauauuacagaagaguucuaccaauccaccuguucugcugucagcaaaggguaucugggagcccucagaacaggcugguacaccuccguuaucacaauugaacugucuaacaucaaggagaucaaaugcaaugggaccgacgccaaggugaaacuuauuaagcaggaacuggauaaguauaaaaacgcugugacggaccuccagcugcugaugcagagcacccccgccacaggauccggcucugcuaucuguagcggggucgccgugugcaagguucuccaccuggagggagaggugaauaaaauuaaguccgcgcuucugagcaccaacaaagccgucgugucucucuccaauggcguuagcgugcugacauuuaagguccuugaucugaagaacuacaucgacaaacaacuccugccuauucugaauaagcagucuuguuccaucccgaacauugaaaccgugaucgaguuccagcagaaaaauaaccggcuccuggaaaucacgcgcgaguuuagcgugaaugcuggcgucacaacccccguuucuacauauaugcuuaccaacuccgagcugcucagccugauuaaugauaugccuaucaccaacgaccaaaagaaacuuauguccaacaaugugcagauugugagacagcagucuuacagcaucaugugcauuaucaaggaagagguccuggccuaugugguucaacucccccuguacggggugaucgauacaccuuguuggaaacugcauacgagcccccucugcaccacaaacaccaaggaaggauccaauauuugucugacacggaccgaccgcggcugguacugcgauaacgcugggucugucuccuucuuuccucaggccgagacguguaaggugcagagcaauagaguuuucugcgacacaaugaacucucuuacccugccgagcgaagugaaucucugcaacgucgauaucuuuaaucccaaauaugacuguaagauuaugaccuccaaaacagaugugucuagcuccgucaucaccagccugggagcgauugugucuugcuacggcaagacaaaauguacggccuccaacaagaaucgggggaucaucaagaccuucagcaacggaugcgacuauguuucuaauaaaggcguggacacagucuccgugggcaacacccuuuacuguguuaauaagcaagaggggcagagccuguaugugaaaggagagccuauuaucaacuuuuacgauccccucgucuucccuuccgacgaauuugaugcuucuauuagccaggugaacgagaagaucaaucagucccuggccuucauucgcaaaucugacgaacugcuccacaacgugaaugcuggcaagagcacaaccaacaucaugauuacgaccaucaucauuguuaucauugucauccugcuuucccugauugccguggggcuccugcuguauugcaaggccagaugaggacuagugcaucacauuuaaaagcaucucagccuaccaugagaauaagagaaagaaaaugaagaucaauagcuuauucaucucuuuuucuuuuucguugguguaaagccaacacccugucuaaaaaacauaaauuucuuuaaucauuuugccucuuuucucugugcuucaauuaauaaaaaauggaaagaaccuagaucuaaaaaaaaaaaaaaaaaaaaaaaaaaaaaaaaaaaaaaaaaaaaaaaaaaaaaaaaaaaaaaaaugcaucccccccccccccccccccccccccccccccaaaggcucuuuucagagccaccagaauu

SEQ ID NO: 3832 - RNA, 1931 nt, Artificial Sequence
  mRNA product Design i-2 comprising derived and/or modified sequence from HRSV(A2)__F-del_DSCav1_mut3 (opt6)
gggagaggcgcugccuacggagguggcagccaucuccuucucggcaucaagcuuaccauggaauuacuaauccugaaagcaaacgcaauuacuacaauacuaacagcaguaaccuuuugcuuugccucaggacaaaacauaacugaagaauuuuaccaaucaacuugcucagcagucucaaaaggcuaucuaggagcacuacgaacagguugguauacuucagucauaacaauagaauuaucaaacauaaaagaaauuaaauguaacggaacugacgcaaaaguaaaacucaucaaacaagaacucgauaaauacaaaaacgcuguaaccgacuuacaacuacuaaugcaaucaacuccagcaacaggcuccggauccgcaauaugcagugguguagcaguaugcaaaguccuacaccuagaaggagaaguaaauaagauaaaaucugcucuacuaucaacaaauaaagcaguugucucccuaucaaauggagucucaguacucaccuucaaaguauuagaccucaaaaacuacauagacaaacaacuauuaccaauacucaacaaacaauccugcuccaucccuaacauagaaaccguaaucgaauuucaacaaaaaaauaacagacucuuagaaauaacuagagaauuuucaguuaaugcaggcgugacaacaccaguaucaacauauaugcuaacaaacuccgaacuccuaucccuaauaaacgacaugccaaucacaaacgaccaaaaaaaacuaauguccaacaacguacaaaucguaagacaacaaucauacucuauaaugugcauaauaaaagaagaaguacuggccuacguaguacaauuaccacucuacggaguaauagacaccccaugcuggaaacuccauacaucaccccuaugcacaacaaacacaaaagaaggauccaacauaugucucacuagaacagacagaggcugguacugcgacaacgcuggauccgucucauucuucccccaagcagaaacauguaaaguacaaucuaauagaguauuuugugacacaaugaacagccucacacuaccauccgaagucaaccuauguaacguagauauauuuaaucccaaauacgacugcaaaauaaugacauccaaaacagauguaucaucauccguuaucaccucacuaggagccauaguuucaugcuacggaaaaacaaaaugcacugcaucuaacaaaaauagagguauaauaaaaacauuuuccaacggcugcgacuacgucucaaacaaaggcguagacaccguaucaguaggaaauacauuauauugcguaaauaaacaagaaggccaaucccuauacguaaaaggagaacccaucauaaacuucuaugacccacuuguuuuccccucagacgaauuugacgccucaauaucacaaguaaaugaaaaaauaaaccaaucucuugccuucauuagaaaaucagacgaauuacuacacaacgucaacgcaggaaaaucaacaacaaacaucaugauaacaacgauaauaauagucauaauaguaauacuacuaucauuaaucgcagucggacuccuauuauauugcaaagcuagauaaggacuagugcaucacauuuaaaagcaucucagccuaccaugagaauaagagaaagaaaaugaagaucaauagcuuauucaucucuuuuucuuuuucguugguguaaagccaacacccugucuaaaaaacauaaauuucuuuaaucauuuugccucuuuucucugugcuucaauuaauaaaaaauggaaagaaccuagaucuaaaaaaaaaaaaaaaaaaaaaaaaaaaaaaaaaaaaaaaaaaaaaaaaaaaaaaaaaaaaaaaaugcaucccccccccccccccccccccccccccccccaaaggcucuuuucagagccaccagaauu

SEQ ID NO: 3833 - RNA, 1931 nt, Artificial Sequence
  mRNA product Design i-2 comprising derived and/or modified sequence from HRSV(A2)__F-del_DSCav1_mut3 (opt11)
gggagaggcgcugccuacggagguggcagccaucuccuucucggcaucaagcuuaccauggaacuacucauacuaaaagccaacgccauaaccaccauccucaccgcaguaacuuucugcuucgcuuccggccaaaacaucaccgaagaauuuuaccaaaguaccugcagcgcagucucaaaaggauaccuaggcgcccuacgcacaggcugguacaccuccgucauuaccaucgaacucuccaacaucaaagaaauuaaaugcaacgguacagacgcaaaagucaaacucaucaaacaagaacucgacaaauacaaaaacgcagucaccgaccuccaacuccucaugcaauccacccccgccacaggcucuggcuccgccaucugcucaggcguagcagucugcaaaguccugcaccucgaaggcgaagucaacaaaaucaagucagcccuccucuccaccaacaaggccgucguaucccucucaaacggaguuagcguccucaccuucaaaguccuagaccucaaaaacuacaucgauaaacaacuacuccccauccuaaacaaacaaucaugcuccaucccaaacaucgaaaccguaaucgaguuccaacaaaagaacaaccgccuccucgaaaucacacgugaguucuccguuaacgccggcgucaccacccccgucucuacauacaugcucaccaacuccgaacuccuuucccucaucaacgacaugccaaucaccaacgaccaaaagaaacucaugucaaacaacguacaaaucguccgacaacaaagcuacuccaucaugugcaucaucaaagaagaaguccuugcauacgucguucaacuaccccucuacggcguaaucgacacucccugcuggaaacuccacaccuccccgcucugcacaaccaacaccaaagaaggcagcaacaucugccucacccgaaccgaccgcggcugguacugcgauaacgccggauccgucuccuucuucccacaagcagaaacuugcaaaguccaauccaaccgcgucuucugcgacaccaugaacucccucacacuccccuccgaagucaaccugugcaacgucgacaucuucaacccaaaauacgacugcaaaaucaugaccucaaaaaccgacgucucaucuucugucaucaccucucucggcgcuaucgucuccugcuauggcaaaaccaaaugcaccgccuccaacaagaaccgcggcauuaucaagaccuucuccaacggcugcgacuacgucuccaauaagggcgucgacaccgucucugucggcaacacccuuuacugcguaaacaaacaagaaggucaaucucucuacgucaaaggagaacccaucaucaacuucuacgacccccuggucuuccccuccgacgaguucgaugcaucaaucucccaagucaacgaaaagaucaaccaaucucucgcuuucauccgcaaauccgacgaacuccuacacaacguaaacgccggcaaauccaccacaaacaucaugaucaccaccauuaucauagucaucaucgucauccuccucuccuuaaucgccguuggccuccuucucuacugcaaagcccgauaaggacuagugcaucacauuuaaaagcaucucagccuaccaugagaauaagagaaagaaaaugaagaucaauagcuuauucaucucuuuuucuuuuucguugguguaaagccaacacccugucuaaaaaacauaaauuucuuuaaucauuuugccucuuuucucugugcuucaauuaauaaaaaauggaaagaaccuagaucuaaaaaaaaaaaaaaaaaaaaaaaaaaaaaaaaaaaaaaaaaaaaaaaaaaaaaaaaaaaaaaaaugcaucccccccccccccccccccccccccccccccaaaggcucuuuucagagccaccagaauu

SEQ ID NO: 3834 - RNA, 1927 nt, Artificial Sequence
  mRNA product Design i-2 comprising derived and/or modified sequence from HRSV(A2)__F-del_DSCav1_mut3 (opt1)
ggggcgcugccuacggagguggcagccaucuccuucucggcaucaagcuuaccauggagcugcucauccugaaggccaacgccaucaccaccauccugacggcggugaccuucugcuucgccagcggccagaacaucaccgaggaguucuaccaguccacgugcagcgccgucuccaagggguaccucggcgcccugcggaccggcugguacaccuccgugaucaccaucgagcugagcaacaucaaggagaucaagugcaacgggaccgacgccaaggugaagcucaucaagcaggagcuggacaaguacaagaacgcggucacggaccugcagcuccugaugcaguccaccccggcaaccggcuccggcuccgccaucugcagcggcgucgccgugugcaaggugcugcaccucgagggggaggucaacaagaucaagagcgcccugcuguccaccaacaaggccguggugagccucuccaacggcgucagcgugcugaccuucaaggugcuggaccucaagaacuacaucgacaagcagcugcugcccauccugaacaagcagagcugcuccauccccaacaucgagacggugaucgaguuccagcagaagaacaaccggcuccuggagaucacccgcgaguucagcgugaacgccggggucaccacccccguguccacguacaugcugaccaacagcgagcuccugucccugaucaacgacaugccgaucaccaacgaccagaagaagcucaugagcaacaacgugcagaucguccggcagcaguccuacagcaucaugugcaucaucaaggaggaggugcuggcguacgugguccagcugccccucuacggcgugaucgacacccccugcuggaagcugcacacgagcccccugugcaccaccaacaccaaggagggguccaacaucugccucacgcgcaccgaccggggcugguacugcgacaacgccggcagcgucuccuucuucccgcaggccgagaccugcaaggugcagagcaaccgcguguucugcgacaccaugaacucccugacgcugcccagcgagguaaaccucugcaacgucgacaucuucaaccccaaguacgacugcaagaucaugaccuccaagaccgacgugagcuccagcgugaucaccucccugggggccaucgucagcugcuacggcaagacgaagugcaccgccagcaacaagaaccgggggaucaucaagaccuucuccaacggcugcgacuacgugagcaacaagggcguggacaccguguccgucgggaacacccuguacugcgugaacaagcaggagggccagagccucuacgugaagggggagcccaucaucaacuucuacgacccgcuggucuuccccuccgacgaguucgacgcgagcaucucccaggugaacgagaagaucaaccagagccuggccuucauccgcaaguccgacgagcugcuccacaacgugaacgccggcaagagcacgaccaacaucaugaucaccaccaucaucaucgucaucaucgugauccugcugucccucaucgccguggggcugcugcucuacugcaaggcccggugaggacuagugcaucacauuuaaaagcaucucagccuaccaugagaauaagagaaagaaaaugaagaucaauagcuuauucaucucuuuuucuuuuucguugguguaaagccaacacccugucuaaaaaacauaaauuucuuuaaucauuuugccucuuuucucugugcuucaauuaauaaaaaauggaaagaaccuagaucuaaaaaaaaaaaaaaaaaaaaaaaaaaaaaaaaaaaaaaaaaaaaaaaaaaaaaaaaaaaaaaaaugcaucccccccccccccccccccccccccccccccaaaggcucuuuucagagccaccagaauu

SEQ ID NO: 3835 - RNA, 1927 nt, Artificial Sequence
  mRNA product Design i-2 comprising derived and/or modified sequence from HRSV(A2)__F-del_DSCav1_mut3 (opt1)
ggggcgcugccuacggagguggcagccaucuccuucucggcaucaagcuuaccauggagcugcucauccugaaggccaacgccaucaccaccauccugacggcggugaccuucugcuucgccagcggccagaacaucaccgaggaguucuaccaguccacgugcagcgccgucuccaagggguaccucggcgcccugcgcaccgggugguacaccagcgugaucaccaucgagcuguccaacaucaaggagaucaagugcaacggcaccgacgccaaggugaagcucaucaagcaggagcuggacaaguacaagaacgcggucacggaccugcagcuccugaugcagagcacccccgccaccggguccggcagcgccaucugcuccggcguggccgugugcaagguccugcaccucgagggggaggugaacaagaucaagagcgcgcugcuguccaccaacaaggccguggucagccucuccaacggcgugagcgugcugacguucaagguccuggaccucaagaacuacaucgacaagcagcugcugccgauccucaacaagcaguccugcagcauccccaacaucgagaccgugaucgaguuccagcagaagaacaaccggcugcuggagaucacccgcgaguucuccgugaacgccggggucaccacgcccgugagcaccuacaugcucaccaacuccgagcugcugagccucaucaacgacaugcccaucaccaacgaccagaagaagcugaugagcaacaacgugcagaucguccggcagcaguccuacagcaucaugugcaucaucaaggaggaggugcuggccuacgugguccagcucccgcuguacggcgugaucgacacgcccugcuggaagcugcacaccagcccccucugcaccaccaacacgaaggagggguccaacaucugccugacccgcaccgaccggggcugguacugcgacaacgccggcuccgugagcuucuucccccaggcggagaccugcaagguccaguccaaccgcguguucugcgacacgaugaacagccugacccucccguccgaggucaaccugugcaacguggacaucuucaaccccaaguacgacugcaagaucaugaccagcaagaccgacguguccagcuccgucaucacgagccugggggccaucguguccugcuacggcaagaccaagugcaccgccagcaacaagaaccgggggaucaucaagaccuucuccaacggcugcgacuacgugagcaacaagggcgucgacacgguguccguggggaacacccucuacugcgucaacaagcaggagggccagagccuguacgugaagggggagcccaucaucaacuucuacgacccccugguguucccgagcgacgaguucgacgccuccaucagccaggucaacgagaagaucaaccagucccucgccuucauccgcaagagcgacgagcugcugcacaacgugaacgcgggcaaguccaccaccaacaucaugaucaccacgaucaucaucgugaucaucgucauccuccugagccugaucgccguggggcuccugcuguacugcaaggcccggugaggacuagugcaucacauuuaaaagcaucucagccuaccaugagaauaagagaaagaaaaugaagaucaauagcuuauucaucucuuuuucuuuuucguugguguaaagccaacacccugucuaaaaaacauaaauuucuuuaaucauuuugccucuuuucucugugcuucaauuaauaaaaaauggaaagaaccuagaucuaaaaaaaaaaaaaaaaaaaaaaaaaaaaaaaaaaaaaaaaaaaaaaaaaaaaaaaaaaaaaaaaugcaucccccccccccccccccccccccccccccccaaaggcucuuuucagagccaccagaauu

SEQ ID NO: 3836 - RNA, 1927 nt, Artificial Sequence
  mRNA product Design i-2 comprising derived and/or modified sequence from HRSV(A2)__F-del_DSCav1_mut3 (opt2)
ggggcgcugccuacggagguggcagccaucuccuucucggcaucaagcuuaccauggagcuccucauccucaaggccaacgccaucaccaccauccucaccgccgucaccuucugcuucgccuccggccagaacaucaccgaggaguucuaccaguccaccugcuccgccgucuccaagggcuaccucggcgcccuccgcaccggcugguacaccuccgucaucaccaucgagcucuccaacaucaaggagaucaagugcaacggcaccgacgccaaggucaagcucaucaagcaggagcucgacaaguacaagaacgccgucaccgaccuccagcuccucaugcaguccacccccgccaccggcuccggcuccgccaucugcuccggcgucgccgucugcaagguccuccaccucgagggcgaggucaacaagaucaaguccgcccuccucuccaccaacaaggccgucgucucccucuccaacggcgucuccguccucaccuucaagguccucgaccucaagaacuacaucgacaagcagcuccuccccauccucaacaagcaguccugcuccauccccaacaucgagaccgucaucgaguuccagcagaagaacaaccgccuccucgagaucacccgcgaguucuccgucaacgccggcgucaccacccccgucuccaccuacaugcucaccaacuccgagcuccucucccucaucaacgacaugcccaucaccaacgaccagaagaagcucauguccaacaacguccagaucguccgccagcaguccuacuccaucaugugcaucaucaaggaggagguccucgccuacgucguccagcucccccucuacggcgucaucgacacccccugcuggaagcuccacaccuccccccucugcaccaccaacaccaaggagggcuccaacaucugccucacccgcaccgaccgcggcugguacugcgacaacgccggcuccgucuccuucuucccccaggccgagaccugcaagguccaguccaaccgcgucuucugcgacaccaugaacucccucacccuccccuccgaggucaaccucugcaacgucgacaucuucaaccccaaguacgacugcaagaucaugaccuccaagaccgacgucuccuccuccgucaucaccucccucggcgccaucgucuccugcuacggcaagaccaagugcaccgccuccaacaagaaccgcggcaucaucaagaccuucuccaacggcugcgacuacgucuccaacaagggcgucgacaccgucuccgucggcaacacccucuacugcgucaacaagcaggagggccagucccucuacgucaagggcgagcccaucaucaacuucuacgacccccucgucuuccccuccgacgaguucgacgccuccaucucccaggucaacgagaagaucaaccagucccucgccuucauccgcaaguccgacgagcuccuccacaacgucaacgccggcaaguccaccaccaacaucaugaucaccaccaucaucaucgucaucaucgucauccuccucucccucaucgccgucggccuccuccucuacugcaaggcccgcugaggacuagugcaucacauuuaaaagcaucucagccuaccaugagaauaagagaaagaaaaugaagaucaauagcuuauucaucucuuuuucuuuuucguugguguaaagccaacacccugucuaaaaaacauaaauuucuuuaaucauuuugccucuuuucucugugcuucaauuaauaaaaaauggaaagaaccuagaucuaaaaaaaaaaaaaaaaaaaaaaaaaaaaaaaaaaaaaaaaaaaaaaaaaaaaaaaaaaaaaaaaugcaucccccccccccccccccccccccccccccccaaaggcucuuuucagagccaccagaauu

SEQ ID NO: 3837 - RNA, 1927 nt, Artificial Sequence
  mRNA product Design i-2 comprising derived and/or modified sequence from HRSV(A2)__F-del_DSCav1_mut3 (opt3)
ggggcgcugccuacggagguggcagccaucuccuucucggcaucaagcuuaccauggagcugcucauccuuaaggccaacgcuauuaccacaauacugacugcagugacguucugcuuugccagcggccagaauaucaccgaagaguucuaccaauccacauguucugcggucucaaaaggguauuugggagcuuuaagaacugguugguacaccaguguuauuacaaucgaacugagcaacauuaaggagaucaaaugcaauggcaccgacgccaaggugaaacuaauaaagcaggaacucgauaaguauaaaaacgcaguaacugaccugcagcuucugaugcaguccacacccgccaccgggucuggaucggcuaucuguucaggcguggcagucugcaagguguugcaccucgagggugagguuaauaaaauuaagagcgcccugcugaguacgaacaaagcuguggucucccucucuaauggggugagcguauuaacuuuuaagguucuggaucuuaagaacuacaucgacaaacaauugcugccuauucuaaauaagcaguccuguucaaucccaaacauagaaaccgugauugaguuccagcagaaaaauaacaggcuccuggaaaucacacgggaguuuagugucaaugccggagugacuaccccggugagcacauauaugcuuaccaacucugagcuguugucccucauuaaugauaugcccaucacgaacgaccaaaagaaacugaugucaaacaauguccagaucguucgccagcagagcuacaguauuaugugcauaaucaaggaagagguguuagcguauguagugcaacugccucucuacggcgucauugauacuccauguuggaaacuucauacaucuccccugugcaccacuaacacaaaggaaggcuccaauaucuguuugacccgaacggaccgugggugguacugcgauaacgcaggaagcgugucguucuuuccucaggccgagaccuguaagguucagucuaauagaguguucugcgacacaaugaacucccuaacucugccaucagaagucaaucucugcaacguggauauauuuaaucccaaauaugacuguaagauuaugaccaguaaaacagauguaagcuccucuguuaucacuagccugggugcuaucgugucaugcuacggcaagaccaaauguacagccaguaacaagaauagggggauuaucaagaccuucuccaacggaugcgacuaugucagcaauaaaggcguggacacugucucuguggguaacacgcuuuacuguguuaauaagcaagaggggcagucacuguaugugaaaggagagccuauuauaaacuuuuacgauccauugguauucccgagugacgaauuugaugcaagcaucucccaggucaacgagaagauuaaucagucucucgcuuucauccggaaaucggacgaacuguuacacaacgugaaugccggcaagagcacaaccaacaucaugauuacuaccauaaucauuguuaucauugugauccugcuaucccucauagcggucggccugcuuuuguauugcaaggcccgcugaggacuagugcaucacauuuaaaagcaucucagccuaccaugagaauaagagaaagaaaaugaagaucaauagcuuauucaucucuuuuucuuuuucguugguguaaagccaacacccugucuaaaaaacauaaauuucuuuaaucauuuugccucuuuucucugugcuucaauuaauaaaaaauggaaagaaccuagaucuaaaaaaaaaaaaaaaaaaaaaaaaaaaaaaaaaaaaaaaaaaaaaaaaaaaaaaaaaaaaaaaaugcaucccccccccccccccccccccccccccccccaaaggcucuuuucagagccaccagaauu

SEQ ID NO: 3838 - RNA, 1927 nt, Artificial Sequence
  mRNA product Design i-2 comprising derived and/or modified sequence from HRSV(A2)__F-del_DSCav1_mut3 (opt4)
ggggcgcugccuacggagguggcagccaucuccuucucggcaucaagcuuaccauggagcugcugauccugaaggccaacgccaucaccaccauccugaccgccgugaccuucugcuucgccagcggccagaacaucaccgaggaguucuaccagagcaccugcagcgccgugagcaagggcuaccugggcgcccugagaaccggcugguacaccagcgugaucaccaucgagcugagcaacaucaaggagaucaagugcaacggcaccgacgccaaggugaagcugaucaagcaggagcuggacaaguacaagaacgccgugaccgaccugcagcugcugaugcagagcacccccgccaccggcagcggcagcgccaucugcagcggcguggccgugugcaaggugcugcaccuggagggcgaggugaacaagaucaagagcgcccugcugagcaccaacaaggccguggugagccugagcaacggcgugagcgugcugaccuucaaggugcuggaccugaagaacuacaucgacaagcagcugcugcccauccugaacaagcagagcugcagcauccccaacaucgagaccgugaucgaguuccagcagaagaacaacagacugcuggagaucaccagagaguucagcgugaacgccggcgugaccacccccgugagcaccuacaugcugaccaacagcgagcugcugagccugaucaacgacaugcccaucaccaacgaccagaagaagcugaugagcaacaacgugcagaucgugagacagcagagcuacagcaucaugugcaucaucaaggaggaggugcuggccuacguggugcagcugccccuguacggcgugaucgacacccccugcuggaagcugcacaccagcccccugugcaccaccaacaccaaggagggcagcaacaucugccugaccagaaccgacagaggcugguacugcgacaacgccggcagcgugagcuucuucccccaggccgagaccugcaaggugcagagcaacagaguguucugcgacaccaugaacagccugacccugcccagcgaggugaaccugugcaacguggacaucuucaaccccaaguacgacugcaagaucaugaccagcaagaccgacgugagcagcagcgugaucaccagccugggcgccaucgugagcugcuacggcaagaccaagugcaccgccagcaacaagaacagaggcaucaucaagaccuucagcaacggcugcgacuacgugagcaacaagggcguggacaccgugagcgugggcaacacccuguacugcgugaacaagcaggagggccagagccuguacgugaagggcgagcccaucaucaacuucuacgacccccugguguuccccagcgacgaguucgacgccagcaucagccaggugaacgagaagaucaaccagagccuggccuucaucagaaagagcgacgagcugcugcacaacgugaacgccggcaagagcaccaccaacaucaugaucaccaccaucaucaucgugaucaucgugauccugcugagccugaucgccgugggccugcugcuguacugcaaggccagaugaggacuagugcaucacauuuaaaagcaucucagccuaccaugagaauaagagaaagaaaaugaagaucaauagcuuauucaucucuuuuucuuuuucguugguguaaagccaacacccugucuaaaaaacauaaauuucuuuaaucauuuugccucuuuucucugugcuucaauuaauaaaaaauggaaagaaccuagaucuaaaaaaaaaaaaaaaaaaaaaaaaaaaaaaaaaaaaaaaaaaaaaaaaaaaaaaaaaaaaaaaaugcaucccccccccccccccccccccccccccccccaaaggcucuuuucagagccaccagaauu

SEQ ID NO: 3839 - RNA, 1927 nt, Artificial Sequence
  mRNA product Design i-2 comprising derived and/or modified sequence from HRSV(A2)__F-del_DSCav1_mut3 (opt5)
ggggcgcugccuacggagguggcagccaucuccuucucggcaucaagcuuaccauggagcugcucauccugaaggccaacgcuauuaccacaauccuuacggccgugaccuucugcuuugcgagcggccagaauauuacagaagaguucuaccaauccaccuguucugcugucagcaaaggguaucugggagcccucagaacaggcugguacaccuccguuaucacaauugaacugucuaacaucaaggagaucaaaugcaaugggaccgacgccaaggugaaacuuauuaagcaggaacuggauaaguauaaaaacgcugugacggaccuccagcugcugaugcagagcacccccgccacaggauccggcucugcuaucuguagcggggucgccgugugcaagguucuccaccuggagggagaggugaauaaaauuaaguccgcgcuucugagcaccaacaaagccgucgugucucucuccaauggcguuagcgugcugacauuuaagguccuugaucugaagaacuacaucgacaaacaacuccugccuauucugaauaagcagucuuguuccaucccgaacauugaaaccgugaucgaguuccagcagaaaaauaaccggcuccuggaaaucacgcgcgaguuuagcgugaaugcuggcgucacaacccccguuucuacauauaugcuuaccaacuccgagcugcucagccugauuaaugauaugccuaucaccaacgaccaaaagaaacuuauguccaacaaugugcagauugugagacagcagucuuacagcaucaugugcauuaucaaggaagagguccuggccuaugugguucaacucccccuguacggggugaucgauacaccuuguuggaaacugcauacgagcccccucugcaccacaaacaccaaggaaggauccaauauuugucugacacggaccgaccgcggcugguacugcgauaacgcugggucugucuccuucuuuccucaggccgagacguguaaggugcagagcaauagaguuuucugcgacacaaugaacucucuuacccugccgagcgaagugaaucucugcaacgucgauaucuuuaaucccaaauaugacuguaagauuaugaccuccaaaacagaugugucuagcuccgucaucaccagccugggagcgauugugucuugcuacggcaagacaaaauguacggccuccaacaagaaucgggggaucaucaagaccuucagcaacggaugcgacuauguuucuaauaaaggcguggacacagucuccgugggcaacacccuuuacuguguuaauaagcaagaggggcagagccuguaugugaaaggagagccuauuaucaacuuuuacgauccccucgucuucccuuccgacgaauuugaugcuucuauuagccaggugaacgagaagaucaaucagucccuggccuucauucgcaaaucugacgaacugcuccacaacgugaaugcuggcaagagcacaaccaacaucaugauuacgaccaucaucauuguuaucauugucauccugcuuucccugauugccguggggcuccugcuguauugcaaggccagaugaggacuagugcaucacauuuaaaagcaucucagccuaccaugagaauaagagaaagaaaaugaagaucaauagcuuauucaucucuuuuucuuuuucguugguguaaagccaacacccugucuaaaaaacauaaauuucuuuaaucauuuugccucuuuucucugugcuucaauuaauaaaaaauggaaagaaccuagaucuaaaaaaaaaaaaaaaaaaaaaaaaaaaaaaaaaaaaaaaaaaaaaaaaaaaaaaaaaaaaaaaaugcaucccccccccccccccccccccccccccccccaaaggcucuuuucagagccaccagaauu

SEQ ID NO: 3840 - RNA, 1927 nt, Artificial Sequence
  mRNA product Design i-2 comprising derived and/or modified sequence from HRSV(A2)__F-del_DSCav1_mut3 (opt6)
ggggcgcugccuacggagguggcagccaucuccuucucggcaucaagcuuaccauggaauuacuaauccugaaagcaaacgcaauuacuacaauacuaacagcaguaaccuuuugcuuugccucaggacaaaacauaacugaagaauuuuaccaaucaacuugcucagcagucucaaaaggcuaucuaggagcacuacgaacagguugguauacuucagucauaacaauagaauuaucaaacauaaaagaaauuaaauguaacggaacugacgcaaaaguaaaacucaucaaacaagaacucgauaaauacaaaaacgcuguaaccgacuuacaacuacuaaugcaaucaacuccagcaacaggcuccggauccgcaauaugcagugguguagcaguaugcaaaguccuacaccuagaaggagaaguaaauaagauaaaaucugcucuacuaucaacaaauaaagcaguugucucccuaucaaauggagucucaguacucaccuucaaaguauuagaccucaaaaacuacauagacaaacaacuauuaccaauacucaacaaacaauccugcuccaucccuaacauagaaaccguaaucgaauuucaacaaaaaaauaacagacucuuagaaauaacuagagaauuuucaguuaaugcaggcgugacaacaccaguaucaacauauaugcuaacaaacuccgaacuccuaucccuaauaaacgacaugccaaucacaaacgaccaaaaaaaacuaauguccaacaacguacaaaucguaagacaacaaucauacucuauaaugugcauaauaaaagaagaaguacuggccuacguaguacaauuaccacucuacggaguaauagacaccccaugcuggaaacuccauacaucaccccuaugcacaacaaacacaaaagaaggauccaacauaugucucacuagaacagacagaggcugguacugcgacaacgcuggauccgucucauucuucccccaagcagaaacauguaaaguacaaucuaauagaguauuuugugacacaaugaacagccucacacuaccauccgaagucaaccuauguaacguagauauauuuaaucccaaauacgacugcaaaauaaugacauccaaaacagauguaucaucauccguuaucaccucacuaggagccauaguuucaugcuacggaaaaacaaaaugcacugcaucuaacaaaaauagagguauaauaaaaacauuuuccaacggcugcgacuacgucucaaacaaaggcguagacaccguaucaguaggaaauacauuauauugcguaaauaaacaagaaggccaaucccuauacguaaaaggagaacccaucauaaacuucuaugacccacuuguuuuccccucagacgaauuugacgccucaauaucacaaguaaaugaaaaaauaaaccaaucucuugccuucauuagaaaaucagacgaauuacuacacaacgucaacgcaggaaaaucaacaacaaacaucaugauaacaacgauaauaauagucauaauaguaauacuacuaucauuaaucgcagucggacuccuauuauauugcaaagcuagauaaggacuagugcaucacauuuaaaagcaucucagccuaccaugagaauaagagaaagaaaaugaagaucaauagcuuauucaucucuuuuucuuuuucguugguguaaagccaacacccugucuaaaaaacauaaauuucuuuaaucauuuugccucuuuucucugugcuucaauuaauaaaaaauggaaagaaccuagaucuaaaaaaaaaaaaaaaaaaaaaaaaaaaaaaaaaaaaaaaaaaaaaaaaaaaaaaaaaaaaaaaaugcaucccccccccccccccccccccccccccccccaaaggcucuuuucagagccaccagaauu

SEQ ID NO: 3841 - RNA, 1927 nt, Artificial Sequence
  mRNA product Design i-2 comprising derived and/or modified sequence from HRSV(A2)__F-del_DSCav1_mut3 (opt11)
ggggcgcugccuacggagguggcagccaucuccuucucggcaucaagcuuaccauggaacuacucauacuaaaagccaacgccauaaccaccauccucaccgcaguaacuuucugcuucgcuuccggccaaaacaucaccgaagaauuuuaccaaaguaccugcagcgcagucucaaaaggauaccuaggcgcccuacgcacaggcugguacaccuccgucauuaccaucgaacucuccaacaucaaagaaauuaaaugcaacgguacagacgcaaaagucaaacucaucaaacaagaacucgacaaauacaaaaacgcagucaccgaccuccaacuccucaugcaauccacccccgccacaggcucuggcuccgccaucugcucaggcguagcagucugcaaaguccugcaccucgaaggcgaagucaacaaaaucaagucagcccuccucuccaccaacaaggccgucguaucccucucaaacggaguuagcguccucaccuucaaaguccuagaccucaaaaacuacaucgauaaacaacuacuccccauccuaaacaaacaaucaugcuccaucccaaacaucgaaaccguaaucgaguuccaacaaaagaacaaccgccuccucgaaaucacacgugaguucuccguuaacgccggcgucaccacccccgucucuacauacaugcucaccaacuccgaacuccuuucccucaucaacgacaugccaaucaccaacgaccaaaagaaacucaugucaaacaacguacaaaucguccgacaacaaagcuacuccaucaugugcaucaucaaagaagaaguccuugcauacgucguucaacuaccccucuacggcguaaucgacacucccugcuggaaacuccacaccuccccgcucugcacaaccaacaccaaagaaggcagcaacaucugccucacccgaaccgaccgcggcugguacugcgauaacgccggauccgucuccuucuucccacaagcagaaacuugcaaaguccaauccaaccgcgucuucugcgacaccaugaacucccucacacuccccuccgaagucaaccugugcaacgucgacaucuucaacccaaaauacgacugcaaaaucaugaccucaaaaaccgacgucucaucuucugucaucaccucucucggcgcuaucgucuccugcuauggcaaaaccaaaugcaccgccuccaacaagaaccgcggcauuaucaagaccuucuccaacggcugcgacuacgucuccaauaagggcgucgacaccgucucugucggcaacacccuuuacugcguaaacaaacaagaaggucaaucucucuacgucaaaggagaacccaucaucaacuucuacgacccccuggucuuccccuccgacgaguucgaugcaucaaucucccaagucaacgaaaagaucaaccaaucucucgcuuucauccgcaaauccgacgaacuccuacacaacguaaacgccggcaaauccaccacaaacaucaugaucaccaccauuaucauagucaucaucgucauccuccucuccuuaaucgccguuggccuccuucucuacugcaaagcccgauaaggacuagugcaucacauuuaaaagcaucucagccuaccaugagaauaagagaaagaaaaugaagaucaauagcuuauucaucucuuuuucuuuuucguugguguaaagccaacacccugucuaaaaaacauaaauuucuuuaaucauuuugccucuuuucucugugcuucaauuaauaaaaaauggaaagaaccuagaucuaaaaaaaaaaaaaaaaaaaaaaaaaaaaaaaaaaaaaaaaaaaaaaaaaaaaaaaaaaaaaaaaugcaucccccccccccccccccccccccccccccccaaaggcucuuuucagagccaccagaauu

SEQ ID NO: 3842 - RNA, 1762 nt, Artificial Sequence
  mRNA product Design i-3 comprising derived and/or modified sequence from HRSV(A2)__F-del_DSCav1_mut3 (opt1) R6775
gggagaaagcuuaccauggagcugcucauccugaaggccaacgccaucaccaccauccugacggcggugaccuucugcuucgccagcggccagaacaucaccgaggaguucuaccaguccacgugcagcgccgucuccaagggguaccucggcgcccugcggaccggcugguacaccuccgugaucaccaucgagcugagcaacaucaaggagaucaagugcaacgggaccgacgccaaggugaagcucaucaagcaggagcuggacaaguacaagaacgcggucacggaccugcagcuccugaugcaguccaccccggcaaccggcuccggcuccgccaucugcagcggcgucgccgugugcaaggugcugcaccucgagggggaggucaacaagaucaagagcgcccugcuguccaccaacaaggccguggugagccucuccaacggcgucagcgugcugaccuucaaggugcuggaccucaagaacuacaucgacaagcagcugcugcccauccugaacaagcagagcugcuccauccccaacaucgagacggugaucgaguuccagcagaagaacaaccggcuccuggagaucacccgcgaguucagcgugaacgccggggucaccacccccguguccacguacaugcugaccaacagcgagcuccugucccugaucaacgacaugccgaucaccaacgaccagaagaagcucaugagcaacaacgugcagaucguccggcagcaguccuacagcaucaugugcaucaucaaggaggaggugcuggcguacgugguccagcugccccucuacggcgugaucgacacccccugcuggaagcugcacacgagcccccugugcaccaccaacaccaaggagggguccaacaucugccucacgcgcaccgaccggggcugguacugcgacaacgccggcagcgucuccuucuucccgcaggccgagaccugcaaggugcagagcaaccgcguguucugcgacaccaugaacucccugacgcugcccagcgagguaaaccucugcaacgucgacaucuucaaccccaaguacgacugcaagaucaugaccuccaagaccgacgugagcuccagcgugaucaccucccugggggccaucgucagcugcuacggcaagacgaagugcaccgccagcaacaagaaccgggggaucaucaagaccuucuccaacggcugcgacuacgugagcaacaagggcguggacaccguguccgucgggaacacccuguacugcgugaacaagcaggagggccagagccucuacgugaagggggagcccaucaucaacuucuacgacccgcuggucuuccccuccgacgaguucgacgcgagcaucucccaggugaacgagaagaucaaccagagccuggccuucauccgcaaguccgacgagcugcuccacaacgugaacgccggcaagagcacgaccaacaucaugaucaccaccaucaucaucgucaucaucgugauccugcugucccucaucgccguggggcugcugcucuacugcaaggcccggugaggacuaguuauaagacugacuagcccgaugggccucccaacgggcccuccuccccuccuugcaccgagauuaauaaaaaaaaaaaaaaaaaaaaaaaaaaaaaaaaaaaaaaaaaaaaaaaaaaaaaaaaaaaaaaaaugcaucccccccccccccccccccccccccccccccaaaggcucuuuucagagccaccagaauu

SEQ ID NO: 3843 - RNA, 1762 nt, Artificial Sequence
  mRNA product Design i-3 comprising derived and/or modified sequence from HRSV(A2)__F-del_DSCav1_mut3 (opt1)
gggagaaagcuuaccauggagcugcucauccugaaggccaacgccaucaccaccauccugacggcggugaccuucugcuucgccagcggccagaacaucaccgaggaguucuaccaguccacgugcagcgccgucuccaagggguaccucggcgcccugcgcaccgggugguacaccagcgugaucaccaucgagcuguccaacaucaaggagaucaagugcaacggcaccgacgccaaggugaagcucaucaagcaggagcuggacaaguacaagaacgcggucacggaccugcagcuccugaugcagagcacccccgccaccggguccggcagcgccaucugcuccggcguggccgugugcaagguccugcaccucgagggggaggugaacaagaucaagagcgcgcugcuguccaccaacaaggccguggucagccucuccaacggcgugagcgugcugacguucaagguccuggaccucaagaacuacaucgacaagcagcugcugccgauccucaacaagcaguccugcagcauccccaacaucgagaccgugaucgaguuccagcagaagaacaaccggcugcuggagaucacccgcgaguucuccgugaacgccggggucaccacgcccgugagcaccuacaugcucaccaacuccgagcugcugagccucaucaacgacaugcccaucaccaacgaccagaagaagcugaugagcaacaacgugcagaucguccggcagcaguccuacagcaucaugugcaucaucaaggaggaggugcuggccuacgugguccagcucccgcuguacggcgugaucgacacgcccugcuggaagcugcacaccagcccccucugcaccaccaacacgaaggagggguccaacaucugccugacccgcaccgaccggggcugguacugcgacaacgccggcuccgugagcuucuucccccaggcggagaccugcaagguccaguccaaccgcguguucugcgacacgaugaacagccugacccucccguccgaggucaaccugugcaacguggacaucuucaaccccaaguacgacugcaagaucaugaccagcaagaccgacguguccagcuccgucaucacgagccugggggccaucguguccugcuacggcaagaccaagugcaccgccagcaacaagaaccgggggaucaucaagaccuucuccaacggcugcgacuacgugagcaacaagggcgucgacacgguguccguggggaacacccucuacugcgucaacaagcaggagggccagagccuguacgugaagggggagcccaucaucaacuucuacgacccccugguguucccgagcgacgaguucgacgccuccaucagccaggucaacgagaagaucaaccagucccucgccuucauccgcaagagcgacgagcugcugcacaacgugaacgcgggcaaguccaccaccaacaucaugaucaccacgaucaucaucgugaucaucgucauccuccugagccugaucgccguggggcuccugcuguacugcaaggcccggugaggacuaguuauaagacugacuagcccgaugggccucccaacgggcccuccuccccuccuugcaccgagauuaauaaaaaaaaaaaaaaaaaaaaaaaaaaaaaaaaaaaaaaaaaaaaaaaaaaaaaaaaaaaaaaaaugcaucccccccccccccccccccccccccccccccaaaggcucuuuucagagccaccagaauu

SEQ ID NO: 3844 - RNA, 1762 nt, Artificial Sequence
  mRNA product Design i-3 comprising derived and/or modified sequence from HRSV(A2)__F-del_DSCav1_mut3 (opt2)
gggagaaagcuuaccauggagcuccucauccucaaggccaacgccaucaccaccauccucaccgccgucaccuucugcuucgccuccggccagaacaucaccgaggaguucuaccaguccaccugcuccgccgucuccaagggcuaccucggcgcccuccgcaccggcugguacaccuccgucaucaccaucgagcucuccaacaucaaggagaucaagugcaacggcaccgacgccaaggucaagcucaucaagcaggagcucgacaaguacaagaacgccgucaccgaccuccagcuccucaugcaguccacccccgccaccggcuccggcuccgccaucugcuccggcgucgccgucugcaagguccuccaccucgagggcgaggucaacaagaucaaguccgcccuccucuccaccaacaaggccgucgucucccucuccaacggcgucuccguccucaccuucaagguccucgaccucaagaacuacaucgacaagcagcuccuccccauccucaacaagcaguccugcuccauccccaacaucgagaccgucaucgaguuccagcagaagaacaaccgccuccucgagaucacccgcgaguucuccgucaacgccggcgucaccacccccgucuccaccuacaugcucaccaacuccgagcuccucucccucaucaacgacaugcccaucaccaacgaccagaagaagcucauguccaacaacguccagaucguccgccagcaguccuacuccaucaugugcaucaucaaggaggagguccucgccuacgucguccagcucccccucuacggcgucaucgacacccccugcuggaagcuccacaccuccccccucugcaccaccaacaccaaggagggcuccaacaucugccucacccgcaccgaccgcggcugguacugcgacaacgccggcuccgucuccuucuucccccaggccgagaccugcaagguccaguccaaccgcgucuucugcgacaccaugaacucccucacccuccccuccgaggucaaccucugcaacgucgacaucuucaaccccaaguacgacugcaagaucaugaccuccaagaccgacgucuccuccuccgucaucaccucccucggcgccaucgucuccugcuacggcaagaccaagugcaccgccuccaacaagaaccgcggcaucaucaagaccuucuccaacggcugcgacuacgucuccaacaagggcgucgacaccgucuccgucggcaacacccucuacugcgucaacaagcaggagggccagucccucuacgucaagggcgagcccaucaucaacuucuacgacccccucgucuuccccuccgacgaguucgacgccuccaucucccaggucaacgagaagaucaaccagucccucgccuucauccgcaaguccgacgagcuccuccacaacgucaacgccggcaaguccaccaccaacaucaugaucaccaccaucaucaucgucaucaucgucauccuccucucccucaucgccgucggccuccuccucuacugcaaggcccgcugaggacuaguuauaagacugacuagcccgaugggccucccaacgggcccuccuccccuccuugcaccgagauuaauaaaaaaaaaaaaaaaaaaaaaaaaaaaaaaaaaaaaaaaaaaaaaaaaaaaaaaaaaaaaaaaaugcaucccccccccccccccccccccccccccccccaaaggcucuuuucagagccaccagaauu

SEQ ID NO: 3845 - RNA, 1762 nt, Artificial Sequence
  mRNA product Design i-3 comprising derived and/or modified sequence from HRSV(A2)__F-del_DSCav1_mut3 (opt3)
gggagaaagcuuaccauggagcugcucauccuuaaggccaacgcuauuaccacaauacugacugcagugacguucugcuuugccagcggccagaauaucaccgaagaguucuaccaauccacauguucugcggucucaaaaggguauuugggagcuuuaagaacugguugguacaccaguguuauuacaaucgaacugagcaacauuaaggagaucaaaugcaauggcaccgacgccaaggugaaacuaauaaagcaggaacucgauaaguauaaaaacgcaguaacugaccugcagcuucugaugcaguccacacccgccaccgggucuggaucggcuaucuguucaggcguggcagucugcaagguguugcaccucgagggugagguuaauaaaauuaagagcgcccugcugaguacgaacaaagcuguggucucccucucuaauggggugagcguauuaacuuuuaagguucuggaucuuaagaacuacaucgacaaacaauugcugccuauucuaaauaagcaguccuguucaaucccaaacauagaaaccgugauugaguuccagcagaaaaauaacaggcuccuggaaaucacacgggaguuuagugucaaugccggagugacuaccccggugagcacauauaugcuuaccaacucugagcuguugucccucauuaaugauaugcccaucacgaacgaccaaaagaaacugaugucaaacaauguccagaucguucgccagcagagcuacaguauuaugugcauaaucaaggaagagguguuagcguauguagugcaacugccucucuacggcgucauugauacuccauguuggaaacuucauacaucuccccugugcaccacuaacacaaaggaaggcuccaauaucuguuugacccgaacggaccgugggugguacugcgauaacgcaggaagcgugucguucuuuccucaggccgagaccuguaagguucagucuaauagaguguucugcgacacaaugaacucccuaacucugccaucagaagucaaucucugcaacguggauauauuuaaucccaaauaugacuguaagauuaugaccaguaaaacagauguaagcuccucuguuaucacuagccugggugcuaucgugucaugcuacggcaagaccaaauguacagccaguaacaagaauagggggauuaucaagaccuucuccaacggaugcgacuaugucagcaauaaaggcguggacacugucucuguggguaacacgcuuuacuguguuaauaagcaagaggggcagucacuguaugugaaaggagagccuauuauaaacuuuuacgauccauugguauucccgagugacgaauuugaugcaagcaucucccaggucaacgagaagauuaaucagucucucgcuuucauccggaaaucggacgaacuguuacacaacgugaaugccggcaagagcacaaccaacaucaugauuacuaccauaaucauuguuaucauugugauccugcuaucccucauagcggucggccugcuuuuguauugcaaggcccgcugaggacuaguuauaagacugacuagcccgaugggccucccaacgggcccuccuccccuccuugcaccgagauuaauaaaaaaaaaaaaaaaaaaaaaaaaaaaaaaaaaaaaaaaaaaaaaaaaaaaaaaaaaaaaaaaaugcaucccccccccccccccccccccccccccccccaaaggcucuuuucagagccaccagaauu

SEQ ID NO: 3846 - RNA, 1762 nt, Artificial Sequence
  mRNA product Design i-3 comprising derived and/or modified sequence from HRSV(A2)__F-del_DSCav1_mut3 (opt4)
gggagaaagcuuaccauggagcugcugauccugaaggccaacgccaucaccaccauccugaccgccgugaccuucugcuucgccagcggccagaacaucaccgaggaguucuaccagagcaccugcagcgccgugagcaagggcuaccugggcgcccugagaaccggcugguacaccagcgugaucaccaucgagcugagcaacaucaaggagaucaagugcaacggcaccgacgccaaggugaagcugaucaagcaggagcuggacaaguacaagaacgccgugaccgaccugcagcugcugaugcagagcacccccgccaccggcagcggcagcgccaucugcagcggcguggccgugugcaaggugcugcaccuggagggcgaggugaacaagaucaagagcgcccugcugagcaccaacaaggccguggugagccugagcaacggcgugagcgugcugaccuucaaggugcuggaccugaagaacuacaucgacaagcagcugcugcccauccugaacaagcagagcugcagcauccccaacaucgagaccgugaucgaguuccagcagaagaacaacagacugcuggagaucaccagagaguucagcgugaacgccggcgugaccacccccgugagcaccuacaugcugaccaacagcgagcugcugagccugaucaacgacaugcccaucaccaacgaccagaagaagcugaugagcaacaacgugcagaucgugagacagcagagcuacagcaucaugugcaucaucaaggaggaggugcuggccuacguggugcagcugccccuguacggcgugaucgacacccccugcuggaagcugcacaccagcccccugugcaccaccaacaccaaggagggcagcaacaucugccugaccagaaccgacagaggcugguacugcgacaacgccggcagcgugagcuucuucccccaggccgagaccugcaaggugcagagcaacagaguguucugcgacaccaugaacagccugacccugcccagcgaggugaaccugugcaacguggacaucuucaaccccaaguacgacugcaagaucaugaccagcaagaccgacgugagcagcagcgugaucaccagccugggcgccaucgugagcugcuacggcaagaccaagugcaccgccagcaacaagaacagaggcaucaucaagaccuucagcaacggcugcgacuacgugagcaacaagggcguggacaccgugagcgugggcaacacccuguacugcgugaacaagcaggagggccagagccuguacgugaagggcgagcccaucaucaacuucuacgacccccugguguuccccagcgacgaguucgacgccagcaucagccaggugaacgagaagaucaaccagagccuggccuucaucagaaagagcgacgagcugcugcacaacgugaacgccggcaagagcaccaccaacaucaugaucaccaccaucaucaucgugaucaucgugauccugcugagccugaucgccgugggccugcugcuguacugcaaggccagaugaggacuaguuauaagacugacuagcccgaugggccucccaacgggcccuccuccccuccuugcaccgagauuaauaaaaaaaaaaaaaaaaaaaaaaaaaaaaaaaaaaaaaaaaaaaaaaaaaaaaaaaaaaaaaaaaugcaucccccccccccccccccccccccccccccccaaaggcucuuuucagagccaccagaauu

SEQ ID NO: 3847 - RNA, 1762 nt, Artificial Sequence
  mRNA product Design i-3 comprising derived and/or modified sequence from HRSV(A2)__F-del_DSCav1_mut3 (opt5)
gggagaaagcuuaccauggagcugcucauccugaaggccaacgcuauuaccacaauccuuacggccgugaccuucugcuuugcgagcggccagaauauuacagaagaguucuaccaauccaccuguucugcugucagcaaaggguaucugggagcccucagaacaggcugguacaccuccguuaucacaauugaacugucuaacaucaaggagaucaaaugcaaugggaccgacgccaaggugaaacuuauuaagcaggaacuggauaaguauaaaaacgcugugacggaccuccagcugcugaugcagagcacccccgccacaggauccggcucugcuaucuguagcggggucgccgugugcaagguucuccaccuggagggagaggugaauaaaauuaaguccgcgcuucugagcaccaacaaagccgucgugucucucuccaauggcguuagcgugcugacauuuaagguccuugaucugaagaacuacaucgacaaacaacuccugccuauucugaauaagcagucuuguuccaucccgaacauugaaaccgugaucgaguuccagcagaaaaauaaccggcuccuggaaaucacgcgcgaguuuagcgugaaugcuggcgucacaacccccguuucuacauauaugcuuaccaacuccgagcugcucagccugauuaaugauaugccuaucaccaacgaccaaaagaaacuuauguccaacaaugugcagauugugagacagcagucuuacagcaucaugugcauuaucaaggaagagguccuggccuaugugguucaacucccccuguacggggugaucgauacaccuuguuggaaacugcauacgagcccccucugcaccacaaacaccaaggaaggauccaauauuugucugacacggaccgaccgcggcugguacugcgauaacgcugggucugucuccuucuuuccucaggccgagacguguaaggugcagagcaauagaguuuucugcgacacaaugaacucucuuacccugccgagcgaagugaaucucugcaacgucgauaucuuuaaucccaaauaugacuguaagauuaugaccuccaaaacagaugugucuagcuccgucaucaccagccugggagcgauugugucuugcuacggcaagacaaaauguacggccuccaacaagaaucgggggaucaucaagaccuucagcaacggaugcgacuauguuucuaauaaaggcguggacacagucuccgugggcaacacccuuuacuguguuaauaagcaagaggggcagagccuguaugugaaaggagagccuauuaucaacuuuuacgauccccucgucuucccuuccgacgaauuugaugcuucuauuagccaggugaacgagaagaucaaucagucccuggccuucauucgcaaaucugacgaacugcuccacaacgugaaugcuggcaagagcacaaccaacaucaugauuacgaccaucaucauuguuaucauugucauccugcuuucccugauugccguggggcuccugcuguauugcaaggccagaugaggacuaguuauaagacugacuagcccgaugggccucccaacgggcccuccuccccuccuugcaccgagauuaauaaaaaaaaaaaaaaaaaaaaaaaaaaaaaaaaaaaaaaaaaaaaaaaaaaaaaaaaaaaaaaaaugcaucccccccccccccccccccccccccccccccaaaggcucuuuucagagccaccagaauu

SEQ ID NO: 3848 - RNA, 1762 nt, Artificial Sequence
  mRNA product Design i-3 comprising derived and/or modified sequence from HRSV(A2)__F-del_DSCav1_mut3 (opt6)
gggagaaagcuuaccauggaauuacuaauccugaaagcaaacgcaauuacuacaauacuaacagcaguaaccuuuugcuuugccucaggacaaaacauaacugaagaauuuuaccaaucaacuugcucagcagucucaaaaggcuaucuaggagcacuacgaacagguugguauacuucagucauaacaauagaauuaucaaacauaaaagaaauuaaauguaacggaacugacgcaaaaguaaaacucaucaaacaagaacucgauaaauacaaaaacgcuguaaccgacuuacaacuacuaaugcaaucaacuccagcaacaggcuccggauccgcaauaugcagugguguagcaguaugcaaaguccuacaccuagaaggagaaguaaauaagauaaaaucugcucuacuaucaacaaauaaagcaguugucucccuaucaaauggagucucaguacucaccuucaaaguauuagaccucaaaaacuacauagacaaacaacuauuaccaauacucaacaaacaauccugcuccaucccuaacauagaaaccguaaucgaauuucaacaaaaaaauaacagacucuuagaaauaacuagagaauuuucaguuaaugcaggcgugacaacaccaguaucaacauauaugcuaacaaacuccgaacuccuaucccuaauaaacgacaugccaaucacaaacgaccaaaaaaaacuaauguccaacaacguacaaaucguaagacaacaaucauacucuauaaugugcauaauaaaagaagaaguacuggccuacguaguacaauuaccacucuacggaguaauagacaccccaugcuggaaacuccauacaucaccccuaugcacaacaaacacaaaagaaggauccaacauaugucucacuagaacagacagaggcugguacugcgacaacgcuggauccgucucauucuucccccaagcagaaacauguaaaguacaaucuaauagaguauuuugugacacaaugaacagccucacacuaccauccgaagucaaccuauguaacguagauauauuuaaucccaaauacgacugcaaaauaaugacauccaaaacagauguaucaucauccguuaucaccucacuaggagccauaguuucaugcuacggaaaaacaaaaugcacugcaucuaacaaaaauagagguauaauaaaaacauuuuccaacggcugcgacuacgucucaaacaaaggcguagacaccguaucaguaggaaauacauuauauugcguaaauaaacaagaaggccaaucccuauacguaaaaggagaacccaucauaaacuucuaugacccacuuguuuuccccucagacgaauuugacgccucaauaucacaaguaaaugaaaaaauaaaccaaucucuugccuucauuagaaaaucagacgaauuacuacacaacgucaacgcaggaaaaucaacaacaaacaucaugauaacaacgauaauaauagucauaauaguaauacuacuaucauuaaucgcagucggacuccuauuauauugcaaagcuagauaaggacuaguuauaagacugacuagcccgaugggccucccaacgggcccuccuccccuccuugcaccgagauuaauaaaaaaaaaaaaaaaaaaaaaaaaaaaaaaaaaaaaaaaaaaaaaaaaaaaaaaaaaaaaaaaaugcaucccccccccccccccccccccccccccccccaaaggcucuuuucagagccaccagaauu

SEQ ID NO: 3849 - RNA, 1762 nt, Artificial Sequence
  mRNA product Design i-3 comprising derived and/or modified sequence from HRSV(A2)__F-del_DSCav1_mut3 (opt11)
gggagaaagcuuaccauggaacuacucauacuaaaagccaacgccauaaccaccauccucaccgcaguaacuuucugcuucgcuuccggccaaaacaucaccgaagaauuuuaccaaaguaccugcagcgcagucucaaaaggauaccuaggcgcccuacgcacaggcugguacaccuccgucauuaccaucgaacucuccaacaucaaagaaauuaaaugcaacgguacagacgcaaaagucaaacucaucaaacaagaacucgacaaauacaaaaacgcagucaccgaccuccaacuccucaugcaauccacccccgccacaggcucuggcuccgccaucugcucaggcguagcagucugcaaaguccugcaccucgaaggcgaagucaacaaaaucaagucagcccuccucuccaccaacaaggccgucguaucccucucaaacggaguuagcguccucaccuucaaaguccuagaccucaaaaacuacaucgauaaacaacuacuccccauccuaaacaaacaaucaugcuccaucccaaacaucgaaaccguaaucgaguuccaacaaaagaacaaccgccuccucgaaaucacacgugaguucuccguuaacgccggcgucaccacccccgucucuacauacaugcucaccaacuccgaacuccuuucccucaucaacgacaugccaaucaccaacgaccaaaagaaacucaugucaaacaacguacaaaucguccgacaacaaagcuacuccaucaugugcaucaucaaagaagaaguccuugcauacgucguucaacuaccccucuacggcguaaucgacacucccugcuggaaacuccacaccuccccgcucugcacaaccaacaccaaagaaggcagcaacaucugccucacccgaaccgaccgcggcugguacugcgauaacgccggauccgucuccuucuucccacaagcagaaacuugcaaaguccaauccaaccgcgucuucugcgacaccaugaacucccucacacuccccuccgaagucaaccugugcaacgucgacaucuucaacccaaaauacgacugcaaaaucaugaccucaaaaaccgacgucucaucuucugucaucaccucucucggcgcuaucgucuccugcuauggcaaaaccaaaugcaccgccuccaacaagaaccgcggcauuaucaagaccuucuccaacggcugcgacuacgucuccaauaagggcgucgacaccgucucugucggcaacacccuuuacugcguaaacaaacaagaaggucaaucucucuacgucaaaggagaacccaucaucaacuucuacgacccccuggucuuccccuccgacgaguucgaugcaucaaucucccaagucaacgaaaagaucaaccaaucucucgcuuucauccgcaaauccgacgaacuccuacacaacguaaacgccggcaaauccaccacaaacaucaugaucaccaccauuaucauagucaucaucgucauccuccucuccuuaaucgccguuggccuccuucucuacugcaaagcccgauaaggacuaguuauaagacugacuagcccgaugggccucccaacgggcccuccuccccuccuugcaccgagauuaauaaaaaaaaaaaaaaaaaaaaaaaaaaaaaaaaaaaaaaaaaaaaaaaaaaaaaaaaaaaaaaaaugcaucccccccccccccccccccccccccccccccaaaggcucuuuucagagccaccagaauu

SEQ ID NO: 3850 - protein, 535 aa, Artificial Sequence
  derived and/or modified protein sequence (artificial) from HRSV(A2)__F_DSCav1_mut0
MELLILKANAITTILTAVTFCFASGQNITEEFYQSTCSAVSKGYLSALRTGWYTSVITIELSNIKENKCNGTDAKVKLIKQELDKYKNAVTELQLLMQSTPATGSGSAIASGVAVCKVLHLEGEVNKIKSALLSTNKAVVSLSNGVSVLTFKVLDLKNYIDKQLLPILNKQSCSISNIETVIEFQQKNNRLLEITREFSVNAGVTTPVSTYMLTNSELLSLINDMPITNDQKKLMSNNVQIVRQQSYSIMCIIKEEVLAYVVQLPLYGVIDTPCWKLHTSPLCTTNTKEGSNICLTRTDRGWYCDNAGSVSFFPQAETCKVQSNRVFCDTMNSRTLPSEVNLCNVDIFNPKYDCKIMTSKTDVSSSVITSLGAIVSCYGKTKCTASNKNRGIIKTFSNGCDYVSNKGVDTVSVGNTLYYVNKQEGKSLYVKGEPIINFYDPLVFPSDEFDASISQVNEKINQSLAFIRKSDELLHNVNAGKSTTNIMITTIIIVIIVILLSLIAVGLLLYCKARSTPVTLSKDQLSGINNIAFSN

SEQ ID NO: 3851 - RNA, 1608 nt, Artificial Sequence
  derived and/or modified CDS sequence (opt1) from HRSV(A2)__F_DSCav1_mut0
auggagcugcucauccugaaggccaacgccaucaccaccauccugacggcggugaccuucugcuucgccagcggccagaacaucaccgaggaguucuaccaguccacgugcagcgccgucuccaagggguaccucagcgcccugcggaccggcugguacaccuccgugaucaccaucgagcugagcaacaucaaggagaacaagugcaacgggaccgacgccaaggugaagcucaucaagcaggagcuggacaaguacaagaacgcggucacggagcugcagcuccugaugcaguccaccccggcaaccggcuccggcuccgccaucgcgagcggcgucgccgugugcaaggugcugcaccucgagggggaggucaacaagaucaagagcgcccugcuguccaccaacaaggccguggugagccucuccaacggcgucagcgugcugaccuucaaggugcuggaccucaagaacuacaucgacaagcagcugcugcccauccugaacaagcagagcugcuccaucagcaacaucgagacggugaucgaguuccagcagaagaacaaccggcuccuggagaucacccgcgaguucagcgugaacgccggggucaccacccccguguccacguacaugcugaccaacagcgagcuccugucccugaucaacgacaugccgaucaccaacgaccagaagaagcucaugagcaacaacgugcagaucguccggcagcaguccuacagcaucaugugcaucaucaaggaggaggugcuggcguacgugguccagcugccccucuacggcgugaucgacacccccugcuggaagcugcacacgagcccccugugcaccaccaacaccaaggagggguccaacaucugccucacgcgcaccgaccggggcugguacugcgacaacgccggcagcgucuccuucuucccgcaggccgagaccugcaaggugcagagcaaccgcguguucugcgacaccaugaacucccggacgcugcccagcgagguaaaccucugcaacgucgacaucuucaaccccaaguacgacugcaagaucaugaccuccaagaccgacgugagcuccagcgugaucaccucccugggggccaucgucagcugcuacggcaagacgaagugcaccgccagcaacaagaaccgggggaucaucaagaccuucuccaacggcugcgacuacgugagcaacaagggcguggacaccguguccgucgggaacacccuguacuacgugaacaagcaggagggcaagagccucuacgugaagggggagcccaucaucaacuucuacgacccgcuggucuuccccuccgacgaguucgacgcgagcaucucccaggugaacgagaagaucaaccagagccuggccuucauccgcaaguccgacgagcugcuccacaacgugaacgccggcaagagcacgaccaacaucaugaucaccaccaucaucaucgucaucaucgugauccugcugucccucaucgccguggggcugcugcucuacugcaaggcccggagcacgcccgucacccuguccaaggaccagcugagcggcaucaacaacaucgcguucuccaacuga

SEQ ID NO: 3852 - RNA, 1608 nt, Artificial Sequence
  derived and/or modified CDS sequence (opt1) from HRSV(A2)__F_DSCav1_mut0
auggagcugcucauccugaaggccaacgccaucaccaccauccugacggcggugaccuucugcuucgccagcggccagaacaucaccgaggaguucuaccaguccacgugcagcgccgucuccaagggguaccucagcgcccugcgcaccggcugguacaccuccgugaucaccaucgagcugagcaacaucaaggagaacaagugcaacgggaccgacgccaaggugaagcucaucaagcaggagcuggacaaguacaagaacgcggucacggagcugcagcuccugaugcaguccacccccgccaccggcagcggguccgccaucgccagcggcguggcggugugcaagguccugcaccucgagggcgaggugaacaagaucaaguccgcccugcugagcaccaacaaggccguggucucccucagcaacgggguguccgugcugacguucaagguccuggaccucaagaacuacaucgacaagcagcugcugccgauccucaacaagcagagcugcuccaucagcaacaucgagaccgugaucgaguuccagcagaagaacaaccggcugcuggagaucacccgcgaguucuccgugaacgccggcgucaccacgcccgugagcaccuacaugcucaccaacagcgagcugcugucccucaucaacgacaugcccaucaccaacgaccagaagaagcugaugagcaacaacgugcagaucguccggcagcaguccuacagcaucaugugcaucaucaaggaggaggugcuggccuacgugguccagcucccccuguacggggugaucgacacgccgugcuggaagcugcacaccagcccccucugcaccaccaacacgaaggagggcuccaacaucugccugacccgcaccgaccgggggugguacugcgacaacgcgggcuccgugagcuucuucccccaggccgagaccugcaagguccaguccaaccgcguguucugcgacacgaugaacagccggacccuccccuccgaggucaaccugugcaacguggacaucuucaacccgaaguacgacugcaagaucaugaccagcaagaccgacguguccagcuccgucaucacgagccugggcgccaucguguccugcuacgggaagaccaagugcaccgccagcaacaagaaccggggcaucaucaagaccuucuccaacgggugcgacuacgugagcaacaagggcgucgacacggugagcgugggcaacacccucuacuacgucaacaagcaggaggggaagucccuguacgugaagggcgagcccaucaucaacuucuacgacccccugguguuccccagcgacgaguucgacgccuccaucagccaggucaacgagaagaucaaccagucccucgcguucauccgcaagagcgacgagcugcugcacaacgugaacgccgggaaguccaccaccaacaucaugaucaccacgaucaucaucgugaucaucgucauccuccugagccugaucgccgugggccuccugcuguacugcaaggcccgguccaccccggugacccugagcaaggaccagcucuccgggaucaacaacaucgccuucagcaacuga

SEQ ID NO: 3853 - RNA, 1608 nt, Artificial Sequence
  derived and/or modified CDS sequence (opt2) from HRSV(A2)__F_DSCav1_mut0
auggagcuccucauccucaaggccaacgccaucaccaccauccucaccgccgucaccuucugcuucgccuccggccagaacaucaccgaggaguucuaccaguccaccugcuccgccgucuccaagggcuaccucuccgcccuccgcaccggcugguacaccuccgucaucaccaucgagcucuccaacaucaaggagaacaagugcaacggcaccgacgccaaggucaagcucaucaagcaggagcucgacaaguacaagaacgccgucaccgagcuccagcuccucaugcaguccacccccgccaccggcuccggcuccgccaucgccuccggcgucgccgucugcaagguccuccaccucgagggcgaggucaacaagaucaaguccgcccuccucuccaccaacaaggccgucgucucccucuccaacggcgucuccguccucaccuucaagguccucgaccucaagaacuacaucgacaagcagcuccuccccauccucaacaagcaguccugcuccaucuccaacaucgagaccgucaucgaguuccagcagaagaacaaccgccuccucgagaucacccgcgaguucuccgucaacgccggcgucaccacccccgucuccaccuacaugcucaccaacuccgagcuccucucccucaucaacgacaugcccaucaccaacgaccagaagaagcucauguccaacaacguccagaucguccgccagcaguccuacuccaucaugugcaucaucaaggaggagguccucgccuacgucguccagcucccccucuacggcgucaucgacacccccugcuggaagcuccacaccuccccccucugcaccaccaacaccaaggagggcuccaacaucugccucacccgcaccgaccgcggcugguacugcgacaacgccggcuccgucuccuucuucccccaggccgagaccugcaagguccaguccaaccgcgucuucugcgacaccaugaacucccgcacccuccccuccgaggucaaccucugcaacgucgacaucuucaaccccaaguacgacugcaagaucaugaccuccaagaccgacgucuccuccuccgucaucaccucccucggcgccaucgucuccugcuacggcaagaccaagugcaccgccuccaacaagaaccgcggcaucaucaagaccuucuccaacggcugcgacuacgucuccaacaagggcgucgacaccgucuccgucggcaacacccucuacuacgucaacaagcaggagggcaagucccucuacgucaagggcgagcccaucaucaacuucuacgacccccucgucuuccccuccgacgaguucgacgccuccaucucccaggucaacgagaagaucaaccagucccucgccuucauccgcaaguccgacgagcuccuccacaacgucaacgccggcaaguccaccaccaacaucaugaucaccaccaucaucaucgucaucaucgucauccuccucucccucaucgccgucggccuccuccucuacugcaaggcccgcuccacccccgucacccucuccaaggaccagcucuccggcaucaacaacaucgccuucuccaacuga

SEQ ID NO: 3854 - RNA, 1608 nt, Artificial Sequence
  derived and/or modified CDS sequence (opt3) from HRSV(A2)__F_DSCav1_mut0
auggagcugcucauccuuaaggccaacgcuauuaccacaauacugacugcagugacguucugcuuugccagcggccagaauaucaccgaagaguucuaccaauccacauguucugcggucucaaaaggguauuugagugcuuuaagaacuggaugguacaccagcguuauuacaaucgaacuguccaacauuaaggagaauaaaugcaacgguaccgacgccaaggugaaacuaaucaagcaggaacucgauaaguauaaaaaugcaguaacugagcugcagcuucugaugcagucuacacccgccaccggcucggggucagcuauagcaagcggaguggccgucuguaagguguugcaccucgagggcgaaguuaacaaaaucaagagugcucugcuguccacgaauaaagccguggucucucucagcaacgguguguccguauuaacuuuuaagguucuggaccuuaagaauuacauugauaaacaauugcugccuauccuaaacaagcagucaugcaguauuagcaauaucgagaccgugauagaguuccagcagaaaaacaauaggcuccuggaaauuacacgggaguuuucugucaacgcgggggugacuaccccaguguccacauauaugcuuaccaauucagaacuguugagccucaucaacgacaugccgauuacgaacgaucaaaagaaacugaugaguaauaacguccagaucguucgccagcagucuuacuccaucauguguauuauaaaggaggaaguguuagcauauguagugcaacugccccucuacggagucaucgacacuccuugcuggaaacuucauacaagcccacuguguaccacuaauacaaaggagggcucgaacauuugcuugacccgaacggaucguggcugguacugugacaaugccgggucuguguccuucuuuccccaggcugaaaccugcaagguucagucaaacagaguguucugugauacaaugaauaguagaacucugccuagcgaggucaaccucugcaauguggacaucuuuaacccaaaauaugauugcaagauaaugaccuccaaaacagacguaucuagcucaguuauuaccagucugggagccaucguguccuguuacgguaagacuaaaugcacagcaagcaauaagaacaggggcaucauuaagaccuucucuaaugggugugauuaugucucaaacaaaggaguggacacugucagugugggcaauacgcuuuacuauguuaacaagcaagaggguaaaagccuguacgugaagggggaacccaucauuaacuuuuaugacccuuugguauucccauccgaugaguuugacgcuucuauaucgcaggucaaugagaaaaucaaccagagccucgccuucauucggaaguccgaugaacuguuacacaaugugaacgcgggaaagucaacaaccaauaucaugaucacuaccauuauaaucguuauuaucgugauucugcuaagucucaucgccgucggccugcuuuuguacugcaaagcacgcucuacaccggugacccugagcaaggaccagcucuccggcauaaacaauaucgcuuucucaaacuga

SEQ ID NO: 3855 - RNA, 1608 nt, Artificial Sequence
  derived and/or modified CDS sequence (opt4) from HRSV(A2)__F_DSCav1_mut0
auggagcugcugauccugaaggccaacgccaucaccaccauccugaccgccgugaccuucugcuucgccagcggccagaacaucaccgaggaguucuaccagagcaccugcagcgccgugagcaagggcuaccugagcgcccugagaaccggcugguacaccagcgugaucaccaucgagcugagcaacaucaaggagaacaagugcaacggcaccgacgccaaggugaagcugaucaagcaggagcuggacaaguacaagaacgccgugaccgagcugcagcugcugaugcagagcacccccgccaccggcagcggcagcgccaucgccagcggcguggccgugugcaaggugcugcaccuggagggcgaggugaacaagaucaagagcgcccugcugagcaccaacaaggccguggugagccugagcaacggcgugagcgugcugaccuucaaggugcuggaccugaagaacuacaucgacaagcagcugcugcccauccugaacaagcagagcugcagcaucagcaacaucgagaccgugaucgaguuccagcagaagaacaacagacugcuggagaucaccagagaguucagcgugaacgccggcgugaccacccccgugagcaccuacaugcugaccaacagcgagcugcugagccugaucaacgacaugcccaucaccaacgaccagaagaagcugaugagcaacaacgugcagaucgugagacagcagagcuacagcaucaugugcaucaucaaggaggaggugcuggccuacguggugcagcugccccuguacggcgugaucgacacccccugcuggaagcugcacaccagcccccugugcaccaccaacaccaaggagggcagcaacaucugccugaccagaaccgacagaggcugguacugcgacaacgccggcagcgugagcuucuucccccaggccgagaccugcaaggugcagagcaacagaguguucugcgacaccaugaacagcagaacccugcccagcgaggugaaccugugcaacguggacaucuucaaccccaaguacgacugcaagaucaugaccagcaagaccgacgugagcagcagcgugaucaccagccugggcgccaucgugagcugcuacggcaagaccaagugcaccgccagcaacaagaacagaggcaucaucaagaccuucagcaacggcugcgacuacgugagcaacaagggcguggacaccgugagcgugggcaacacccuguacuacgugaacaagcaggagggcaagagccuguacgugaagggcgagcccaucaucaacuucuacgacccccugguguuccccagcgacgaguucgacgccagcaucagccaggugaacgagaagaucaaccagagccuggccuucaucagaaagagcgacgagcugcugcacaacgugaacgccggcaagagcaccaccaacaucaugaucaccaccaucaucaucgugaucaucgugauccugcugagccugaucgccgugggccugcugcuguacugcaaggccagaagcacccccgugacccugagcaaggaccagcugagcggcaucaacaacaucgccuucagcaacuga

SEQ ID NO: 3856 - RNA, 1608 nt, Artificial Sequence
  derived and/or modified CDS sequence (opt5) from HRSV(A2)__F_DSCav1_mut0
auggagcugcucauccugaaggccaacgcuauuaccacaauccuuacggccgugaccuucugcuuugcgagcggccagaauauuacagaagaguucuaccaauccaccuguucugcugucagcaaaggguaucuguccgcccucagaacaggaugguacaccucuguuaucacaauugaacugagcaacaucaaggagaauaaaugcaacggcaccgacgccaaggugaaacuuaucaagcaggaacuggauaaguauaaaaaugcugugacggagcuccagcugcugaugcaguccacccccgccacagggucuggaagcgcuauugccuccggcgucgcgguguguaagguucuccaccuggagggggaagugaacaaaaucaagagcgcccuucugucuaccaauaaagcugucgugucccucagcaacggaguuucugugcugacauuuaagguccuugaccugaagaauuacauugauaaacaacuccugccuauccugaacaagcaguccugcagcauuucuaauaucgagaccgugauugaguuccagcagaaaaacaaucggcuccuggaaaucacgcgcgaguuuuccgugaacgccggcgucacaaccccgguuagcacauauaugcuuaccaauuccgaacugcucucucugaucaacgacaugcccauuaccaacgaucaaaagaaacuuaugagcaauaacgugcagaucgugagacagcaguccuacagcauuauguguaucauuaaggaggaaguccuggcuuaugugguucaacucccucuguacggcgugaucgacacacccugcuggaaacugcauacgucuccucucuguaccacaaauaccaaggagggguccaacaucugccugacacggaccgaucgcggaugguacugugacaaugccggcagcgucucuuucuuuccccaggcggaaacgugcaaggugcagagcaacagaguuuucugugauacaaugaacuccagaacccugccuucugaggugaaucucugcaaugucgacauuuuuaacccgaaauaugauugcaagaucaugaccagcaaaacagacguguccagcucugucauuaccucccugggggccaucgugagcuguuacggaaagacaaaaugcacggcuucuaauaagaaccggggcauuaucaagaccuucuccaaugggugugauuauguuagcaacaaaggaguggacacagucuccgugggcaauacccuuuacuauguuaacaagcaagagggcaaaucucuguacgugaagggggaacccaucauuaacuuuuaugacccucucgucuuccccagcgaugaguuugacgccuccaucucucaggugaaugagaaaauuaaccagagccuggcuuucauccgcaaguccgaugaacugcuccacaaugugaacgccggaaagagcacaaccaauauuaugaucacgaccauuaucaucguuauuaucgucauucugcuuucucugaucgccgugggccuccugcuguacugcaaagcuagauccacaccugugacccuuagcaaggaccagcucucugggauuaacaauaucgcguucuccaacuga

SEQ ID NO: 3857 - RNA, 1608 nt, Artificial Sequence
  derived and/or modified CDS sequence (opt6) from HRSV(A2)__F_DSCav1_mut0
auggaacuacuaauacuaaaagccaaugcaauaacaaccauacuaaccgccguaacauuuuguuucgcaucaggucaaaacauaaccgaagaauuuuaucaaucaacaugcucagcaguaucaaaaggauacuuauccgcucuaagaacaggaugguacacaaguguaauuacaauagagcucucaaacauaaaagaaaacaaaugcaauggaacugacgcaaaaguuaaacuuauaaaacaagaacuagauaaauauaaaaaugcaguaaccgaauuacaacuccuaaugcaauccacaccugcuaccgguuccggaucagccauagcaucuggaguagccguaugcaaaguccuccaccuagaaggagaaguaaauaaaaucaaaucagcacuauuaucuaccaauaaagcaguugucucacuauccaauggcguaucaguacuaacauucaaaguauuagaccuuaaaaacuacauagacaaacaacuauuaccaauucugaacaaacaauccuguucaauaucaaacaucgaaacgguaauagaauuucaacaaaaaaauaacagauuacuugaaauaacaagagaauuuucaguaaaugcaggaguuacaacacccgucuccaccuacaugcucacaaauucagaauuauuaucacuuauaaacgacaugccaauaacuaacgaccaaaaaaaacuaaugucaaacaauguccaaauaguccgacaacaauccuacucaauaaugugcauuauaaaagaagaaguccuagccuacguuguccaacuacccuuauauggaguaauagauaccccaugcuggaaacuucauaccuccccccuaugcacaacaaacacaaaagaaggcucaaacaucugcuuaacacguacagaccgagguugguacugugauaacgcaggauccguaucauuuuucccacaagcagaaacaugcaaaguacaaucaaaccgcguuuuuugugacaccaugaacagcagaacccucccuucagaaguaaaccuaugcaacgucgauauauuuaacccaaaauacgauugcaaaauaaugacaucaaaaaccgaugucucaucuucaguaauaaccucucuaggagcaauagucucauguuacggaaaaacaaaaugcacagcaaguaauaaaaauagaggaauaauaaaaacauucucuaauggcugcgacuacguauccaauaaaggcguugacacaguauccguaggcaacacacucuacuauguuaacaaacaagaaggaaaaaguuuauacguuaaaggagaaccaauuauaaacuuuuacgacccacucguauucccaucugaugaauuugacgcaucaaucucacaaguaaaugaaaaaaucaaucagucccuugccuuuauaagaaaaucagaugaacuuuuacacaacguuaacgccggaaaaucaacaaccaauauaaugaucacaaccauaauaauaguuauaauuguaauuuuauuauccuuaauagccgucggacuacuacuauacugcaaagcaagaucuacacccguaacccuaucaaaagaccaacuaaguggaauaaauaacauugcauucucaaauuaa

SEQ ID NO: 3858 - RNA, 1608 nt, Artificial Sequence
  derived and/or modified CDS sequence (opt11) from HRSV(A2)__F_DSCav1_mut0
auggaacuccuaauacuaaaggcaaacgcaaucacuacaauucuaaccgccgugacauucugcuucgccuccggacaaaacaucaccgaagaauuuuaccaauccacaugcucggccgucaguaaaggcuaccucucggcucuccgaaccggcugguacaccuccgucaucaccaucgaacucuccaacaucaaagaaaacaaaugcaacggcaccgacgccaaagucaaacuaaucaaacaagaacucgacaaauacaaaaacgccgucacagaacuccaacuacuaaugcaaucaacacccgcuacaggaagcggcuccgccaucgccagcggcguagcugucugcaaaguccuccaccucgaaggugaagucaacaaaaucaaaucagcccuacucagcacaaacaaagccguuguaagccuauccaacggcgucuccguacuaacauucaaaguccuugaccucaagaacuacaucgacaaacaacuucucccaauccuaaacaaacaaagcugcucaauuuccaacaucgaaacaguaaucgaauuucaacaaaaaaacaaccgacuccucgaaaucacccgcgaauuuuccguuaacgccggcguuacaacccccgucuccaccuacaugcucaccaauuccgaacuacuaucacucauaaacgacaugccuaucacaaacgaccaaaaaaaacuaaugucaaacaauguccaaaucguccgccagcaaagcuauuccaucaugugcaucaucaaagaggaaguccucgccuacguaguccaacugccccucuacggcgucauugauacccccugcuggaaacuccacaccuccccccucugcaccacaaacaccaaagaagguuccaacaucugccuaacacgaaccgacagaggcugguacugcgacaacgccggcagcgucuccuucuucccccaagcagaaaccuguaaaguccagucuaaccgcgucuucugcgacacaaugaacucaagaacccuaccuuccgaaguaaaccucugcaacguagacaucuucaacccuaaauacgacugcaaaaucaugacuucaaaaacagacguaagcucuuccguaaucacuucccucggcgccaucguauccugcuacgguaaaaccaaaugcaccgccuccaacaaaaaccgagggaucauaaaaaccuucuccaacggcugcgacuacguaucuaacaaaggcgucgacaccgucuccgucggcaacacccucuauuacguaaacaaacaagagggcaaaucacuauacgucaaaggcgagccaaucauaaacuucuaugacccacucgucuucccuucagacgaauuugaugccagcaucagccaagucaacgaaaaaaucaaccaaucacucgccuucauccgcaaaagcgacgaacuccuucacaacgucaacgcaggcaaaucaaccaccaacaucaugaucaccaccaucaucaucgucaucaucguuauccuacucagccucaucgcaguuggucuucuccuuuacugcaaagcccgcuccacccccgucacccucaguaaagaccaacucagcggaaucaacaacauagcauucuccaacuaa

SEQ ID NO: 3859 - RNA, 1884 nt, Artificial Sequence
  mRNA product Design a-1 comprising derived and/or modified sequence from HRSV(A2)__F_DSCav1_mut0 (opt1)
gggagagucccgcagucggcguccagcggcucugcuuguucgugugugugucguugcaggccuuauucaagcuuaccauggagcugcucauccugaaggccaacgccaucaccaccauccugacggcggugaccuucugcuucgccagcggccagaacaucaccgaggaguucuaccaguccacgugcagcgccgucuccaagggguaccucagcgcccugcggaccggcugguacaccuccgugaucaccaucgagcugagcaacaucaaggagaacaagugcaacgggaccgacgccaaggugaagcucaucaagcaggagcuggacaaguacaagaacgcggucacggagcugcagcuccugaugcaguccaccccggcaaccggcuccggcuccgccaucgcgagcggcgucgccgugugcaaggugcugcaccucgagggggaggucaacaagaucaagagcgcccugcuguccaccaacaaggccguggugagccucuccaacggcgucagcgugcugaccuucaaggugcuggaccucaagaacuacaucgacaagcagcugcugcccauccugaacaagcagagcugcuccaucagcaacaucgagacggugaucgaguuccagcagaagaacaaccggcuccuggagaucacccgcgaguucagcgugaacgccggggucaccacccccguguccacguacaugcugaccaacagcgagcuccugucccugaucaacgacaugccgaucaccaacgaccagaagaagcucaugagcaacaacgugcagaucguccggcagcaguccuacagcaucaugugcaucaucaaggaggaggugcuggcguacgugguccagcugccccucuacggcgugaucgacacccccugcuggaagcugcacacgagcccccugugcaccaccaacaccaaggagggguccaacaucugccucacgcgcaccgaccggggcugguacugcgacaacgccggcagcgucuccuucuucccgcaggccgagaccugcaaggugcagagcaaccgcguguucugcgacaccaugaacucccggacgcugcccagcgagguaaaccucugcaacgucgacaucuucaaccccaaguacgacugcaagaucaugaccuccaagaccgacgugagcuccagcgugaucaccucccugggggccaucgucagcugcuacggcaagacgaagugcaccgccagcaacaagaaccgggggaucaucaagaccuucuccaacggcugcgacuacgugagcaacaagggcguggacaccguguccgucgggaacacccuguacuacgugaacaagcaggagggcaagagccucuacgugaagggggagcccaucaucaacuucuacgacccgcuggucuuccccuccgacgaguucgacgcgagcaucucccaggugaacgagaagaucaaccagagccuggccuucauccgcaaguccgacgagcugcuccacaacgugaacgccggcaagagcacgaccaacaucaugaucaccaccaucaucaucgucaucaucgugauccugcugucccucaucgccguggggcugcugcucuacugcaaggcccggagcacgcccgucacccuguccaaggaccagcugagcggcaucaacaacaucgcguucuccaacugaggacuagucccuguucccagagcccacuuuuuuuucuuuuuuugaaauaaaauagccugucuuucagaucuaaaaaaaaaaaaaaaaaaaaaaaaaaaaaaaaaaaaaaaaaaaaaaaaaaaaaaaaaaaaaaaaugcaucccccccccccccccccccccccccccccccaaaggcucuuuucagagccaccagaauu

SEQ ID NO: 3860 - RNA, 1884 nt, Artificial Sequence
  mRNA product Design a-1 comprising derived and/or modified sequence from HRSV(A2)__F_DSCav1_mut0 (opt1)
gggagagucccgcagucggcguccagcggcucugcuuguucgugugugugucguugcaggccuuauucaagcuuaccauggagcugcucauccugaaggccaacgccaucaccaccauccugacggcggugaccuucugcuucgccagcggccagaacaucaccgaggaguucuaccaguccacgugcagcgccgucuccaagggguaccucagcgcccugcgcaccggcugguacaccuccgugaucaccaucgagcugagcaacaucaaggagaacaagugcaacgggaccgacgccaaggugaagcucaucaagcaggagcuggacaaguacaagaacgcggucacggagcugcagcuccugaugcaguccacccccgccaccggcagcggguccgccaucgccagcggcguggcggugugcaagguccugcaccucgagggcgaggugaacaagaucaaguccgcccugcugagcaccaacaaggccguggucucccucagcaacgggguguccgugcugacguucaagguccuggaccucaagaacuacaucgacaagcagcugcugccgauccucaacaagcagagcugcuccaucagcaacaucgagaccgugaucgaguuccagcagaagaacaaccggcugcuggagaucacccgcgaguucuccgugaacgccggcgucaccacgcccgugagcaccuacaugcucaccaacagcgagcugcugucccucaucaacgacaugcccaucaccaacgaccagaagaagcugaugagcaacaacgugcagaucguccggcagcaguccuacagcaucaugugcaucaucaaggaggaggugcuggccuacgugguccagcucccccuguacggggugaucgacacgccgugcuggaagcugcacaccagcccccucugcaccaccaacacgaaggagggcuccaacaucugccugacccgcaccgaccgggggugguacugcgacaacgcgggcuccgugagcuucuucccccaggccgagaccugcaagguccaguccaaccgcguguucugcgacacgaugaacagccggacccuccccuccgaggucaaccugugcaacguggacaucuucaacccgaaguacgacugcaagaucaugaccagcaagaccgacguguccagcuccgucaucacgagccugggcgccaucguguccugcuacgggaagaccaagugcaccgccagcaacaagaaccggggcaucaucaagaccuucuccaacgggugcgacuacgugagcaacaagggcgucgacacggugagcgugggcaacacccucuacuacgucaacaagcaggaggggaagucccuguacgugaagggcgagcccaucaucaacuucuacgacccccugguguuccccagcgacgaguucgacgccuccaucagccaggucaacgagaagaucaaccagucccucgcguucauccgcaagagcgacgagcugcugcacaacgugaacgccgggaaguccaccaccaacaucaugaucaccacgaucaucaucgugaucaucgucauccuccugagccugaucgccgugggccuccugcuguacugcaaggcccgguccaccccggugacccugagcaaggaccagcucuccgggaucaacaacaucgccuucagcaacugaggacuagucccuguucccagagcccacuuuuuuuucuuuuuuugaaauaaaauagccugucuuucagaucuaaaaaaaaaaaaaaaaaaaaaaaaaaaaaaaaaaaaaaaaaaaaaaaaaaaaaaaaaaaaaaaaugcaucccccccccccccccccccccccccccccccaaaggcucuuuucagagccaccagaauu

SEQ ID NO: 3861 - RNA, 1884 nt, Artificial Sequence
  mRNA product Design a-1 comprising derived and/or modified sequence from HRSV(A2)__F_DSCav1_mut0 (opt2)
gggagagucccgcagucggcguccagcggcucugcuuguucgugugugugucguugcaggccuuauucaagcuuaccauggagcuccucauccucaaggccaacgccaucaccaccauccucaccgccgucaccuucugcuucgccuccggccagaacaucaccgaggaguucuaccaguccaccugcuccgccgucuccaagggcuaccucuccgcccuccgcaccggcugguacaccuccgucaucaccaucgagcucuccaacaucaaggagaacaagugcaacggcaccgacgccaaggucaagcucaucaagcaggagcucgacaaguacaagaacgccgucaccgagcuccagcuccucaugcaguccacccccgccaccggcuccggcuccgccaucgccuccggcgucgccgucugcaagguccuccaccucgagggcgaggucaacaagaucaaguccgcccuccucuccaccaacaaggccgucgucucccucuccaacggcgucuccguccucaccuucaagguccucgaccucaagaacuacaucgacaagcagcuccuccccauccucaacaagcaguccugcuccaucuccaacaucgagaccgucaucgaguuccagcagaagaacaaccgccuccucgagaucacccgcgaguucuccgucaacgccggcgucaccacccccgucuccaccuacaugcucaccaacuccgagcuccucucccucaucaacgacaugcccaucaccaacgaccagaagaagcucauguccaacaacguccagaucguccgccagcaguccuacuccaucaugugcaucaucaaggaggagguccucgccuacgucguccagcucccccucuacggcgucaucgacacccccugcuggaagcuccacaccuccccccucugcaccaccaacaccaaggagggcuccaacaucugccucacccgcaccgaccgcggcugguacugcgacaacgccggcuccgucuccuucuucccccaggccgagaccugcaagguccaguccaaccgcgucuucugcgacaccaugaacucccgcacccuccccuccgaggucaaccucugcaacgucgacaucuucaaccccaaguacgacugcaagaucaugaccuccaagaccgacgucuccuccuccgucaucaccucccucggcgccaucgucuccugcuacggcaagaccaagugcaccgccuccaacaagaaccgcggcaucaucaagaccuucuccaacggcugcgacuacgucuccaacaagggcgucgacaccgucuccgucggcaacacccucuacuacgucaacaagcaggagggcaagucccucuacgucaagggcgagcccaucaucaacuucuacgacccccucgucuuccccuccgacgaguucgacgccuccaucucccaggucaacgagaagaucaaccagucccucgccuucauccgcaaguccgacgagcuccuccacaacgucaacgccggcaaguccaccaccaacaucaugaucaccaccaucaucaucgucaucaucgucauccuccucucccucaucgccgucggccuccuccucuacugcaaggcccgcuccacccccgucacccucuccaaggaccagcucuccggcaucaacaacaucgccuucuccaacugaggacuagucccuguucccagagcccacuuuuuuuucuuuuuuugaaauaaaauagccugucuuucagaucuaaaaaaaaaaaaaaaaaaaaaaaaaaaaaaaaaaaaaaaaaaaaaaaaaaaaaaaaaaaaaaaaugcaucccccccccccccccccccccccccccccccaaaggcucuuuucagagccaccagaauu

SEQ ID NO: 3862 - RNA, 1884 nt, Artificial Sequence
  mRNA product Design a-1 comprising derived and/or modified sequence from HRSV(A2)__F_DSCav1_mut0 (opt3)
gggagagucccgcagucggcguccagcggcucugcuuguucgugugugugucguugcaggccuuauucaagcuuaccauggagcugcucauccuuaaggccaacgcuauuaccacaauacugacugcagugacguucugcuuugccagcggccagaauaucaccgaagaguucuaccaauccacauguucugcggucucaaaaggguauuugagugcuuuaagaacuggaugguacaccagcguuauuacaaucgaacuguccaacauuaaggagaauaaaugcaacgguaccgacgccaaggugaaacuaaucaagcaggaacucgauaaguauaaaaaugcaguaacugagcugcagcuucugaugcagucuacacccgccaccggcucggggucagcuauagcaagcggaguggccgucuguaagguguugcaccucgagggcgaaguuaacaaaaucaagagugcucugcuguccacgaauaaagccguggucucucucagcaacgguguguccguauuaacuuuuaagguucuggaccuuaagaauuacauugauaaacaauugcugccuauccuaaacaagcagucaugcaguauuagcaauaucgagaccgugauagaguuccagcagaaaaacaauaggcuccuggaaauuacacgggaguuuucugucaacgcgggggugacuaccccaguguccacauauaugcuuaccaauucagaacuguugagccucaucaacgacaugccgauuacgaacgaucaaaagaaacugaugaguaauaacguccagaucguucgccagcagucuuacuccaucauguguauuauaaaggaggaaguguuagcauauguagugcaacugccccucuacggagucaucgacacuccuugcuggaaacuucauacaagcccacuguguaccacuaauacaaaggagggcucgaacauuugcuugacccgaacggaucguggcugguacugugacaaugccgggucuguguccuucuuuccccaggcugaaaccugcaagguucagucaaacagaguguucugugauacaaugaauaguagaacucugccuagcgaggucaaccucugcaauguggacaucuuuaacccaaaauaugauugcaagauaaugaccuccaaaacagacguaucuagcucaguuauuaccagucugggagccaucguguccuguuacgguaagacuaaaugcacagcaagcaauaagaacaggggcaucauuaagaccuucucuaaugggugugauuaugucucaaacaaaggaguggacacugucagugugggcaauacgcuuuacuauguuaacaagcaagaggguaaaagccuguacgugaagggggaacccaucauuaacuuuuaugacccuuugguauucccauccgaugaguuugacgcuucuauaucgcaggucaaugagaaaaucaaccagagccucgccuucauucggaaguccgaugaacuguuacacaaugugaacgcgggaaagucaacaaccaauaucaugaucacuaccauuauaaucguuauuaucgugauucugcuaagucucaucgccgucggccugcuuuuguacugcaaagcacgcucuacaccggugacccugagcaaggaccagcucuccggcauaaacaauaucgcuuucucaaacugaggacuagucccuguucccagagcccacuuuuuuuucuuuuuuugaaauaaaauagccugucuuucagaucuaaaaaaaaaaaaaaaaaaaaaaaaaaaaaaaaaaaaaaaaaaaaaaaaaaaaaaaaaaaaaaaaugcaucccccccccccccccccccccccccccccccaaaggcucuuuucagagccaccagaauu

SEQ ID NO: 3863 - RNA, 1884 nt, Artificial Sequence
  mRNA product Design a-1 comprising derived and/or modified sequence from HRSV(A2)__F_DSCav1_mut0 (opt4)
gggagagucccgcagucggcguccagcggcucugcuuguucgugugugugucguugcaggccuuauucaagcuuaccauggagcugcugauccugaaggccaacgccaucaccaccauccugaccgccgugaccuucugcuucgccagcggccagaacaucaccgaggaguucuaccagagcaccugcagcgccgugagcaagggcuaccugagcgcccugagaaccggcugguacaccagcgugaucaccaucgagcugagcaacaucaaggagaacaagugcaacggcaccgacgccaaggugaagcugaucaagcaggagcuggacaaguacaagaacgccgugaccgagcugcagcugcugaugcagagcacccccgccaccggcagcggcagcgccaucgccagcggcguggccgugugcaaggugcugcaccuggagggcgaggugaacaagaucaagagcgcccugcugagcaccaacaaggccguggugagccugagcaacggcgugagcgugcugaccuucaaggugcuggaccugaagaacuacaucgacaagcagcugcugcccauccugaacaagcagagcugcagcaucagcaacaucgagaccgugaucgaguuccagcagaagaacaacagacugcuggagaucaccagagaguucagcgugaacgccggcgugaccacccccgugagcaccuacaugcugaccaacagcgagcugcugagccugaucaacgacaugcccaucaccaacgaccagaagaagcugaugagcaacaacgugcagaucgugagacagcagagcuacagcaucaugugcaucaucaaggaggaggugcuggccuacguggugcagcugccccuguacggcgugaucgacacccccugcuggaagcugcacaccagcccccugugcaccaccaacaccaaggagggcagcaacaucugccugaccagaaccgacagaggcugguacugcgacaacgccggcagcgugagcuucuucccccaggccgagaccugcaaggugcagagcaacagaguguucugcgacaccaugaacagcagaacccugcccagcgaggugaaccugugcaacguggacaucuucaaccccaaguacgacugcaagaucaugaccagcaagaccgacgugagcagcagcgugaucaccagccugggcgccaucgugagcugcuacggcaagaccaagugcaccgccagcaacaagaacagaggcaucaucaagaccuucagcaacggcugcgacuacgugagcaacaagggcguggacaccgugagcgugggcaacacccuguacuacgugaacaagcaggagggcaagagccuguacgugaagggcgagcccaucaucaacuucuacgacccccugguguuccccagcgacgaguucgacgccagcaucagccaggugaacgagaagaucaaccagagccuggccuucaucagaaagagcgacgagcugcugcacaacgugaacgccggcaagagcaccaccaacaucaugaucaccaccaucaucaucgugaucaucgugauccugcugagccugaucgccgugggccugcugcuguacugcaaggccagaagcacccccgugacccugagcaaggaccagcugagcggcaucaacaacaucgccuucagcaacugaggacuagucccuguucccagagcccacuuuuuuuucuuuuuuugaaauaaaauagccugucuuucagaucuaaaaaaaaaaaaaaaaaaaaaaaaaaaaaaaaaaaaaaaaaaaaaaaaaaaaaaaaaaaaaaaaugcaucccccccccccccccccccccccccccccccaaaggcucuuuucagagccaccagaauu

SEQ ID NO: 3864 - RNA, 1884 nt, Artificial Sequence
  mRNA product Design a-1 comprising derived and/or modified sequence from HRSV(A2)__F_DSCav1_mut0 (opt5)
gggagagucccgcagucggcguccagcggcucugcuuguucgugugugugucguugcaggccuuauucaagcuuaccauggagcugcucauccugaaggccaacgcuauuaccacaauccuuacggccgugaccuucugcuuugcgagcggccagaauauuacagaagaguucuaccaauccaccuguucugcugucagcaaaggguaucuguccgcccucagaacaggaugguacaccucuguuaucacaauugaacugagcaacaucaaggagaauaaaugcaacggcaccgacgccaaggugaaacuuaucaagcaggaacuggauaaguauaaaaaugcugugacggagcuccagcugcugaugcaguccacccccgccacagggucuggaagcgcuauugccuccggcgucgcgguguguaagguucuccaccuggagggggaagugaacaaaaucaagagcgcccuucugucuaccaauaaagcugucgugucccucagcaacggaguuucugugcugacauuuaagguccuugaccugaagaauuacauugauaaacaacuccugccuauccugaacaagcaguccugcagcauuucuaauaucgagaccgugauugaguuccagcagaaaaacaaucggcuccuggaaaucacgcgcgaguuuuccgugaacgccggcgucacaaccccgguuagcacauauaugcuuaccaauuccgaacugcucucucugaucaacgacaugcccauuaccaacgaucaaaagaaacuuaugagcaauaacgugcagaucgugagacagcaguccuacagcauuauguguaucauuaaggaggaaguccuggcuuaugugguucaacucccucuguacggcgugaucgacacacccugcuggaaacugcauacgucuccucucuguaccacaaauaccaaggagggguccaacaucugccugacacggaccgaucgcggaugguacugugacaaugccggcagcgucucuuucuuuccccaggcggaaacgugcaaggugcagagcaacagaguuuucugugauacaaugaacuccagaacccugccuucugaggugaaucucugcaaugucgacauuuuuaacccgaaauaugauugcaagaucaugaccagcaaaacagacguguccagcucugucauuaccucccugggggccaucgugagcuguuacggaaagacaaaaugcacggcuucuaauaagaaccggggcauuaucaagaccuucuccaaugggugugauuauguuagcaacaaaggaguggacacagucuccgugggcaauacccuuuacuauguuaacaagcaagagggcaaaucucuguacgugaagggggaacccaucauuaacuuuuaugacccucucgucuuccccagcgaugaguuugacgccuccaucucucaggugaaugagaaaauuaaccagagccuggcuuucauccgcaaguccgaugaacugcuccacaaugugaacgccggaaagagcacaaccaauauuaugaucacgaccauuaucaucguuauuaucgucauucugcuuucucugaucgccgugggccuccugcuguacugcaaagcuagauccacaccugugacccuuagcaaggaccagcucucugggauuaacaauaucgcguucuccaacugaggacuagucccuguucccagagcccacuuuuuuuucuuuuuuugaaauaaaauagccugucuuucagaucuaaaaaaaaaaaaaaaaaaaaaaaaaaaaaaaaaaaaaaaaaaaaaaaaaaaaaaaaaaaaaaaaugcaucccccccccccccccccccccccccccccccaaaggcucuuuucagagccaccagaauu

SEQ ID NO: 3865 - RNA, 1884 nt, Artificial Sequence
  mRNA product Design a-1 comprising derived and/or modified sequence from HRSV(A2)__F_DSCav1_mut0 (opt6)
gggagagucccgcagucggcguccagcggcucugcuuguucgugugugugucguugcaggccuuauucaagcuuaccauggaacuacuaauacuaaaagccaaugcaauaacaaccauacuaaccgccguaacauuuuguuucgcaucaggucaaaacauaaccgaagaauuuuaucaaucaacaugcucagcaguaucaaaaggauacuuauccgcucuaagaacaggaugguacacaaguguaauuacaauagagcucucaaacauaaaagaaaacaaaugcaauggaacugacgcaaaaguuaaacuuauaaaacaagaacuagauaaauauaaaaaugcaguaaccgaauuacaacuccuaaugcaauccacaccugcuaccgguuccggaucagccauagcaucuggaguagccguaugcaaaguccuccaccuagaaggagaaguaaauaaaaucaaaucagcacuauuaucuaccaauaaagcaguugucucacuauccaauggcguaucaguacuaacauucaaaguauuagaccuuaaaaacuacauagacaaacaacuauuaccaauucugaacaaacaauccuguucaauaucaaacaucgaaacgguaauagaauuucaacaaaaaaauaacagauuacuugaaauaacaagagaauuuucaguaaaugcaggaguuacaacacccgucuccaccuacaugcucacaaauucagaauuauuaucacuuauaaacgacaugccaauaacuaacgaccaaaaaaaacuaaugucaaacaauguccaaauaguccgacaacaauccuacucaauaaugugcauuauaaaagaagaaguccuagccuacguuguccaacuacccuuauauggaguaauagauaccccaugcuggaaacuucauaccuccccccuaugcacaacaaacacaaaagaaggcucaaacaucugcuuaacacguacagaccgagguugguacugugauaacgcaggauccguaucauuuuucccacaagcagaaacaugcaaaguacaaucaaaccgcguuuuuugugacaccaugaacagcagaacccucccuucagaaguaaaccuaugcaacgucgauauauuuaacccaaaauacgauugcaaaauaaugacaucaaaaaccgaugucucaucuucaguaauaaccucucuaggagcaauagucucauguuacggaaaaacaaaaugcacagcaaguaauaaaaauagaggaauaauaaaaacauucucuaauggcugcgacuacguauccaauaaaggcguugacacaguauccguaggcaacacacucuacuauguuaacaaacaagaaggaaaaaguuuauacguuaaaggagaaccaauuauaaacuuuuacgacccacucguauucccaucugaugaauuugacgcaucaaucucacaaguaaaugaaaaaaucaaucagucccuugccuuuauaagaaaaucagaugaacuuuuacacaacguuaacgccggaaaaucaacaaccaauauaaugaucacaaccauaauaauaguuauaauuguaauuuuauuauccuuaauagccgucggacuacuacuauacugcaaagcaagaucuacacccguaacccuaucaaaagaccaacuaaguggaauaaauaacauugcauucucaaauuaaggacuagucccuguucccagagcccacuuuuuuuucuuuuuuugaaauaaaauagccugucuuucagaucuaaaaaaaaaaaaaaaaaaaaaaaaaaaaaaaaaaaaaaaaaaaaaaaaaaaaaaaaaaaaaaaaugcaucccccccccccccccccccccccccccccccaaaggcucuuuucagagccaccagaauu

SEQ ID NO: 3866 - RNA, 1884 nt, Artificial Sequence
  mRNA product Design a-1 comprising derived and/or modified sequence from HRSV(A2)__F_DSCav1_mut0 (opt11)
gggagagucccgcagucggcguccagcggcucugcuuguucgugugugugucguugcaggccuuauucaagcuuaccauggaacuccuaauacuaaaggcaaacgcaaucacuacaauucuaaccgccgugacauucugcuucgccuccggacaaaacaucaccgaagaauuuuaccaauccacaugcucggccgucaguaaaggcuaccucucggcucuccgaaccggcugguacaccuccgucaucaccaucgaacucuccaacaucaaagaaaacaaaugcaacggcaccgacgccaaagucaaacuaaucaaacaagaacucgacaaauacaaaaacgccgucacagaacuccaacuacuaaugcaaucaacacccgcuacaggaagcggcuccgccaucgccagcggcguagcugucugcaaaguccuccaccucgaaggugaagucaacaaaaucaaaucagcccuacucagcacaaacaaagccguuguaagccuauccaacggcgucuccguacuaacauucaaaguccuugaccucaagaacuacaucgacaaacaacuucucccaauccuaaacaaacaaagcugcucaauuuccaacaucgaaacaguaaucgaauuucaacaaaaaaacaaccgacuccucgaaaucacccgcgaauuuuccguuaacgccggcguuacaacccccgucuccaccuacaugcucaccaauuccgaacuacuaucacucauaaacgacaugccuaucacaaacgaccaaaaaaaacuaaugucaaacaauguccaaaucguccgccagcaaagcuauuccaucaugugcaucaucaaagaggaaguccucgccuacguaguccaacugccccucuacggcgucauugauacccccugcuggaaacuccacaccuccccccucugcaccacaaacaccaaagaagguuccaacaucugccuaacacgaaccgacagaggcugguacugcgacaacgccggcagcgucuccuucuucccccaagcagaaaccuguaaaguccagucuaaccgcgucuucugcgacacaaugaacucaagaacccuaccuuccgaaguaaaccucugcaacguagacaucuucaacccuaaauacgacugcaaaaucaugacuucaaaaacagacguaagcucuuccguaaucacuucccucggcgccaucguauccugcuacgguaaaaccaaaugcaccgccuccaacaaaaaccgagggaucauaaaaaccuucuccaacggcugcgacuacguaucuaacaaaggcgucgacaccgucuccgucggcaacacccucuauuacguaaacaaacaagagggcaaaucacuauacgucaaaggcgagccaaucauaaacuucuaugacccacucgucuucccuucagacgaauuugaugccagcaucagccaagucaacgaaaaaaucaaccaaucacucgccuucauccgcaaaagcgacgaacuccuucacaacgucaacgcaggcaaaucaaccaccaacaucaugaucaccaccaucaucaucgucaucaucguuauccuacucagccucaucgcaguuggucuucuccuuuacugcaaagcccgcuccacccccgucacccucaguaaagaccaacucagcggaaucaacaacauagcauucuccaacuaaggacuagucccuguucccagagcccacuuuuuuuucuuuuuuugaaauaaaauagccugucuuucagaucuaaaaaaaaaaaaaaaaaaaaaaaaaaaaaaaaaaaaaaaaaaaaaaaaaaaaaaaaaaaaaaaaugcaucccccccccccccccccccccccccccccccaaaggcucuuuucagagccaccagaauu

SEQ ID NO: 3867 - RNA, 1903 nt, Artificial Sequence
  mRNA product Design a-2 comprising derived and/or modified sequence from HRSV(A2)__F_DSCav1_mut0 (opt1)
gggagaguccgcucagccagguugcagaagcggcuuagcguguguccuaaucuucucucugcguguagguaggccugugccgcaaacaagcuuaccauggagcugcucauccugaaggccaacgccaucaccaccauccugacggcggugaccuucugcuucgccagcggccagaacaucaccgaggaguucuaccaguccacgugcagcgccgucuccaagggguaccucagcgcccugcggaccggcugguacaccuccgugaucaccaucgagcugagcaacaucaaggagaacaagugcaacgggaccgacgccaaggugaagcucaucaagcaggagcuggacaaguacaagaacgcggucacggagcugcagcuccugaugcaguccaccccggcaaccggcuccggcuccgccaucgcgagcggcgucgccgugugcaaggugcugcaccucgagggggaggucaacaagaucaagagcgcccugcuguccaccaacaaggccguggugagccucuccaacggcgucagcgugcugaccuucaaggugcuggaccucaagaacuacaucgacaagcagcugcugcccauccugaacaagcagagcugcuccaucagcaacaucgagacggugaucgaguuccagcagaagaacaaccggcuccuggagaucacccgcgaguucagcgugaacgccggggucaccacccccguguccacguacaugcugaccaacagcgagcuccugucccugaucaacgacaugccgaucaccaacgaccagaagaagcucaugagcaacaacgugcagaucguccggcagcaguccuacagcaucaugugcaucaucaaggaggaggugcuggcguacgugguccagcugccccucuacggcgugaucgacacccccugcuggaagcugcacacgagcccccugugcaccaccaacaccaaggagggguccaacaucugccucacgcgcaccgaccggggcugguacugcgacaacgccggcagcgucuccuucuucccgcaggccgagaccugcaaggugcagagcaaccgcguguucugcgacaccaugaacucccggacgcugcccagcgagguaaaccucugcaacgucgacaucuucaaccccaaguacgacugcaagaucaugaccuccaagaccgacgugagcuccagcgugaucaccucccugggggccaucgucagcugcuacggcaagacgaagugcaccgccagcaacaagaaccgggggaucaucaagaccuucuccaacggcugcgacuacgugagcaacaagggcguggacaccguguccgucgggaacacccuguacuacgugaacaagcaggagggcaagagccucuacgugaagggggagcccaucaucaacuucuacgacccgcuggucuuccccuccgacgaguucgacgcgagcaucucccaggugaacgagaagaucaaccagagccuggccuucauccgcaaguccgacgagcugcuccacaacgugaacgccggcaagagcacgaccaacaucaugaucaccaccaucaucaucgucaucaucgugauccugcugucccucaucgccguggggcugcugcucuacugcaaggcccggagcacgcccgucacccuguccaaggaccagcugagcggcaucaacaacaucgcguucuccaacugaggacuagucccuguucccagagcccacuuuuuuuucuuuuuuugaaauaaaauagccugucuuucagaucuaaaaaaaaaaaaaaaaaaaaaaaaaaaaaaaaaaaaaaaaaaaaaaaaaaaaaaaaaaaaaaaaugcaucccccccccccccccccccccccccccccccaaaggcucuuuucagagccaccagaauu

SEQ ID NO: 3868 - RNA, 1903 nt, Artificial Sequence
  mRNA product Design a-2 comprising derived and/or modified sequence from HRSV(A2)__F_DSCav1_mut0 (opt1)
gggagaguccgcucagccagguugcagaagcggcuuagcguguguccuaaucuucucucugcguguagguaggccugugccgcaaacaagcuuaccauggagcugcucauccugaaggccaacgccaucaccaccauccugacggcggugaccuucugcuucgccagcggccagaacaucaccgaggaguucuaccaguccacgugcagcgccgucuccaagggguaccucagcgcccugcgcaccggcugguacaccuccgugaucaccaucgagcugagcaacaucaaggagaacaagugcaacgggaccgacgccaaggugaagcucaucaagcaggagcuggacaaguacaagaacgcggucacggagcugcagcuccugaugcaguccacccccgccaccggcagcggguccgccaucgccagcggcguggcggugugcaagguccugcaccucgagggcgaggugaacaagaucaaguccgcccugcugagcaccaacaaggccguggucucccucagcaacgggguguccgugcugacguucaagguccuggaccucaagaacuacaucgacaagcagcugcugccgauccucaacaagcagagcugcuccaucagcaacaucgagaccgugaucgaguuccagcagaagaacaaccggcugcuggagaucacccgcgaguucuccgugaacgccggcgucaccacgcccgugagcaccuacaugcucaccaacagcgagcugcugucccucaucaacgacaugcccaucaccaacgaccagaagaagcugaugagcaacaacgugcagaucguccggcagcaguccuacagcaucaugugcaucaucaaggaggaggugcuggccuacgugguccagcucccccuguacggggugaucgacacgccgugcuggaagcugcacaccagcccccucugcaccaccaacacgaaggagggcuccaacaucugccugacccgcaccgaccgggggugguacugcgacaacgcgggcuccgugagcuucuucccccaggccgagaccugcaagguccaguccaaccgcguguucugcgacacgaugaacagccggacccuccccuccgaggucaaccugugcaacguggacaucuucaacccgaaguacgacugcaagaucaugaccagcaagaccgacguguccagcuccgucaucacgagccugggcgccaucguguccugcuacgggaagaccaagugcaccgccagcaacaagaaccggggcaucaucaagaccuucuccaacgggugcgacuacgugagcaacaagggcgucgacacggugagcgugggcaacacccucuacuacgucaacaagcaggaggggaagucccuguacgugaagggcgagcccaucaucaacuucuacgacccccugguguuccccagcgacgaguucgacgccuccaucagccaggucaacgagaagaucaaccagucccucgcguucauccgcaagagcgacgagcugcugcacaacgugaacgccgggaaguccaccaccaacaucaugaucaccacgaucaucaucgugaucaucgucauccuccugagccugaucgccgugggccuccugcuguacugcaaggcccgguccaccccggugacccugagcaaggaccagcucuccgggaucaacaacaucgccuucagcaacugaggacuagucccuguucccagagcccacuuuuuuuucuuuuuuugaaauaaaauagccugucuuucagaucuaaaaaaaaaaaaaaaaaaaaaaaaaaaaaaaaaaaaaaaaaaaaaaaaaaaaaaaaaaaaaaaaugcaucccccccccccccccccccccccccccccccaaaggcucuuuucagagccaccagaauu

SEQ ID NO: 3869 - RNA, 1903 nt, Artificial Sequence
  mRNA product Design a-2 comprising derived and/or modified sequence from HRSV(A2)__F_DSCav1_mut0 (opt2)
gggagaguccgcucagccagguugcagaagcggcuuagcguguguccuaaucuucucucugcguguagguaggccugugccgcaaacaagcuuaccauggagcuccucauccucaaggccaacgccaucaccaccauccucaccgccgucaccuucugcuucgccuccggccagaacaucaccgaggaguucuaccaguccaccugcuccgccgucuccaagggcuaccucuccgcccuccgcaccggcugguacaccuccgucaucaccaucgagcucuccaacaucaaggagaacaagugcaacggcaccgacgccaaggucaagcucaucaagcaggagcucgacaaguacaagaacgccgucaccgagcuccagcuccucaugcaguccacccccgccaccggcuccggcuccgccaucgccuccggcgucgccgucugcaagguccuccaccucgagggcgaggucaacaagaucaaguccgcccuccucuccaccaacaaggccgucgucucccucuccaacggcgucuccguccucaccuucaagguccucgaccucaagaacuacaucgacaagcagcuccuccccauccucaacaagcaguccugcuccaucuccaacaucgagaccgucaucgaguuccagcagaagaacaaccgccuccucgagaucacccgcgaguucuccgucaacgccggcgucaccacccccgucuccaccuacaugcucaccaacuccgagcuccucucccucaucaacgacaugcccaucaccaacgaccagaagaagcucauguccaacaacguccagaucguccgccagcaguccuacuccaucaugugcaucaucaaggaggagguccucgccuacgucguccagcucccccucuacggcgucaucgacacccccugcuggaagcuccacaccuccccccucugcaccaccaacaccaaggagggcuccaacaucugccucacccgcaccgaccgcggcugguacugcgacaacgccggcuccgucuccuucuucccccaggccgagaccugcaagguccaguccaaccgcgucuucugcgacaccaugaacucccgcacccuccccuccgaggucaaccucugcaacgucgacaucuucaaccccaaguacgacugcaagaucaugaccuccaagaccgacgucuccuccuccgucaucaccucccucggcgccaucgucuccugcuacggcaagaccaagugcaccgccuccaacaagaaccgcggcaucaucaagaccuucuccaacggcugcgacuacgucuccaacaagggcgucgacaccgucuccgucggcaacacccucuacuacgucaacaagcaggagggcaagucccucuacgucaagggcgagcccaucaucaacuucuacgacccccucgucuuccccuccgacgaguucgacgccuccaucucccaggucaacgagaagaucaaccagucccucgccuucauccgcaaguccgacgagcuccuccacaacgucaacgccggcaaguccaccaccaacaucaugaucaccaccaucaucaucgucaucaucgucauccuccucucccucaucgccgucggccuccuccucuacugcaaggcccgcuccacccccgucacccucuccaaggaccagcucuccggcaucaacaacaucgccuucuccaacugaggacuagucccuguucccagagcccacuuuuuuuucuuuuuuugaaauaaaauagccugucuuucagaucuaaaaaaaaaaaaaaaaaaaaaaaaaaaaaaaaaaaaaaaaaaaaaaaaaaaaaaaaaaaaaaaaugcaucccccccccccccccccccccccccccccccaaaggcucuuuucagagccaccagaauu

SEQ ID NO: 3870 - RNA, 1903 nt, Artificial Sequence
  mRNA product Design a-2 comprising derived and/or modified sequence from HRSV(A2)__F_DSCav1_mut0 (opt3)
gggagaguccgcucagccagguugcagaagcggcuuagcguguguccuaaucuucucucugcguguagguaggccugugccgcaaacaagcuuaccauggagcugcucauccuuaaggccaacgcuauuaccacaauacugacugcagugacguucugcuuugccagcggccagaauaucaccgaagaguucuaccaauccacauguucugcggucucaaaaggguauuugagugcuuuaagaacuggaugguacaccagcguuauuacaaucgaacuguccaacauuaaggagaauaaaugcaacgguaccgacgccaaggugaaacuaaucaagcaggaacucgauaaguauaaaaaugcaguaacugagcugcagcuucugaugcagucuacacccgccaccggcucggggucagcuauagcaagcggaguggccgucuguaagguguugcaccucgagggcgaaguuaacaaaaucaagagugcucugcuguccacgaauaaagccguggucucucucagcaacgguguguccguauuaacuuuuaagguucuggaccuuaagaauuacauugauaaacaauugcugccuauccuaaacaagcagucaugcaguauuagcaauaucgagaccgugauagaguuccagcagaaaaacaauaggcuccuggaaauuacacgggaguuuucugucaacgcgggggugacuaccccaguguccacauauaugcuuaccaauucagaacuguugagccucaucaacgacaugccgauuacgaacgaucaaaagaaacugaugaguaauaacguccagaucguucgccagcagucuuacuccaucauguguauuauaaaggaggaaguguuagcauauguagugcaacugccccucuacggagucaucgacacuccuugcuggaaacuucauacaagcccacuguguaccacuaauacaaaggagggcucgaacauuugcuugacccgaacggaucguggcugguacugugacaaugccgggucuguguccuucuuuccccaggcugaaaccugcaagguucagucaaacagaguguucugugauacaaugaauaguagaacucugccuagcgaggucaaccucugcaauguggacaucuuuaacccaaaauaugauugcaagauaaugaccuccaaaacagacguaucuagcucaguuauuaccagucugggagccaucguguccuguuacgguaagacuaaaugcacagcaagcaauaagaacaggggcaucauuaagaccuucucuaaugggugugauuaugucucaaacaaaggaguggacacugucagugugggcaauacgcuuuacuauguuaacaagcaagaggguaaaagccuguacgugaagggggaacccaucauuaacuuuuaugacccuuugguauucccauccgaugaguuugacgcuucuauaucgcaggucaaugagaaaaucaaccagagccucgccuucauucggaaguccgaugaacuguuacacaaugugaacgcgggaaagucaacaaccaauaucaugaucacuaccauuauaaucguuauuaucgugauucugcuaagucucaucgccgucggccugcuuuuguacugcaaagcacgcucuacaccggugacccugagcaaggaccagcucuccggcauaaacaauaucgcuuucucaaacugaggacuagucccuguucccagagcccacuuuuuuuucuuuuuuugaaauaaaauagccugucuuucagaucuaaaaaaaaaaaaaaaaaaaaaaaaaaaaaaaaaaaaaaaaaaaaaaaaaaaaaaaaaaaaaaaaugcaucccccccccccccccccccccccccccccccaaaggcucuuuucagagccaccagaauu

SEQ ID NO: 3871 - RNA, 1903 nt, Artificial Sequence
  mRNA product Design a-2 comprising derived and/or modified sequence from HRSV(A2)__F_DSCav1_mut0 (opt4)
gggagaguccgcucagccagguugcagaagcggcuuagcguguguccuaaucuucucucugcguguagguaggccugugccgcaaacaagcuuaccauggagcugcugauccugaaggccaacgccaucaccaccauccugaccgccgugaccuucugcuucgccagcggccagaacaucaccgaggaguucuaccagagcaccugcagcgccgugagcaagggcuaccugagcgcccugagaaccggcugguacaccagcgugaucaccaucgagcugagcaacaucaaggagaacaagugcaacggcaccgacgccaaggugaagcugaucaagcaggagcuggacaaguacaagaacgccgugaccgagcugcagcugcugaugcagagcacccccgccaccggcagcggcagcgccaucgccagcggcguggccgugugcaaggugcugcaccuggagggcgaggugaacaagaucaagagcgcccugcugagcaccaacaaggccguggugagccugagcaacggcgugagcgugcugaccuucaaggugcuggaccugaagaacuacaucgacaagcagcugcugcccauccugaacaagcagagcugcagcaucagcaacaucgagaccgugaucgaguuccagcagaagaacaacagacugcuggagaucaccagagaguucagcgugaacgccggcgugaccacccccgugagcaccuacaugcugaccaacagcgagcugcugagccugaucaacgacaugcccaucaccaacgaccagaagaagcugaugagcaacaacgugcagaucgugagacagcagagcuacagcaucaugugcaucaucaaggaggaggugcuggccuacguggugcagcugccccuguacggcgugaucgacacccccugcuggaagcugcacaccagcccccugugcaccaccaacaccaaggagggcagcaacaucugccugaccagaaccgacagaggcugguacugcgacaacgccggcagcgugagcuucuucccccaggccgagaccugcaaggugcagagcaacagaguguucugcgacaccaugaacagcagaacccugcccagcgaggugaaccugugcaacguggacaucuucaaccccaaguacgacugcaagaucaugaccagcaagaccgacgugagcagcagcgugaucaccagccugggcgccaucgugagcugcuacggcaagaccaagugcaccgccagcaacaagaacagaggcaucaucaagaccuucagcaacggcugcgacuacgugagcaacaagggcguggacaccgugagcgugggcaacacccuguacuacgugaacaagcaggagggcaagagccuguacgugaagggcgagcccaucaucaacuucuacgacccccugguguuccccagcgacgaguucgacgccagcaucagccaggugaacgagaagaucaaccagagccuggccuucaucagaaagagcgacgagcugcugcacaacgugaacgccggcaagagcaccaccaacaucaugaucaccaccaucaucaucgugaucaucgugauccugcugagccugaucgccgugggccugcugcuguacugcaaggccagaagcacccccgugacccugagcaaggaccagcugagcggcaucaacaacaucgccuucagcaacugaggacuagucccuguucccagagcccacuuuuuuuucuuuuuuugaaauaaaauagccugucuuucagaucuaaaaaaaaaaaaaaaaaaaaaaaaaaaaaaaaaaaaaaaaaaaaaaaaaaaaaaaaaaaaaaaaugcaucccccccccccccccccccccccccccccccaaaggcucuuuucagagccaccagaauu

SEQ ID NO: 3872 - RNA, 1903 nt, Artificial Sequence
  mRNA product Design a-2 comprising derived and/or modified sequence from HRSV(A2)__F_DSCav1_mut0 (opt5)
gggagaguccgcucagccagguugcagaagcggcuuagcguguguccuaaucuucucucugcguguagguaggccugugccgcaaacaagcuuaccauggagcugcucauccugaaggccaacgcuauuaccacaauccuuacggccgugaccuucugcuuugcgagcggccagaauauuacagaagaguucuaccaauccaccuguucugcugucagcaaaggguaucuguccgcccucagaacaggaugguacaccucuguuaucacaauugaacugagcaacaucaaggagaauaaaugcaacggcaccgacgccaaggugaaacuuaucaagcaggaacuggauaaguauaaaaaugcugugacggagcuccagcugcugaugcaguccacccccgccacagggucuggaagcgcuauugccuccggcgucgcgguguguaagguucuccaccuggagggggaagugaacaaaaucaagagcgcccuucugucuaccaauaaagcugucgugucccucagcaacggaguuucugugcugacauuuaagguccuugaccugaagaauuacauugauaaacaacuccugccuauccugaacaagcaguccugcagcauuucuaauaucgagaccgugauugaguuccagcagaaaaacaaucggcuccuggaaaucacgcgcgaguuuuccgugaacgccggcgucacaaccccgguuagcacauauaugcuuaccaauuccgaacugcucucucugaucaacgacaugcccauuaccaacgaucaaaagaaacuuaugagcaauaacgugcagaucgugagacagcaguccuacagcauuauguguaucauuaaggaggaaguccuggcuuaugugguucaacucccucuguacggcgugaucgacacacccugcuggaaacugcauacgucuccucucuguaccacaaauaccaaggagggguccaacaucugccugacacggaccgaucgcggaugguacugugacaaugccggcagcgucucuuucuuuccccaggcggaaacgugcaaggugcagagcaacagaguuuucugugauacaaugaacuccagaacccugccuucugaggugaaucucugcaaugucgacauuuuuaacccgaaauaugauugcaagaucaugaccagcaaaacagacguguccagcucugucauuaccucccugggggccaucgugagcuguuacggaaagacaaaaugcacggcuucuaauaagaaccggggcauuaucaagaccuucuccaaugggugugauuauguuagcaacaaaggaguggacacagucuccgugggcaauacccuuuacuauguuaacaagcaagagggcaaaucucuguacgugaagggggaacccaucauuaacuuuuaugacccucucgucuuccccagcgaugaguuugacgccuccaucucucaggugaaugagaaaauuaaccagagccuggcuuucauccgcaaguccgaugaacugcuccacaaugugaacgccggaaagagcacaaccaauauuaugaucacgaccauuaucaucguuauuaucgucauucugcuuucucugaucgccgugggccuccugcuguacugcaaagcuagauccacaccugugacccuuagcaaggaccagcucucugggauuaacaauaucgcguucuccaacugaggacuagucccuguucccagagcccacuuuuuuuucuuuuuuugaaauaaaauagccugucuuucagaucuaaaaaaaaaaaaaaaaaaaaaaaaaaaaaaaaaaaaaaaaaaaaaaaaaaaaaaaaaaaaaaaaugcaucccccccccccccccccccccccccccccccaaaggcucuuuucagagccaccagaauu

SEQ ID NO: 3873 - RNA, 1903 nt, Artificial Sequence
  mRNA product Design a-2 comprising derived and/or modified sequence from HRSV(A2)__F_DSCav1_mut0 (opt6)
gggagaguccgcucagccagguugcagaagcggcuuagcguguguccuaaucuucucucugcguguagguaggccugugccgcaaacaagcuuaccauggaacuacuaauacuaaaagccaaugcaauaacaaccauacuaaccgccguaacauuuuguuucgcaucaggucaaaacauaaccgaagaauuuuaucaaucaacaugcucagcaguaucaaaaggauacuuauccgcucuaagaacaggaugguacacaaguguaauuacaauagagcucucaaacauaaaagaaaacaaaugcaauggaacugacgcaaaaguuaaacuuauaaaacaagaacuagauaaauauaaaaaugcaguaaccgaauuacaacuccuaaugcaauccacaccugcuaccgguuccggaucagccauagcaucuggaguagccguaugcaaaguccuccaccuagaaggagaaguaaauaaaaucaaaucagcacuauuaucuaccaauaaagcaguugucucacuauccaauggcguaucaguacuaacauucaaaguauuagaccuuaaaaacuacauagacaaacaacuauuaccaauucugaacaaacaauccuguucaauaucaaacaucgaaacgguaauagaauuucaacaaaaaaauaacagauuacuugaaauaacaagagaauuuucaguaaaugcaggaguuacaacacccgucuccaccuacaugcucacaaauucagaauuauuaucacuuauaaacgacaugccaauaacuaacgaccaaaaaaaacuaaugucaaacaauguccaaauaguccgacaacaauccuacucaauaaugugcauuauaaaagaagaaguccuagccuacguuguccaacuacccuuauauggaguaauagauaccccaugcuggaaacuucauaccuccccccuaugcacaacaaacacaaaagaaggcucaaacaucugcuuaacacguacagaccgagguugguacugugauaacgcaggauccguaucauuuuucccacaagcagaaacaugcaaaguacaaucaaaccgcguuuuuugugacaccaugaacagcagaacccucccuucagaaguaaaccuaugcaacgucgauauauuuaacccaaaauacgauugcaaaauaaugacaucaaaaaccgaugucucaucuucaguaauaaccucucuaggagcaauagucucauguuacggaaaaacaaaaugcacagcaaguaauaaaaauagaggaauaauaaaaacauucucuaauggcugcgacuacguauccaauaaaggcguugacacaguauccguaggcaacacacucuacuauguuaacaaacaagaaggaaaaaguuuauacguuaaaggagaaccaauuauaaacuuuuacgacccacucguauucccaucugaugaauuugacgcaucaaucucacaaguaaaugaaaaaaucaaucagucccuugccuuuauaagaaaaucagaugaacuuuuacacaacguuaacgccggaaaaucaacaaccaauauaaugaucacaaccauaauaauaguuauaauuguaauuuuauuauccuuaauagccgucggacuacuacuauacugcaaagcaagaucuacacccguaacccuaucaaaagaccaacuaaguggaauaaauaacauugcauucucaaauuaaggacuagucccuguucccagagcccacuuuuuuuucuuuuuuugaaauaaaauagccugucuuucagaucuaaaaaaaaaaaaaaaaaaaaaaaaaaaaaaaaaaaaaaaaaaaaaaaaaaaaaaaaaaaaaaaaugcaucccccccccccccccccccccccccccccccaaaggcucuuuucagagccaccagaauu

SEQ ID NO: 3874 - RNA, 1903 nt, Artificial Sequence
  mRNA product Design a-2 comprising derived and/or modified sequence from HRSV(A2)__F_DSCav1_mut0 (opt11)
gggagaguccgcucagccagguugcagaagcggcuuagcguguguccuaaucuucucucugcguguagguaggccugugccgcaaacaagcuuaccauggaacuccuaauacuaaaggcaaacgcaaucacuacaauucuaaccgccgugacauucugcuucgccuccggacaaaacaucaccgaagaauuuuaccaauccacaugcucggccgucaguaaaggcuaccucucggcucuccgaaccggcugguacaccuccgucaucaccaucgaacucuccaacaucaaagaaaacaaaugcaacggcaccgacgccaaagucaaacuaaucaaacaagaacucgacaaauacaaaaacgccgucacagaacuccaacuacuaaugcaaucaacacccgcuacaggaagcggcuccgccaucgccagcggcguagcugucugcaaaguccuccaccucgaaggugaagucaacaaaaucaaaucagcccuacucagcacaaacaaagccguuguaagccuauccaacggcgucuccguacuaacauucaaaguccuugaccucaagaacuacaucgacaaacaacuucucccaauccuaaacaaacaaagcugcucaauuuccaacaucgaaacaguaaucgaauuucaacaaaaaaacaaccgacuccucgaaaucacccgcgaauuuuccguuaacgccggcguuacaacccccgucuccaccuacaugcucaccaauuccgaacuacuaucacucauaaacgacaugccuaucacaaacgaccaaaaaaaacuaaugucaaacaauguccaaaucguccgccagcaaagcuauuccaucaugugcaucaucaaagaggaaguccucgccuacguaguccaacugccccucuacggcgucauugauacccccugcuggaaacuccacaccuccccccucugcaccacaaacaccaaagaagguuccaacaucugccuaacacgaaccgacagaggcugguacugcgacaacgccggcagcgucuccuucuucccccaagcagaaaccuguaaaguccagucuaaccgcgucuucugcgacacaaugaacucaagaacccuaccuuccgaaguaaaccucugcaacguagacaucuucaacccuaaauacgacugcaaaaucaugacuucaaaaacagacguaagcucuuccguaaucacuucccucggcgccaucguauccugcuacgguaaaaccaaaugcaccgccuccaacaaaaaccgagggaucauaaaaaccuucuccaacggcugcgacuacguaucuaacaaaggcgucgacaccgucuccgucggcaacacccucuauuacguaaacaaacaagagggcaaaucacuauacgucaaaggcgagccaaucauaaacuucuaugacccacucgucuucccuucagacgaauuugaugccagcaucagccaagucaacgaaaaaaucaaccaaucacucgccuucauccgcaaaagcgacgaacuccuucacaacgucaacgcaggcaaaucaaccaccaacaucaugaucaccaccaucaucaucgucaucaucguuauccuacucagccucaucgcaguuggucuucuccuuuacugcaaagcccgcuccacccccgucacccucaguaaagaccaacucagcggaaucaacaacauagcauucuccaacuaaggacuagucccuguucccagagcccacuuuuuuuucuuuuuuugaaauaaaauagccugucuuucagaucuaaaaaaaaaaaaaaaaaaaaaaaaaaaaaaaaaaaaaaaaaaaaaaaaaaaaaaaaaaaaaaaaugcaucccccccccccccccccccccccccccccccaaaggcucuuuucagagccaccagaauu

SEQ ID NO: 3875 - RNA, 1981 nt, Artificial Sequence
  mRNA product Design a-3 comprising derived and/or modified sequence from HRSV(A2)__F_DSCav1_mut0 (opt1)
gggagagggcgcuuggcuugcaaggacccugagcugcggcauugaagcacacccaacccaacucgacugaagucagccucacugaaccggaucugagaaucuucucucucugggcuugccagggcucuccgaaccuagcuagcauccucuucaauuccaacuagaaagcuuaccauggagcugcucauccugaaggccaacgccaucaccaccauccugacggcggugaccuucugcuucgccagcggccagaacaucaccgaggaguucuaccaguccacgugcagcgccgucuccaagggguaccucagcgcccugcggaccggcugguacaccuccgugaucaccaucgagcugagcaacaucaaggagaacaagugcaacgggaccgacgccaaggugaagcucaucaagcaggagcuggacaaguacaagaacgcggucacggagcugcagcuccugaugcaguccaccccggcaaccggcuccggcuccgccaucgcgagcggcgucgccgugugcaaggugcugcaccucgagggggaggucaacaagaucaagagcgcccugcuguccaccaacaaggccguggugagccucuccaacggcgucagcgugcugaccuucaaggugcuggaccucaagaacuacaucgacaagcagcugcugcccauccugaacaagcagagcugcuccaucagcaacaucgagacggugaucgaguuccagcagaagaacaaccggcuccuggagaucacccgcgaguucagcgugaacgccggggucaccacccccguguccacguacaugcugaccaacagcgagcuccugucccugaucaacgacaugccgaucaccaacgaccagaagaagcucaugagcaacaacgugcagaucguccggcagcaguccuacagcaucaugugcaucaucaaggaggaggugcuggcguacgugguccagcugccccucuacggcgugaucgacacccccugcuggaagcugcacacgagcccccugugcaccaccaacaccaaggagggguccaacaucugccucacgcgcaccgaccggggcugguacugcgacaacgccggcagcgucuccuucuucccgcaggccgagaccugcaaggugcagagcaaccgcguguucugcgacaccaugaacucccggacgcugcccagcgagguaaaccucugcaacgucgacaucuucaaccccaaguacgacugcaagaucaugaccuccaagaccgacgugagcuccagcgugaucaccucccugggggccaucgucagcugcuacggcaagacgaagugcaccgccagcaacaagaaccgggggaucaucaagaccuucuccaacggcugcgacuacgugagcaacaagggcguggacaccguguccgucgggaacacccuguacuacgugaacaagcaggagggcaagagccucuacgugaagggggagcccaucaucaacuucuacgacccgcuggucuuccccuccgacgaguucgacgcgagcaucucccaggugaacgagaagaucaaccagagccuggccuucauccgcaaguccgacgagcugcuccacaacgugaacgccggcaagagcacgaccaacaucaugaucaccaccaucaucaucgucaucaucgugauccugcugucccucaucgccguggggcugcugcucuacugcaaggcccggagcacgcccgucacccuguccaaggaccagcugagcggcaucaacaacaucgcguucuccaacugaggacuagucccuguucccagagcccacuuuuuuuucuuuuuuugaaauaaaauagccugucuuucagaucuaaaaaaaaaaaaaaaaaaaaaaaaaaaaaaaaaaaaaaaaaaaaaaaaaaaaaaaaaaaaaaaaugcaucccccccccccccccccccccccccccccccaaaggcucuuuucagagccaccagaauu

SEQ ID NO: 3876 - RNA, 1981 nt, Artificial Sequence
  mRNA product Design a-3 comprising derived and/or modified sequence from HRSV(A2)__F_DSCav1_mut0 (opt1)
gggagagggcgcuuggcuugcaaggacccugagcugcggcauugaagcacacccaacccaacucgacugaagucagccucacugaaccggaucugagaaucuucucucucugggcuugccagggcucuccgaaccuagcuagcauccucuucaauuccaacuagaaagcuuaccauggagcugcucauccugaaggccaacgccaucaccaccauccugacggcggugaccuucugcuucgccagcggccagaacaucaccgaggaguucuaccaguccacgugcagcgccgucuccaagggguaccucagcgcccugcgcaccggcugguacaccuccgugaucaccaucgagcugagcaacaucaaggagaacaagugcaacgggaccgacgccaaggugaagcucaucaagcaggagcuggacaaguacaagaacgcggucacggagcugcagcuccugaugcaguccacccccgccaccggcagcggguccgccaucgccagcggcguggcggugugcaagguccugcaccucgagggcgaggugaacaagaucaaguccgcccugcugagcaccaacaaggccguggucucccucagcaacgggguguccgugcugacguucaagguccuggaccucaagaacuacaucgacaagcagcugcugccgauccucaacaagcagagcugcuccaucagcaacaucgagaccgugaucgaguuccagcagaagaacaaccggcugcuggagaucacccgcgaguucuccgugaacgccggcgucaccacgcccgugagcaccuacaugcucaccaacagcgagcugcugucccucaucaacgacaugcccaucaccaacgaccagaagaagcugaugagcaacaacgugcagaucguccggcagcaguccuacagcaucaugugcaucaucaaggaggaggugcuggccuacgugguccagcucccccuguacggggugaucgacacgccgugcuggaagcugcacaccagcccccucugcaccaccaacacgaaggagggcuccaacaucugccugacccgcaccgaccgggggugguacugcgacaacgcgggcuccgugagcuucuucccccaggccgagaccugcaagguccaguccaaccgcguguucugcgacacgaugaacagccggacccuccccuccgaggucaaccugugcaacguggacaucuucaacccgaaguacgacugcaagaucaugaccagcaagaccgacguguccagcuccgucaucacgagccugggcgccaucguguccugcuacgggaagaccaagugcaccgccagcaacaagaaccggggcaucaucaagaccuucuccaacgggugcgacuacgugagcaacaagggcgucgacacggugagcgugggcaacacccucuacuacgucaacaagcaggaggggaagucccuguacgugaagggcgagcccaucaucaacuucuacgacccccugguguuccccagcgacgaguucgacgccuccaucagccaggucaacgagaagaucaaccagucccucgcguucauccgcaagagcgacgagcugcugcacaacgugaacgccgggaaguccaccaccaacaucaugaucaccacgaucaucaucgugaucaucgucauccuccugagccugaucgccgugggccuccugcuguacugcaaggcccgguccaccccggugacccugagcaaggaccagcucuccgggaucaacaacaucgccuucagcaacugaggacuagucccuguucccagagcccacuuuuuuuucuuuuuuugaaauaaaauagccugucuuucagaucuaaaaaaaaaaaaaaaaaaaaaaaaaaaaaaaaaaaaaaaaaaaaaaaaaaaaaaaaaaaaaaaaugcaucccccccccccccccccccccccccccccccaaaggcucuuuucagagccaccagaauu

SEQ ID NO: 3877 - RNA, 1981 nt, Artificial Sequence
  mRNA product Design a-3 comprising derived and/or modified sequence from HRSV(A2)__F_DSCav1_mut0 (opt2)
gggagagggcgcuuggcuugcaaggacccugagcugcggcauugaagcacacccaacccaacucgacugaagucagccucacugaaccggaucugagaaucuucucucucugggcuugccagggcucuccgaaccuagcuagcauccucuucaauuccaacuagaaagcuuaccauggagcuccucauccucaaggccaacgccaucaccaccauccucaccgccgucaccuucugcuucgccuccggccagaacaucaccgaggaguucuaccaguccaccugcuccgccgucuccaagggcuaccucuccgcccuccgcaccggcugguacaccuccgucaucaccaucgagcucuccaacaucaaggagaacaagugcaacggcaccgacgccaaggucaagcucaucaagcaggagcucgacaaguacaagaacgccgucaccgagcuccagcuccucaugcaguccacccccgccaccggcuccggcuccgccaucgccuccggcgucgccgucugcaagguccuccaccucgagggcgaggucaacaagaucaaguccgcccuccucuccaccaacaaggccgucgucucccucuccaacggcgucuccguccucaccuucaagguccucgaccucaagaacuacaucgacaagcagcuccuccccauccucaacaagcaguccugcuccaucuccaacaucgagaccgucaucgaguuccagcagaagaacaaccgccuccucgagaucacccgcgaguucuccgucaacgccggcgucaccacccccgucuccaccuacaugcucaccaacuccgagcuccucucccucaucaacgacaugcccaucaccaacgaccagaagaagcucauguccaacaacguccagaucguccgccagcaguccuacuccaucaugugcaucaucaaggaggagguccucgccuacgucguccagcucccccucuacggcgucaucgacacccccugcuggaagcuccacaccuccccccucugcaccaccaacaccaaggagggcuccaacaucugccucacccgcaccgaccgcggcugguacugcgacaacgccggcuccgucuccuucuucccccaggccgagaccugcaagguccaguccaaccgcgucuucugcgacaccaugaacucccgcacccuccccuccgaggucaaccucugcaacgucgacaucuucaaccccaaguacgacugcaagaucaugaccuccaagaccgacgucuccuccuccgucaucaccucccucggcgccaucgucuccugcuacggcaagaccaagugcaccgccuccaacaagaaccgcggcaucaucaagaccuucuccaacggcugcgacuacgucuccaacaagggcgucgacaccgucuccgucggcaacacccucuacuacgucaacaagcaggagggcaagucccucuacgucaagggcgagcccaucaucaacuucuacgacccccucgucuuccccuccgacgaguucgacgccuccaucucccaggucaacgagaagaucaaccagucccucgccuucauccgcaaguccgacgagcuccuccacaacgucaacgccggcaaguccaccaccaacaucaugaucaccaccaucaucaucgucaucaucgucauccuccucucccucaucgccgucggccuccuccucuacugcaaggcccgcuccacccccgucacccucuccaaggaccagcucuccggcaucaacaacaucgccuucuccaacugaggacuagucccuguucccagagcccacuuuuuuuucuuuuuuugaaauaaaauagccugucuuucagaucuaaaaaaaaaaaaaaaaaaaaaaaaaaaaaaaaaaaaaaaaaaaaaaaaaaaaaaaaaaaaaaaaugcaucccccccccccccccccccccccccccccccaaaggcucuuuucagagccaccagaauu

SEQ ID NO: 3878 - RNA, 1981 nt, Artificial Sequence
  mRNA product Design a-3 comprising derived and/or modified sequence from HRSV(A2)__F_DSCav1_mut0 (opt3)
gggagagggcgcuuggcuugcaaggacccugagcugcggcauugaagcacacccaacccaacucgacugaagucagccucacugaaccggaucugagaaucuucucucucugggcuugccagggcucuccgaaccuagcuagcauccucuucaauuccaacuagaaagcuuaccauggagcugcucauccuuaaggccaacgcuauuaccacaauacugacugcagugacguucugcuuugccagcggccagaauaucaccgaagaguucuaccaauccacauguucugcggucucaaaaggguauuugagugcuuuaagaacuggaugguacaccagcguuauuacaaucgaacuguccaacauuaaggagaauaaaugcaacgguaccgacgccaaggugaaacuaaucaagcaggaacucgauaaguauaaaaaugcaguaacugagcugcagcuucugaugcagucuacacccgccaccggcucggggucagcuauagcaagcggaguggccgucuguaagguguugcaccucgagggcgaaguuaacaaaaucaagagugcucugcuguccacgaauaaagccguggucucucucagcaacgguguguccguauuaacuuuuaagguucuggaccuuaagaauuacauugauaaacaauugcugccuauccuaaacaagcagucaugcaguauuagcaauaucgagaccgugauagaguuccagcagaaaaacaauaggcuccuggaaauuacacgggaguuuucugucaacgcgggggugacuaccccaguguccacauauaugcuuaccaauucagaacuguugagccucaucaacgacaugccgauuacgaacgaucaaaagaaacugaugaguaauaacguccagaucguucgccagcagucuuacuccaucauguguauuauaaaggaggaaguguuagcauauguagugcaacugccccucuacggagucaucgacacuccuugcuggaaacuucauacaagcccacuguguaccacuaauacaaaggagggcucgaacauuugcuugacccgaacggaucguggcugguacugugacaaugccgggucuguguccuucuuuccccaggcugaaaccugcaagguucagucaaacagaguguucugugauacaaugaauaguagaacucugccuagcgaggucaaccucugcaauguggacaucuuuaacccaaaauaugauugcaagauaaugaccuccaaaacagacguaucuagcucaguuauuaccagucugggagccaucguguccuguuacgguaagacuaaaugcacagcaagcaauaagaacaggggcaucauuaagaccuucucuaaugggugugauuaugucucaaacaaaggaguggacacugucagugugggcaauacgcuuuacuauguuaacaagcaagaggguaaaagccuguacgugaagggggaacccaucauuaacuuuuaugacccuuugguauucccauccgaugaguuugacgcuucuauaucgcaggucaaugagaaaaucaaccagagccucgccuucauucggaaguccgaugaacuguuacacaaugugaacgcgggaaagucaacaaccaauaucaugaucacuaccauuauaaucguuauuaucgugauucugcuaagucucaucgccgucggccugcuuuuguacugcaaagcacgcucuacaccggugacccugagcaaggaccagcucuccggcauaaacaauaucgcuuucucaaacugaggacuagucccuguucccagagcccacuuuuuuuucuuuuuuugaaauaaaauagccugucuuucagaucuaaaaaaaaaaaaaaaaaaaaaaaaaaaaaaaaaaaaaaaaaaaaaaaaaaaaaaaaaaaaaaaaugcaucccccccccccccccccccccccccccccccaaaggcucuuuucagagccaccagaauu

SEQ ID NO: 3879 - RNA, 1981 nt, Artificial Sequence
  mRNA product Design a-3 comprising derived and/or modified sequence from HRSV(A2)__F_DSCav1_mut0 (opt4)
gggagagggcgcuuggcuugcaaggacccugagcugcggcauugaagcacacccaacccaacucgacugaagucagccucacugaaccggaucugagaaucuucucucucugggcuugccagggcucuccgaaccuagcuagcauccucuucaauuccaacuagaaagcuuaccauggagcugcugauccugaaggccaacgccaucaccaccauccugaccgccgugaccuucugcuucgccagcggccagaacaucaccgaggaguucuaccagagcaccugcagcgccgugagcaagggcuaccugagcgcccugagaaccggcugguacaccagcgugaucaccaucgagcugagcaacaucaaggagaacaagugcaacggcaccgacgccaaggugaagcugaucaagcaggagcuggacaaguacaagaacgccgugaccgagcugcagcugcugaugcagagcacccccgccaccggcagcggcagcgccaucgccagcggcguggccgugugcaaggugcugcaccuggagggcgaggugaacaagaucaagagcgcccugcugagcaccaacaaggccguggugagccugagcaacggcgugagcgugcugaccuucaaggugcuggaccugaagaacuacaucgacaagcagcugcugcccauccugaacaagcagagcugcagcaucagcaacaucgagaccgugaucgaguuccagcagaagaacaacagacugcuggagaucaccagagaguucagcgugaacgccggcgugaccacccccgugagcaccuacaugcugaccaacagcgagcugcugagccugaucaacgacaugcccaucaccaacgaccagaagaagcugaugagcaacaacgugcagaucgugagacagcagagcuacagcaucaugugcaucaucaaggaggaggugcuggccuacguggugcagcugccccuguacggcgugaucgacacccccugcuggaagcugcacaccagcccccugugcaccaccaacaccaaggagggcagcaacaucugccugaccagaaccgacagaggcugguacugcgacaacgccggcagcgugagcuucuucccccaggccgagaccugcaaggugcagagcaacagaguguucugcgacaccaugaacagcagaacccugcccagcgaggugaaccugugcaacguggacaucuucaaccccaaguacgacugcaagaucaugaccagcaagaccgacgugagcagcagcgugaucaccagccugggcgccaucgugagcugcuacggcaagaccaagugcaccgccagcaacaagaacagaggcaucaucaagaccuucagcaacggcugcgacuacgugagcaacaagggcguggacaccgugagcgugggcaacacccuguacuacgugaacaagcaggagggcaagagccuguacgugaagggcgagcccaucaucaacuucuacgacccccugguguuccccagcgacgaguucgacgccagcaucagccaggugaacgagaagaucaaccagagccuggccuucaucagaaagagcgacgagcugcugcacaacgugaacgccggcaagagcaccaccaacaucaugaucaccaccaucaucaucgugaucaucgugauccugcugagccugaucgccgugggccugcugcuguacugcaaggccagaagcacccccgugacccugagcaaggaccagcugagcggcaucaacaacaucgccuucagcaacugaggacuagucccuguucccagagcccacuuuuuuuucuuuuuuugaaauaaaauagccugucuuucagaucuaaaaaaaaaaaaaaaaaaaaaaaaaaaaaaaaaaaaaaaaaaaaaaaaaaaaaaaaaaaaaaaaugcaucccccccccccccccccccccccccccccccaaaggcucuuuucagagccaccagaauu

SEQ ID NO: 3880 - RNA, 1981 nt, Artificial Sequence
  mRNA product Design a-3 comprising derived and/or modified sequence from HRSV(A2)__F_DSCav1_mut0 (opt5)
gggagagggcgcuuggcuugcaaggacccugagcugcggcauugaagcacacccaacccaacucgacugaagucagccucacugaaccggaucugagaaucuucucucucugggcuugccagggcucuccgaaccuagcuagcauccucuucaauuccaacuagaaagcuuaccauggagcugcucauccugaaggccaacgcuauuaccacaauccuuacggccgugaccuucugcuuugcgagcggccagaauauuacagaagaguucuaccaauccaccuguucugcugucagcaaaggguaucuguccgcccucagaacaggaugguacaccucuguuaucacaauugaacugagcaacaucaaggagaauaaaugcaacggcaccgacgccaaggugaaacuuaucaagcaggaacuggauaaguauaaaaaugcugugacggagcuccagcugcugaugcaguccacccccgccacagggucuggaagcgcuauugccuccggcgucgcgguguguaagguucuccaccuggagggggaagugaacaaaaucaagagcgcccuucugucuaccaauaaagcugucgugucccucagcaacggaguuucugugcugacauuuaagguccuugaccugaagaauuacauugauaaacaacuccugccuauccugaacaagcaguccugcagcauuucuaauaucgagaccgugauugaguuccagcagaaaaacaaucggcuccuggaaaucacgcgcgaguuuuccgugaacgccggcgucacaaccccgguuagcacauauaugcuuaccaauuccgaacugcucucucugaucaacgacaugcccauuaccaacgaucaaaagaaacuuaugagcaauaacgugcagaucgugagacagcaguccuacagcauuauguguaucauuaaggaggaaguccuggcuuaugugguucaacucccucuguacggcgugaucgacacacccugcuggaaacugcauacgucuccucucuguaccacaaauaccaaggagggguccaacaucugccugacacggaccgaucgcggaugguacugugacaaugccggcagcgucucuuucuuuccccaggcggaaacgugcaaggugcagagcaacagaguuuucugugauacaaugaacuccagaacccugccuucugaggugaaucucugcaaugucgacauuuuuaacccgaaauaugauugcaagaucaugaccagcaaaacagacguguccagcucugucauuaccucccugggggccaucgugagcuguuacggaaagacaaaaugcacggcuucuaauaagaaccggggcauuaucaagaccuucuccaaugggugugauuauguuagcaacaaaggaguggacacagucuccgugggcaauacccuuuacuauguuaacaagcaagagggcaaaucucuguacgugaagggggaacccaucauuaacuuuuaugacccucucgucuuccccagcgaugaguuugacgccuccaucucucaggugaaugagaaaauuaaccagagccuggcuuucauccgcaaguccgaugaacugcuccacaaugugaacgccggaaagagcacaaccaauauuaugaucacgaccauuaucaucguuauuaucgucauucugcuuucucugaucgccgugggccuccugcuguacugcaaagcuagauccacaccugugacccuuagcaaggaccagcucucugggauuaacaauaucgcguucuccaacugaggacuagucccuguucccagagcccacuuuuuuuucuuuuuuugaaauaaaauagccugucuuucagaucuaaaaaaaaaaaaaaaaaaaaaaaaaaaaaaaaaaaaaaaaaaaaaaaaaaaaaaaaaaaaaaaaugcaucccccccccccccccccccccccccccccccaaaggcucuuuucagagccaccagaauu

SEQ ID NO: 3881 - RNA, 1981 nt, Artificial Sequence
  mRNA product Design a-3 comprising derived and/or modified sequence from HRSV(A2)__F_DSCav1_mut0 (opt6)
gggagagggcgcuuggcuugcaaggacccugagcugcggcauugaagcacacccaacccaacucgacugaagucagccucacugaaccggaucugagaaucuucucucucugggcuugccagggcucuccgaaccuagcuagcauccucuucaauuccaacuagaaagcuuaccauggaacuacuaauacuaaaagccaaugcaauaacaaccauacuaaccgccguaacauuuuguuucgcaucaggucaaaacauaaccgaagaauuuuaucaaucaacaugcucagcaguaucaaaaggauacuuauccgcucuaagaacaggaugguacacaaguguaauuacaauagagcucucaaacauaaaagaaaacaaaugcaauggaacugacgcaaaaguuaaacuuauaaaacaagaacuagauaaauauaaaaaugcaguaaccgaauuacaacuccuaaugcaauccacaccugcuaccgguuccggaucagccauagcaucuggaguagccguaugcaaaguccuccaccuagaaggagaaguaaauaaaaucaaaucagcacuauuaucuaccaauaaagcaguugucucacuauccaauggcguaucaguacuaacauucaaaguauuagaccuuaaaaacuacauagacaaacaacuauuaccaauucugaacaaacaauccuguucaauaucaaacaucgaaacgguaauagaauuucaacaaaaaaauaacagauuacuugaaauaacaagagaauuuucaguaaaugcaggaguuacaacacccgucuccaccuacaugcucacaaauucagaauuauuaucacuuauaaacgacaugccaauaacuaacgaccaaaaaaaacuaaugucaaacaauguccaaauaguccgacaacaauccuacucaauaaugugcauuauaaaagaagaaguccuagccuacguuguccaacuacccuuauauggaguaauagauaccccaugcuggaaacuucauaccuccccccuaugcacaacaaacacaaaagaaggcucaaacaucugcuuaacacguacagaccgagguugguacugugauaacgcaggauccguaucauuuuucccacaagcagaaacaugcaaaguacaaucaaaccgcguuuuuugugacaccaugaacagcagaacccucccuucagaaguaaaccuaugcaacgucgauauauuuaacccaaaauacgauugcaaaauaaugacaucaaaaaccgaugucucaucuucaguaauaaccucucuaggagcaauagucucauguuacggaaaaacaaaaugcacagcaaguaauaaaaauagaggaauaauaaaaacauucucuaauggcugcgacuacguauccaauaaaggcguugacacaguauccguaggcaacacacucuacuauguuaacaaacaagaaggaaaaaguuuauacguuaaaggagaaccaauuauaaacuuuuacgacccacucguauucccaucugaugaauuugacgcaucaaucucacaaguaaaugaaaaaaucaaucagucccuugccuuuauaagaaaaucagaugaacuuuuacacaacguuaacgccggaaaaucaacaaccaauauaaugaucacaaccauaauaauaguuauaauuguaauuuuauuauccuuaauagccgucggacuacuacuauacugcaaagcaagaucuacacccguaacccuaucaaaagaccaacuaaguggaauaaauaacauugcauucucaaauuaaggacuagucccuguucccagagcccacuuuuuuuucuuuuuuugaaauaaaauagccugucuuucagaucuaaaaaaaaaaaaaaaaaaaaaaaaaaaaaaaaaaaaaaaaaaaaaaaaaaaaaaaaaaaaaaaaugcaucccccccccccccccccccccccccccccccaaaggcucuuuucagagccaccagaauu

SEQ ID NO: 3882 - RNA, 1981 nt, Artificial Sequence
  mRNA product Design a-3 comprising derived and/or modified sequence from HRSV(A2)__F_DSCav1_mut0 (opt11)
gggagagggcgcuuggcuugcaaggacccugagcugcggcauugaagcacacccaacccaacucgacugaagucagccucacugaaccggaucugagaaucuucucucucugggcuugccagggcucuccgaaccuagcuagcauccucuucaauuccaacuagaaagcuuaccauggaacuccuaauacuaaaggcaaacgcaaucacuacaauucuaaccgccgugacauucugcuucgccuccggacaaaacaucaccgaagaauuuuaccaauccacaugcucggccgucaguaaaggcuaccucucggcucuccgaaccggcugguacaccuccgucaucaccaucgaacucuccaacaucaaagaaaacaaaugcaacggcaccgacgccaaagucaaacuaaucaaacaagaacucgacaaauacaaaaacgccgucacagaacuccaacuacuaaugcaaucaacacccgcuacaggaagcggcuccgccaucgccagcggcguagcugucugcaaaguccuccaccucgaaggugaagucaacaaaaucaaaucagcccuacucagcacaaacaaagccguuguaagccuauccaacggcgucuccguacuaacauucaaaguccuugaccucaagaacuacaucgacaaacaacuucucccaauccuaaacaaacaaagcugcucaauuuccaacaucgaaacaguaaucgaauuucaacaaaaaaacaaccgacuccucgaaaucacccgcgaauuuuccguuaacgccggcguuacaacccccgucuccaccuacaugcucaccaauuccgaacuacuaucacucauaaacgacaugccuaucacaaacgaccaaaaaaaacuaaugucaaacaauguccaaaucguccgccagcaaagcuauuccaucaugugcaucaucaaagaggaaguccucgccuacguaguccaacugccccucuacggcgucauugauacccccugcuggaaacuccacaccuccccccucugcaccacaaacaccaaagaagguuccaacaucugccuaacacgaaccgacagaggcugguacugcgacaacgccggcagcgucuccuucuucccccaagcagaaaccuguaaaguccagucuaaccgcgucuucugcgacacaaugaacucaagaacccuaccuuccgaaguaaaccucugcaacguagacaucuucaacccuaaauacgacugcaaaaucaugacuucaaaaacagacguaagcucuuccguaaucacuucccucggcgccaucguauccugcuacgguaaaaccaaaugcaccgccuccaacaaaaaccgagggaucauaaaaaccuucuccaacggcugcgacuacguaucuaacaaaggcgucgacaccgucuccgucggcaacacccucuauuacguaaacaaacaagagggcaaaucacuauacgucaaaggcgagccaaucauaaacuucuaugacccacucgucuucccuucagacgaauuugaugccagcaucagccaagucaacgaaaaaaucaaccaaucacucgccuucauccgcaaaagcgacgaacuccuucacaacgucaacgcaggcaaaucaaccaccaacaucaugaucaccaccaucaucaucgucaucaucguuauccuacucagccucaucgcaguuggucuucuccuuuacugcaaagcccgcuccacccccgucacccucaguaaagaccaacucagcggaaucaacaacauagcauucuccaacuaaggacuagucccuguucccagagcccacuuuuuuuucuuuuuuugaaauaaaauagccugucuuucagaucuaaaaaaaaaaaaaaaaaaaaaaaaaaaaaaaaaaaaaaaaaaaaaaaaaaaaaaaaaaaaaaaaugcaucccccccccccccccccccccccccccccccaaaggcucuuuucagagccaccagaauu

SEQ ID NO: 3883 - RNA, 1930 nt, Artificial Sequence
  mRNA product Design a-4 comprising derived and/or modified sequence from HRSV(A2)__F_DSCav1_mut0 (opt1)
gggagacuccugucgggcggaaguaggaggaguagaguuuaaaaacaguacucuuuuuccgguucgggacguaguugaagcaacgacaagccggauaaccgcucuugagacaggaagcuuaccauggagcugcucauccugaaggccaacgccaucaccaccauccugacggcggugaccuucugcuucgccagcggccagaacaucaccgaggaguucuaccaguccacgugcagcgccgucuccaagggguaccucagcgcccugcggaccggcugguacaccuccgugaucaccaucgagcugagcaacaucaaggagaacaagugcaacgggaccgacgccaaggugaagcucaucaagcaggagcuggacaaguacaagaacgcggucacggagcugcagcuccugaugcaguccaccccggcaaccggcuccggcuccgccaucgcgagcggcgucgccgugugcaaggugcugcaccucgagggggaggucaacaagaucaagagcgcccugcuguccaccaacaaggccguggugagccucuccaacggcgucagcgugcugaccuucaaggugcuggaccucaagaacuacaucgacaagcagcugcugcccauccugaacaagcagagcugcuccaucagcaacaucgagacggugaucgaguuccagcagaagaacaaccggcuccuggagaucacccgcgaguucagcgugaacgccggggucaccacccccguguccacguacaugcugaccaacagcgagcuccugucccugaucaacgacaugccgaucaccaacgaccagaagaagcucaugagcaacaacgugcagaucguccggcagcaguccuacagcaucaugugcaucaucaaggaggaggugcuggcguacgugguccagcugccccucuacggcgugaucgacacccccugcuggaagcugcacacgagcccccugugcaccaccaacaccaaggagggguccaacaucugccucacgcgcaccgaccggggcugguacugcgacaacgccggcagcgucuccuucuucccgcaggccgagaccugcaaggugcagagcaaccgcguguucugcgacaccaugaacucccggacgcugcccagcgagguaaaccucugcaacgucgacaucuucaaccccaaguacgacugcaagaucaugaccuccaagaccgacgugagcuccagcgugaucaccucccugggggccaucgucagcugcuacggcaagacgaagugcaccgccagcaacaagaaccgggggaucaucaagaccuucuccaacggcugcgacuacgugagcaacaagggcguggacaccguguccgucgggaacacccuguacuacgugaacaagcaggagggcaagagccucuacgugaagggggagcccaucaucaacuucuacgacccgcuggucuuccccuccgacgaguucgacgcgagcaucucccaggugaacgagaagaucaaccagagccuggccuucauccgcaaguccgacgagcugcuccacaacgugaacgccggcaagagcacgaccaacaucaugaucaccaccaucaucaucgucaucaucgugauccugcugucccucaucgccguggggcugcugcucuacugcaaggcccggagcacgcccgucacccuguccaaggaccagcugagcggcaucaacaacaucgcguucuccaacugaggacuagucccuguucccagagcccacuuuuuuuucuuuuuuugaaauaaaauagccugucuuucagaucuaaaaaaaaaaaaaaaaaaaaaaaaaaaaaaaaaaaaaaaaaaaaaaaaaaaaaaaaaaaaaaaaugcaucccccccccccccccccccccccccccccccaaaggcucuuuucagagccaccagaauu

SEQ ID NO: 3884 - RNA, 1930 nt, Artificial Sequence
  mRNA product Design a-4 comprising derived and/or modified sequence from HRSV(A2)__F_DSCav1_mut0 (opt1)
gggagacuccugucgggcggaaguaggaggaguagaguuuaaaaacaguacucuuuuuccgguucgggacguaguugaagcaacgacaagccggauaaccgcucuugagacaggaagcuuaccauggagcugcucauccugaaggccaacgccaucaccaccauccugacggcggugaccuucugcuucgccagcggccagaacaucaccgaggaguucuaccaguccacgugcagcgccgucuccaagggguaccucagcgcccugcgcaccggcugguacaccuccgugaucaccaucgagcugagcaacaucaaggagaacaagugcaacgggaccgacgccaaggugaagcucaucaagcaggagcuggacaaguacaagaacgcggucacggagcugcagcuccugaugcaguccacccccgccaccggcagcggguccgccaucgccagcggcguggcggugugcaagguccugcaccucgagggcgaggugaacaagaucaaguccgcccugcugagcaccaacaaggccguggucucccucagcaacgggguguccgugcugacguucaagguccuggaccucaagaacuacaucgacaagcagcugcugccgauccucaacaagcagagcugcuccaucagcaacaucgagaccgugaucgaguuccagcagaagaacaaccggcugcuggagaucacccgcgaguucuccgugaacgccggcgucaccacgcccgugagcaccuacaugcucaccaacagcgagcugcugucccucaucaacgacaugcccaucaccaacgaccagaagaagcugaugagcaacaacgugcagaucguccggcagcaguccuacagcaucaugugcaucaucaaggaggaggugcuggccuacgugguccagcucccccuguacggggugaucgacacgccgugcuggaagcugcacaccagcccccucugcaccaccaacacgaaggagggcuccaacaucugccugacccgcaccgaccgggggugguacugcgacaacgcgggcuccgugagcuucuucccccaggccgagaccugcaagguccaguccaaccgcguguucugcgacacgaugaacagccggacccuccccuccgaggucaaccugugcaacguggacaucuucaacccgaaguacgacugcaagaucaugaccagcaagaccgacguguccagcuccgucaucacgagccugggcgccaucguguccugcuacgggaagaccaagugcaccgccagcaacaagaaccggggcaucaucaagaccuucuccaacgggugcgacuacgugagcaacaagggcgucgacacggugagcgugggcaacacccucuacuacgucaacaagcaggaggggaagucccuguacgugaagggcgagcccaucaucaacuucuacgacccccugguguuccccagcgacgaguucgacgccuccaucagccaggucaacgagaagaucaaccagucccucgcguucauccgcaagagcgacgagcugcugcacaacgugaacgccgggaaguccaccaccaacaucaugaucaccacgaucaucaucgugaucaucgucauccuccugagccugaucgccgugggccuccugcuguacugcaaggcccgguccaccccggugacccugagcaaggaccagcucuccgggaucaacaacaucgccuucagcaacugaggacuagucccuguucccagagcccacuuuuuuuucuuuuuuugaaauaaaauagccugucuuucagaucuaaaaaaaaaaaaaaaaaaaaaaaaaaaaaaaaaaaaaaaaaaaaaaaaaaaaaaaaaaaaaaaaugcaucccccccccccccccccccccccccccccccaaaggcucuuuucagagccaccagaauu

SEQ ID NO: 3885 - RNA, 1930 nt, Artificial Sequence
  mRNA product Design a-4 comprising derived and/or modified sequence from HRSV(A2)__F_DSCav1_mut0 (opt2)
gggagacuccugucgggcggaaguaggaggaguagaguuuaaaaacaguacucuuuuuccgguucgggacguaguugaagcaacgacaagccggauaaccgcucuugagacaggaagcuuaccauggagcuccucauccucaaggccaacgccaucaccaccauccucaccgccgucaccuucugcuucgccuccggccagaacaucaccgaggaguucuaccaguccaccugcuccgccgucuccaagggcuaccucuccgcccuccgcaccggcugguacaccuccgucaucaccaucgagcucuccaacaucaaggagaacaagugcaacggcaccgacgccaaggucaagcucaucaagcaggagcucgacaaguacaagaacgccgucaccgagcuccagcuccucaugcaguccacccccgccaccggcuccggcuccgccaucgccuccggcgucgccgucugcaagguccuccaccucgagggcgaggucaacaagaucaaguccgcccuccucuccaccaacaaggccgucgucucccucuccaacggcgucuccguccucaccuucaagguccucgaccucaagaacuacaucgacaagcagcuccuccccauccucaacaagcaguccugcuccaucuccaacaucgagaccgucaucgaguuccagcagaagaacaaccgccuccucgagaucacccgcgaguucuccgucaacgccggcgucaccacccccgucuccaccuacaugcucaccaacuccgagcuccucucccucaucaacgacaugcccaucaccaacgaccagaagaagcucauguccaacaacguccagaucguccgccagcaguccuacuccaucaugugcaucaucaaggaggagguccucgccuacgucguccagcucccccucuacggcgucaucgacacccccugcuggaagcuccacaccuccccccucugcaccaccaacaccaaggagggcuccaacaucugccucacccgcaccgaccgcggcugguacugcgacaacgccggcuccgucuccuucuucccccaggccgagaccugcaagguccaguccaaccgcgucuucugcgacaccaugaacucccgcacccuccccuccgaggucaaccucugcaacgucgacaucuucaaccccaaguacgacugcaagaucaugaccuccaagaccgacgucuccuccuccgucaucaccucccucggcgccaucgucuccugcuacggcaagaccaagugcaccgccuccaacaagaaccgcggcaucaucaagaccuucuccaacggcugcgacuacgucuccaacaagggcgucgacaccgucuccgucggcaacacccucuacuacgucaacaagcaggagggcaagucccucuacgucaagggcgagcccaucaucaacuucuacgacccccucgucuuccccuccgacgaguucgacgccuccaucucccaggucaacgagaagaucaaccagucccucgccuucauccgcaaguccgacgagcuccuccacaacgucaacgccggcaaguccaccaccaacaucaugaucaccaccaucaucaucgucaucaucgucauccuccucucccucaucgccgucggccuccuccucuacugcaaggcccgcuccacccccgucacccucuccaaggaccagcucuccggcaucaacaacaucgccuucuccaacugaggacuagucccuguucccagagcccacuuuuuuuucuuuuuuugaaauaaaauagccugucuuucagaucuaaaaaaaaaaaaaaaaaaaaaaaaaaaaaaaaaaaaaaaaaaaaaaaaaaaaaaaaaaaaaaaaugcaucccccccccccccccccccccccccccccccaaaggcucuuuucagagccaccagaauu

SEQ ID NO: 3886 - RNA, 1930 nt, Artificial Sequence
  mRNA product Design a-4 comprising derived and/or modified sequence from HRSV(A2)__F_DSCav1_mut0 (opt3)
gggagacuccugucgggcggaaguaggaggaguagaguuuaaaaacaguacucuuuuuccgguucgggacguaguugaagcaacgacaagccggauaaccgcucuugagacaggaagcuuaccauggagcugcucauccuuaaggccaacgcuauuaccacaauacugacugcagugacguucugcuuugccagcggccagaauaucaccgaagaguucuaccaauccacauguucugcggucucaaaaggguauuugagugcuuuaagaacuggaugguacaccagcguuauuacaaucgaacuguccaacauuaaggagaauaaaugcaacgguaccgacgccaaggugaaacuaaucaagcaggaacucgauaaguauaaaaaugcaguaacugagcugcagcuucugaugcagucuacacccgccaccggcucggggucagcuauagcaagcggaguggccgucuguaagguguugcaccucgagggcgaaguuaacaaaaucaagagugcucugcuguccacgaauaaagccguggucucucucagcaacgguguguccguauuaacuuuuaagguucuggaccuuaagaauuacauugauaaacaauugcugccuauccuaaacaagcagucaugcaguauuagcaauaucgagaccgugauagaguuccagcagaaaaacaauaggcuccuggaaauuacacgggaguuuucugucaacgcgggggugacuaccccaguguccacauauaugcuuaccaauucagaacuguugagccucaucaacgacaugccgauuacgaacgaucaaaagaaacugaugaguaauaacguccagaucguucgccagcagucuuacuccaucauguguauuauaaaggaggaaguguuagcauauguagugcaacugccccucuacggagucaucgacacuccuugcuggaaacuucauacaagcccacuguguaccacuaauacaaaggagggcucgaacauuugcuugacccgaacggaucguggcugguacugugacaaugccgggucuguguccuucuuuccccaggcugaaaccugcaagguucagucaaacagaguguucugugauacaaugaauaguagaacucugccuagcgaggucaaccucugcaauguggacaucuuuaacccaaaauaugauugcaagauaaugaccuccaaaacagacguaucuagcucaguuauuaccagucugggagccaucguguccuguuacgguaagacuaaaugcacagcaagcaauaagaacaggggcaucauuaagaccuucucuaaugggugugauuaugucucaaacaaaggaguggacacugucagugugggcaauacgcuuuacuauguuaacaagcaagaggguaaaagccuguacgugaagggggaacccaucauuaacuuuuaugacccuuugguauucccauccgaugaguuugacgcuucuauaucgcaggucaaugagaaaaucaaccagagccucgccuucauucggaaguccgaugaacuguuacacaaugugaacgcgggaaagucaacaaccaauaucaugaucacuaccauuauaaucguuauuaucgugauucugcuaagucucaucgccgucggccugcuuuuguacugcaaagcacgcucuacaccggugacccugagcaaggaccagcucuccggcauaaacaauaucgcuuucucaaacugaggacuagucccuguucccagagcccacuuuuuuuucuuuuuuugaaauaaaauagccugucuuucagaucuaaaaaaaaaaaaaaaaaaaaaaaaaaaaaaaaaaaaaaaaaaaaaaaaaaaaaaaaaaaaaaaaugcaucccccccccccccccccccccccccccccccaaaggcucuuuucagagccaccagaauu

SEQ ID NO: 3887 - RNA, 1930 nt, Artificial Sequence
  mRNA product Design a-4 comprising derived and/or modified sequence from HRSV(A2)__F_DSCav1_mut0 (opt4)
gggagacuccugucgggcggaaguaggaggaguagaguuuaaaaacaguacucuuuuuccgguucgggacguaguugaagcaacgacaagccggauaaccgcucuugagacaggaagcuuaccauggagcugcugauccugaaggccaacgccaucaccaccauccugaccgccgugaccuucugcuucgccagcggccagaacaucaccgaggaguucuaccagagcaccugcagcgccgugagcaagggcuaccugagcgcccugagaaccggcugguacaccagcgugaucaccaucgagcugagcaacaucaaggagaacaagugcaacggcaccgacgccaaggugaagcugaucaagcaggagcuggacaaguacaagaacgccgugaccgagcugcagcugcugaugcagagcacccccgccaccggcagcggcagcgccaucgccagcggcguggccgugugcaaggugcugcaccuggagggcgaggugaacaagaucaagagcgcccugcugagcaccaacaaggccguggugagccugagcaacggcgugagcgugcugaccuucaaggugcuggaccugaagaacuacaucgacaagcagcugcugcccauccugaacaagcagagcugcagcaucagcaacaucgagaccgugaucgaguuccagcagaagaacaacagacugcuggagaucaccagagaguucagcgugaacgccggcgugaccacccccgugagcaccuacaugcugaccaacagcgagcugcugagccugaucaacgacaugcccaucaccaacgaccagaagaagcugaugagcaacaacgugcagaucgugagacagcagagcuacagcaucaugugcaucaucaaggaggaggugcuggccuacguggugcagcugccccuguacggcgugaucgacacccccugcuggaagcugcacaccagcccccugugcaccaccaacaccaaggagggcagcaacaucugccugaccagaaccgacagaggcugguacugcgacaacgccggcagcgugagcuucuucccccaggccgagaccugcaaggugcagagcaacagaguguucugcgacaccaugaacagcagaacccugcccagcgaggugaaccugugcaacguggacaucuucaaccccaaguacgacugcaagaucaugaccagcaagaccgacgugagcagcagcgugaucaccagccugggcgccaucgugagcugcuacggcaagaccaagugcaccgccagcaacaagaacagaggcaucaucaagaccuucagcaacggcugcgacuacgugagcaacaagggcguggacaccgugagcgugggcaacacccuguacuacgugaacaagcaggagggcaagagccuguacgugaagggcgagcccaucaucaacuucuacgacccccugguguuccccagcgacgaguucgacgccagcaucagccaggugaacgagaagaucaaccagagccuggccuucaucagaaagagcgacgagcugcugcacaacgugaacgccggcaagagcaccaccaacaucaugaucaccaccaucaucaucgugaucaucgugauccugcugagccugaucgccgugggccugcugcuguacugcaaggccagaagcacccccgugacccugagcaaggaccagcugagcggcaucaacaacaucgccuucagcaacugaggacuagucccuguucccagagcccacuuuuuuuucuuuuuuugaaauaaaauagccugucuuucagaucuaaaaaaaaaaaaaaaaaaaaaaaaaaaaaaaaaaaaaaaaaaaaaaaaaaaaaaaaaaaaaaaaugcaucccccccccccccccccccccccccccccccaaaggcucuuuucagagccaccagaauu

SEQ ID NO: 3888 - RNA, 1930 nt, Artificial Sequence
  mRNA product Design a-4 comprising derived and/or modified sequence from HRSV(A2)__F_DSCav1_mut0 (opt5)
gggagacuccugucgggcggaaguaggaggaguagaguuuaaaaacaguacucuuuuuccgguucgggacguaguugaagcaacgacaagccggauaaccgcucuugagacaggaagcuuaccauggagcugcucauccugaaggccaacgcuauuaccacaauccuuacggccgugaccuucugcuuugcgagcggccagaauauuacagaagaguucuaccaauccaccuguucugcugucagcaaaggguaucuguccgcccucagaacaggaugguacaccucuguuaucacaauugaacugagcaacaucaaggagaauaaaugcaacggcaccgacgccaaggugaaacuuaucaagcaggaacuggauaaguauaaaaaugcugugacggagcuccagcugcugaugcaguccacccccgccacagggucuggaagcgcuauugccuccggcgucgcgguguguaagguucuccaccuggagggggaagugaacaaaaucaagagcgcccuucugucuaccaauaaagcugucgugucccucagcaacggaguuucugugcugacauuuaagguccuugaccugaagaauuacauugauaaacaacuccugccuauccugaacaagcaguccugcagcauuucuaauaucgagaccgugauugaguuccagcagaaaaacaaucggcuccuggaaaucacgcgcgaguuuuccgugaacgccggcgucacaaccccgguuagcacauauaugcuuaccaauuccgaacugcucucucugaucaacgacaugcccauuaccaacgaucaaaagaaacuuaugagcaauaacgugcagaucgugagacagcaguccuacagcauuauguguaucauuaaggaggaaguccuggcuuaugugguucaacucccucuguacggcgugaucgacacacccugcuggaaacugcauacgucuccucucuguaccacaaauaccaaggagggguccaacaucugccugacacggaccgaucgcggaugguacugugacaaugccggcagcgucucuuucuuuccccaggcggaaacgugcaaggugcagagcaacagaguuuucugugauacaaugaacuccagaacccugccuucugaggugaaucucugcaaugucgacauuuuuaacccgaaauaugauugcaagaucaugaccagcaaaacagacguguccagcucugucauuaccucccugggggccaucgugagcuguuacggaaagacaaaaugcacggcuucuaauaagaaccggggcauuaucaagaccuucuccaaugggugugauuauguuagcaacaaaggaguggacacagucuccgugggcaauacccuuuacuauguuaacaagcaagagggcaaaucucuguacgugaagggggaacccaucauuaacuuuuaugacccucucgucuuccccagcgaugaguuugacgccuccaucucucaggugaaugagaaaauuaaccagagccuggcuuucauccgcaaguccgaugaacugcuccacaaugugaacgccggaaagagcacaaccaauauuaugaucacgaccauuaucaucguuauuaucgucauucugcuuucucugaucgccgugggccuccugcuguacugcaaagcuagauccacaccugugacccuuagcaaggaccagcucucugggauuaacaauaucgcguucuccaacugaggacuagucccuguucccagagcccacuuuuuuuucuuuuuuugaaauaaaauagccugucuuucagaucuaaaaaaaaaaaaaaaaaaaaaaaaaaaaaaaaaaaaaaaaaaaaaaaaaaaaaaaaaaaaaaaaugcaucccccccccccccccccccccccccccccccaaaggcucuuuucagagccaccagaauu

SEQ ID NO: 3889 - RNA, 1930 nt, Artificial Sequence
  mRNA product Design a-4 comprising derived and/or modified sequence from HRSV(A2)__F_DSCav1_mut0 (opt6)
gggagacuccugucgggcggaaguaggaggaguagaguuuaaaaacaguacucuuuuuccgguucgggacguaguugaagcaacgacaagccggauaaccgcucuugagacaggaagcuuaccauggaacuacuaauacuaaaagccaaugcaauaacaaccauacuaaccgccguaacauuuuguuucgcaucaggucaaaacauaaccgaagaauuuuaucaaucaacaugcucagcaguaucaaaaggauacuuauccgcucuaagaacaggaugguacacaaguguaauuacaauagagcucucaaacauaaaagaaaacaaaugcaauggaacugacgcaaaaguuaaacuuauaaaacaagaacuagauaaauauaaaaaugcaguaaccgaauuacaacuccuaaugcaauccacaccugcuaccgguuccggaucagccauagcaucuggaguagccguaugcaaaguccuccaccuagaaggagaaguaaauaaaaucaaaucagcacuauuaucuaccaauaaagcaguugucucacuauccaauggcguaucaguacuaacauucaaaguauuagaccuuaaaaacuacauagacaaacaacuauuaccaauucugaacaaacaauccuguucaauaucaaacaucgaaacgguaauagaauuucaacaaaaaaauaacagauuacuugaaauaacaagagaauuuucaguaaaugcaggaguuacaacacccgucuccaccuacaugcucacaaauucagaauuauuaucacuuauaaacgacaugccaauaacuaacgaccaaaaaaaacuaaugucaaacaauguccaaauaguccgacaacaauccuacucaauaaugugcauuauaaaagaagaaguccuagccuacguuguccaacuacccuuauauggaguaauagauaccccaugcuggaaacuucauaccuccccccuaugcacaacaaacacaaaagaaggcucaaacaucugcuuaacacguacagaccgagguugguacugugauaacgcaggauccguaucauuuuucccacaagcagaaacaugcaaaguacaaucaaaccgcguuuuuugugacaccaugaacagcagaacccucccuucagaaguaaaccuaugcaacgucgauauauuuaacccaaaauacgauugcaaaauaaugacaucaaaaaccgaugucucaucuucaguaauaaccucucuaggagcaauagucucauguuacggaaaaacaaaaugcacagcaaguaauaaaaauagaggaauaauaaaaacauucucuaauggcugcgacuacguauccaauaaaggcguugacacaguauccguaggcaacacacucuacuauguuaacaaacaagaaggaaaaaguuuauacguuaaaggagaaccaauuauaaacuuuuacgacccacucguauucccaucugaugaauuugacgcaucaaucucacaaguaaaugaaaaaaucaaucagucccuugccuuuauaagaaaaucagaugaacuuuuacacaacguuaacgccggaaaaucaacaaccaauauaaugaucacaaccauaauaauaguuauaauuguaauuuuauuauccuuaauagccgucggacuacuacuauacugcaaagcaagaucuacacccguaacccuaucaaaagaccaacuaaguggaauaaauaacauugcauucucaaauuaaggacuagucccuguucccagagcccacuuuuuuuucuuuuuuugaaauaaaauagccugucuuucagaucuaaaaaaaaaaaaaaaaaaaaaaaaaaaaaaaaaaaaaaaaaaaaaaaaaaaaaaaaaaaaaaaaugcaucccccccccccccccccccccccccccccccaaaggcucuuuucagagccaccagaauu

SEQ ID NO: 3890 - RNA, 1930 nt, Artificial Sequence
  mRNA product Design a-4 comprising derived and/or modified sequence from HRSV(A2)__F_DSCav1_mut0 (opt11)
gggagacuccugucgggcggaaguaggaggaguagaguuuaaaaacaguacucuuuuuccgguucgggacguaguugaagcaacgacaagccggauaaccgcucuugagacaggaagcuuaccauggaacuccuaauacuaaaggcaaacgcaaucacuacaauucuaaccgccgugacauucugcuucgccuccggacaaaacaucaccgaagaauuuuaccaauccacaugcucggccgucaguaaaggcuaccucucggcucuccgaaccggcugguacaccuccgucaucaccaucgaacucuccaacaucaaagaaaacaaaugcaacggcaccgacgccaaagucaaacuaaucaaacaagaacucgacaaauacaaaaacgccgucacagaacuccaacuacuaaugcaaucaacacccgcuacaggaagcggcuccgccaucgccagcggcguagcugucugcaaaguccuccaccucgaaggugaagucaacaaaaucaaaucagcccuacucagcacaaacaaagccguuguaagccuauccaacggcgucuccguacuaacauucaaaguccuugaccucaagaacuacaucgacaaacaacuucucccaauccuaaacaaacaaagcugcucaauuuccaacaucgaaacaguaaucgaauuucaacaaaaaaacaaccgacuccucgaaaucacccgcgaauuuuccguuaacgccggcguuacaacccccgucuccaccuacaugcucaccaauuccgaacuacuaucacucauaaacgacaugccuaucacaaacgaccaaaaaaaacuaaugucaaacaauguccaaaucguccgccagcaaagcuauuccaucaugugcaucaucaaagaggaaguccucgccuacguaguccaacugccccucuacggcgucauugauacccccugcuggaaacuccacaccuccccccucugcaccacaaacaccaaagaagguuccaacaucugccuaacacgaaccgacagaggcugguacugcgacaacgccggcagcgucuccuucuucccccaagcagaaaccuguaaaguccagucuaaccgcgucuucugcgacacaaugaacucaagaacccuaccuuccgaaguaaaccucugcaacguagacaucuucaacccuaaauacgacugcaaaaucaugacuucaaaaacagacguaagcucuuccguaaucacuucccucggcgccaucguauccugcuacgguaaaaccaaaugcaccgccuccaacaaaaaccgagggaucauaaaaaccuucuccaacggcugcgacuacguaucuaacaaaggcgucgacaccgucuccgucggcaacacccucuauuacguaaacaaacaagagggcaaaucacuauacgucaaaggcgagccaaucauaaacuucuaugacccacucgucuucccuucagacgaauuugaugccagcaucagccaagucaacgaaaaaaucaaccaaucacucgccuucauccgcaaaagcgacgaacuccuucacaacgucaacgcaggcaaaucaaccaccaacaucaugaucaccaccaucaucaucgucaucaucguuauccuacucagccucaucgcaguuggucuucuccuuuacugcaaagcccgcuccacccccgucacccucaguaaagaccaacucagcggaaucaacaacauagcauucuccaacuaaggacuagucccuguucccagagcccacuuuuuuuucuuuuuuugaaauaaaauagccugucuuucagaucuaaaaaaaaaaaaaaaaaaaaaaaaaaaaaaaaaaaaaaaaaaaaaaaaaaaaaaaaaaaaaaaaugcaucccccccccccccccccccccccccccccccaaaggcucuuuucagagccaccagaauu

SEQ ID NO: 3891 - RNA, 1876 nt, Artificial Sequence
  mRNA product Design a-5 comprising derived and/or modified sequence from HRSV(A2)__F_DSCav1_mut0 (opt1)
gggagacuuucccauucuguagcagaauuugguguugccuguggucuuggucccgcggagaagcuuaccauggagcugcucauccugaaggccaacgccaucaccaccauccugacggcggugaccuucugcuucgccagcggccagaacaucaccgaggaguucuaccaguccacgugcagcgccgucuccaagggguaccucagcgcccugcggaccggcugguacaccuccgugaucaccaucgagcugagcaacaucaaggagaacaagugcaacgggaccgacgccaaggugaagcucaucaagcaggagcuggacaaguacaagaacgcggucacggagcugcagcuccugaugcaguccaccccggcaaccggcuccggcuccgccaucgcgagcggcgucgccgugugcaaggugcugcaccucgagggggaggucaacaagaucaagagcgcccugcuguccaccaacaaggccguggugagccucuccaacggcgucagcgugcugaccuucaaggugcuggaccucaagaacuacaucgacaagcagcugcugcccauccugaacaagcagagcugcuccaucagcaacaucgagacggugaucgaguuccagcagaagaacaaccggcuccuggagaucacccgcgaguucagcgugaacgccggggucaccacccccguguccacguacaugcugaccaacagcgagcuccugucccugaucaacgacaugccgaucaccaacgaccagaagaagcucaugagcaacaacgugcagaucguccggcagcaguccuacagcaucaugugcaucaucaaggaggaggugcuggcguacgugguccagcugccccucuacggcgugaucgacacccccugcuggaagcugcacacgagcccccugugcaccaccaacaccaaggagggguccaacaucugccucacgcgcaccgaccggggcugguacugcgacaacgccggcagcgucuccuucuucccgcaggccgagaccugcaaggugcagagcaaccgcguguucugcgacaccaugaacucccggacgcugcccagcgagguaaaccucugcaacgucgacaucuucaaccccaaguacgacugcaagaucaugaccuccaagaccgacgugagcuccagcgugaucaccucccugggggccaucgucagcugcuacggcaagacgaagugcaccgccagcaacaagaaccgggggaucaucaagaccuucuccaacggcugcgacuacgugagcaacaagggcguggacaccguguccgucgggaacacccuguacuacgugaacaagcaggagggcaagagccucuacgugaagggggagcccaucaucaacuucuacgacccgcuggucuuccccuccgacgaguucgacgcgagcaucucccaggugaacgagaagaucaaccagagccuggccuucauccgcaaguccgacgagcugcuccacaacgugaacgccggcaagagcacgaccaacaucaugaucaccaccaucaucaucgucaucaucgugauccugcugucccucaucgccguggggcugcugcucuacugcaaggcccggagcacgcccgucacccuguccaaggaccagcugagcggcaucaacaacaucgcguucuccaacugaggacuagucccuguucccagagcccacuuuuuuuucuuuuuuugaaauaaaauagccugucuuucagaucuaaaaaaaaaaaaaaaaaaaaaaaaaaaaaaaaaaaaaaaaaaaaaaaaaaaaaaaaaaaaaaaaugcaucccccccccccccccccccccccccccccccaaaggcucuuuucagagccaccagaauu

SEQ ID NO: 3892 - RNA, 1876 nt, Artificial Sequence
  mRNA product Design a-5 comprising derived and/or modified sequence from HRSV(A2)__F_DSCav1_mut0 (opt1)
gggagacuuucccauucuguagcagaauuugguguugccuguggucuuggucccgcggagaagcuuaccauggagcugcucauccugaaggccaacgccaucaccaccauccugacggcggugaccuucugcuucgccagcggccagaacaucaccgaggaguucuaccaguccacgugcagcgccgucuccaagggguaccucagcgcccugcgcaccggcugguacaccuccgugaucaccaucgagcugagcaacaucaaggagaacaagugcaacgggaccgacgccaaggugaagcucaucaagcaggagcuggacaaguacaagaacgcggucacggagcugcagcuccugaugcaguccacccccgccaccggcagcggguccgccaucgccagcggcguggcggugugcaagguccugcaccucgagggcgaggugaacaagaucaaguccgcccugcugagcaccaacaaggccguggucucccucagcaacgggguguccgugcugacguucaagguccuggaccucaagaacuacaucgacaagcagcugcugccgauccucaacaagcagagcugcuccaucagcaacaucgagaccgugaucgaguuccagcagaagaacaaccggcugcuggagaucacccgcgaguucuccgugaacgccggcgucaccacgcccgugagcaccuacaugcucaccaacagcgagcugcugucccucaucaacgacaugcccaucaccaacgaccagaagaagcugaugagcaacaacgugcagaucguccggcagcaguccuacagcaucaugugcaucaucaaggaggaggugcuggccuacgugguccagcucccccuguacggggugaucgacacgccgugcuggaagcugcacaccagcccccucugcaccaccaacacgaaggagggcuccaacaucugccugacccgcaccgaccgggggugguacugcgacaacgcgggcuccgugagcuucuucccccaggccgagaccugcaagguccaguccaaccgcguguucugcgacacgaugaacagccggacccuccccuccgaggucaaccugugcaacguggacaucuucaacccgaaguacgacugcaagaucaugaccagcaagaccgacguguccagcuccgucaucacgagccugggcgccaucguguccugcuacgggaagaccaagugcaccgccagcaacaagaaccggggcaucaucaagaccuucuccaacgggugcgacuacgugagcaacaagggcgucgacacggugagcgugggcaacacccucuacuacgucaacaagcaggaggggaagucccuguacgugaagggcgagcccaucaucaacuucuacgacccccugguguuccccagcgacgaguucgacgccuccaucagccaggucaacgagaagaucaaccagucccucgcguucauccgcaagagcgacgagcugcugcacaacgugaacgccgggaaguccaccaccaacaucaugaucaccacgaucaucaucgugaucaucgucauccuccugagccugaucgccgugggccuccugcuguacugcaaggcccgguccaccccggugacccugagcaaggaccagcucuccgggaucaacaacaucgccuucagcaacugaggacuagucccuguucccagagcccacuuuuuuuucuuuuuuugaaauaaaauagccugucuuucagaucuaaaaaaaaaaaaaaaaaaaaaaaaaaaaaaaaaaaaaaaaaaaaaaaaaaaaaaaaaaaaaaaaugcaucccccccccccccccccccccccccccccccaaaggcucuuuucagagccaccagaauu

SEQ ID NO: 3893 - RNA, 1876 nt, Artificial Sequence
  mRNA product Design a-5 comprising derived and/or modified sequence from HRSV(A2)__F_DSCav1_mut0 (opt2)
gggagacuuucccauucuguagcagaauuugguguugccuguggucuuggucccgcggagaagcuuaccauggagcuccucauccucaaggccaacgccaucaccaccauccucaccgccgucaccuucugcuucgccuccggccagaacaucaccgaggaguucuaccaguccaccugcuccgccgucuccaagggcuaccucuccgcccuccgcaccggcugguacaccuccgucaucaccaucgagcucuccaacaucaaggagaacaagugcaacggcaccgacgccaaggucaagcucaucaagcaggagcucgacaaguacaagaacgccgucaccgagcuccagcuccucaugcaguccacccccgccaccggcuccggcuccgccaucgccuccggcgucgccgucugcaagguccuccaccucgagggcgaggucaacaagaucaaguccgcccuccucuccaccaacaaggccgucgucucccucuccaacggcgucuccguccucaccuucaagguccucgaccucaagaacuacaucgacaagcagcuccuccccauccucaacaagcaguccugcuccaucuccaacaucgagaccgucaucgaguuccagcagaagaacaaccgccuccucgagaucacccgcgaguucuccgucaacgccggcgucaccacccccgucuccaccuacaugcucaccaacuccgagcuccucucccucaucaacgacaugcccaucaccaacgaccagaagaagcucauguccaacaacguccagaucguccgccagcaguccuacuccaucaugugcaucaucaaggaggagguccucgccuacgucguccagcucccccucuacggcgucaucgacacccccugcuggaagcuccacaccuccccccucugcaccaccaacaccaaggagggcuccaacaucugccucacccgcaccgaccgcggcugguacugcgacaacgccggcuccgucuccuucuucccccaggccgagaccugcaagguccaguccaaccgcgucuucugcgacaccaugaacucccgcacccuccccuccgaggucaaccucugcaacgucgacaucuucaaccccaaguacgacugcaagaucaugaccuccaagaccgacgucuccuccuccgucaucaccucccucggcgccaucgucuccugcuacggcaagaccaagugcaccgccuccaacaagaaccgcggcaucaucaagaccuucuccaacggcugcgacuacgucuccaacaagggcgucgacaccgucuccgucggcaacacccucuacuacgucaacaagcaggagggcaagucccucuacgucaagggcgagcccaucaucaacuucuacgacccccucgucuuccccuccgacgaguucgacgccuccaucucccaggucaacgagaagaucaaccagucccucgccuucauccgcaaguccgacgagcuccuccacaacgucaacgccggcaaguccaccaccaacaucaugaucaccaccaucaucaucgucaucaucgucauccuccucucccucaucgccgucggccuccuccucuacugcaaggcccgcuccacccccgucacccucuccaaggaccagcucuccggcaucaacaacaucgccuucuccaacugaggacuagucccuguucccagagcccacuuuuuuuucuuuuuuugaaauaaaauagccugucuuucagaucuaaaaaaaaaaaaaaaaaaaaaaaaaaaaaaaaaaaaaaaaaaaaaaaaaaaaaaaaaaaaaaaaugcaucccccccccccccccccccccccccccccccaaaggcucuuuucagagccaccagaauu

SEQ ID NO: 3894 - RNA, 1876 nt, Artificial Sequence
  mRNA product Design a-5 comprising derived and/or modified sequence from HRSV(A2)__F_DSCav1_mut0 (opt3)
gggagacuuucccauucuguagcagaauuugguguugccuguggucuuggucccgcggagaagcuuaccauggagcugcucauccuuaaggccaacgcuauuaccacaauacugacugcagugacguucugcuuugccagcggccagaauaucaccgaagaguucuaccaauccacauguucugcggucucaaaaggguauuugagugcuuuaagaacuggaugguacaccagcguuauuacaaucgaacuguccaacauuaaggagaauaaaugcaacgguaccgacgccaaggugaaacuaaucaagcaggaacucgauaaguauaaaaaugcaguaacugagcugcagcuucugaugcagucuacacccgccaccggcucggggucagcuauagcaagcggaguggccgucuguaagguguugcaccucgagggcgaaguuaacaaaaucaagagugcucugcuguccacgaauaaagccguggucucucucagcaacgguguguccguauuaacuuuuaagguucuggaccuuaagaauuacauugauaaacaauugcugccuauccuaaacaagcagucaugcaguauuagcaauaucgagaccgugauagaguuccagcagaaaaacaauaggcuccuggaaauuacacgggaguuuucugucaacgcgggggugacuaccccaguguccacauauaugcuuaccaauucagaacuguugagccucaucaacgacaugccgauuacgaacgaucaaaagaaacugaugaguaauaacguccagaucguucgccagcagucuuacuccaucauguguauuauaaaggaggaaguguuagcauauguagugcaacugccccucuacggagucaucgacacuccuugcuggaaacuucauacaagcccacuguguaccacuaauacaaaggagggcucgaacauuugcuugacccgaacggaucguggcugguacugugacaaugccgggucuguguccuucuuuccccaggcugaaaccugcaagguucagucaaacagaguguucugugauacaaugaauaguagaacucugccuagcgaggucaaccucugcaauguggacaucuuuaacccaaaauaugauugcaagauaaugaccuccaaaacagacguaucuagcucaguuauuaccagucugggagccaucguguccuguuacgguaagacuaaaugcacagcaagcaauaagaacaggggcaucauuaagaccuucucuaaugggugugauuaugucucaaacaaaggaguggacacugucagugugggcaauacgcuuuacuauguuaacaagcaagaggguaaaagccuguacgugaagggggaacccaucauuaacuuuuaugacccuuugguauucccauccgaugaguuugacgcuucuauaucgcaggucaaugagaaaaucaaccagagccucgccuucauucggaaguccgaugaacuguuacacaaugugaacgcgggaaagucaacaaccaauaucaugaucacuaccauuauaaucguuauuaucgugauucugcuaagucucaucgccgucggccugcuuuuguacugcaaagcacgcucuacaccggugacccugagcaaggaccagcucuccggcauaaacaauaucgcuuucucaaacugaggacuagucccuguucccagagcccacuuuuuuuucuuuuuuugaaauaaaauagccugucuuucagaucuaaaaaaaaaaaaaaaaaaaaaaaaaaaaaaaaaaaaaaaaaaaaaaaaaaaaaaaaaaaaaaaaugcaucccccccccccccccccccccccccccccccaaaggcucuuuucagagccaccagaauu

SEQ ID NO: 3895 - RNA, 1876 nt, Artificial Sequence
  mRNA product Design a-5 comprising derived and/or modified sequence from HRSV(A2)__F_DSCav1_mut0 (opt4)
gggagacuuucccauucuguagcagaauuugguguugccuguggucuuggucccgcggagaagcuuaccauggagcugcugauccugaaggccaacgccaucaccaccauccugaccgccgugaccuucugcuucgccagcggccagaacaucaccgaggaguucuaccagagcaccugcagcgccgugagcaagggcuaccugagcgcccugagaaccggcugguacaccagcgugaucaccaucgagcugagcaacaucaaggagaacaagugcaacggcaccgacgccaaggugaagcugaucaagcaggagcuggacaaguacaagaacgccgugaccgagcugcagcugcugaugcagagcacccccgccaccggcagcggcagcgccaucgccagcggcguggccgugugcaaggugcugcaccuggagggcgaggugaacaagaucaagagcgcccugcugagcaccaacaaggccguggugagccugagcaacggcgugagcgugcugaccuucaaggugcuggaccugaagaacuacaucgacaagcagcugcugcccauccugaacaagcagagcugcagcaucagcaacaucgagaccgugaucgaguuccagcagaagaacaacagacugcuggagaucaccagagaguucagcgugaacgccggcgugaccacccccgugagcaccuacaugcugaccaacagcgagcugcugagccugaucaacgacaugcccaucaccaacgaccagaagaagcugaugagcaacaacgugcagaucgugagacagcagagcuacagcaucaugugcaucaucaaggaggaggugcuggccuacguggugcagcugccccuguacggcgugaucgacacccccugcuggaagcugcacaccagcccccugugcaccaccaacaccaaggagggcagcaacaucugccugaccagaaccgacagaggcugguacugcgacaacgccggcagcgugagcuucuucccccaggccgagaccugcaaggugcagagcaacagaguguucugcgacaccaugaacagcagaacccugcccagcgaggugaaccugugcaacguggacaucuucaaccccaaguacgacugcaagaucaugaccagcaagaccgacgugagcagcagcgugaucaccagccugggcgccaucgugagcugcuacggcaagaccaagugcaccgccagcaacaagaacagaggcaucaucaagaccuucagcaacggcugcgacuacgugagcaacaagggcguggacaccgugagcgugggcaacacccuguacuacgugaacaagcaggagggcaagagccuguacgugaagggcgagcccaucaucaacuucuacgacccccugguguuccccagcgacgaguucgacgccagcaucagccaggugaacgagaagaucaaccagagccuggccuucaucagaaagagcgacgagcugcugcacaacgugaacgccggcaagagcaccaccaacaucaugaucaccaccaucaucaucgugaucaucgugauccugcugagccugaucgccgugggccugcugcuguacugcaaggccagaagcacccccgugacccugagcaaggaccagcugagcggcaucaacaacaucgccuucagcaacugaggacuagucccuguucccagagcccacuuuuuuuucuuuuuuugaaauaaaauagccugucuuucagaucuaaaaaaaaaaaaaaaaaaaaaaaaaaaaaaaaaaaaaaaaaaaaaaaaaaaaaaaaaaaaaaaaugcaucccccccccccccccccccccccccccccccaaaggcucuuuucagagccaccagaauu

SEQ ID NO: 3896 - RNA, 1876 nt, Artificial Sequence
  mRNA product Design a-5 comprising derived and/or modified sequence from HRSV(A2)__F_DSCav1_mut0 (opt5)
gggagacuuucccauucuguagcagaauuugguguugccuguggucuuggucccgcggagaagcuuaccauggagcugcucauccugaaggccaacgcuauuaccacaauccuuacggccgugaccuucugcuuugcgagcggccagaauauuacagaagaguucuaccaauccaccuguucugcugucagcaaaggguaucuguccgcccucagaacaggaugguacaccucuguuaucacaauugaacugagcaacaucaaggagaauaaaugcaacggcaccgacgccaaggugaaacuuaucaagcaggaacuggauaaguauaaaaaugcugugacggagcuccagcugcugaugcaguccacccccgccacagggucuggaagcgcuauugccuccggcgucgcgguguguaagguucuccaccuggagggggaagugaacaaaaucaagagcgcccuucugucuaccaauaaagcugucgugucccucagcaacggaguuucugugcugacauuuaagguccuugaccugaagaauuacauugauaaacaacuccugccuauccugaacaagcaguccugcagcauuucuaauaucgagaccgugauugaguuccagcagaaaaacaaucggcuccuggaaaucacgcgcgaguuuuccgugaacgccggcgucacaaccccgguuagcacauauaugcuuaccaauuccgaacugcucucucugaucaacgacaugcccauuaccaacgaucaaaagaaacuuaugagcaauaacgugcagaucgugagacagcaguccuacagcauuauguguaucauuaaggaggaaguccuggcuuaugugguucaacucccucuguacggcgugaucgacacacccugcuggaaacugcauacgucuccucucuguaccacaaauaccaaggagggguccaacaucugccugacacggaccgaucgcggaugguacugugacaaugccggcagcgucucuuucuuuccccaggcggaaacgugcaaggugcagagcaacagaguuuucugugauacaaugaacuccagaacccugccuucugaggugaaucucugcaaugucgacauuuuuaacccgaaauaugauugcaagaucaugaccagcaaaacagacguguccagcucugucauuaccucccugggggccaucgugagcuguuacggaaagacaaaaugcacggcuucuaauaagaaccggggcauuaucaagaccuucuccaaugggugugauuauguuagcaacaaaggaguggacacagucuccgugggcaauacccuuuacuauguuaacaagcaagagggcaaaucucuguacgugaagggggaacccaucauuaacuuuuaugacccucucgucuuccccagcgaugaguuugacgccuccaucucucaggugaaugagaaaauuaaccagagccuggcuuucauccgcaaguccgaugaacugcuccacaaugugaacgccggaaagagcacaaccaauauuaugaucacgaccauuaucaucguuauuaucgucauucugcuuucucugaucgccgugggccuccugcuguacugcaaagcuagauccacaccugugacccuuagcaaggaccagcucucugggauuaacaauaucgcguucuccaacugaggacuagucccuguucccagagcccacuuuuuuuucuuuuuuugaaauaaaauagccugucuuucagaucuaaaaaaaaaaaaaaaaaaaaaaaaaaaaaaaaaaaaaaaaaaaaaaaaaaaaaaaaaaaaaaaaugcaucccccccccccccccccccccccccccccccaaaggcucuuuucagagccaccagaauu

SEQ ID NO: 3897 - RNA, 1876 nt, Artificial Sequence
  mRNA product Design a-5 comprising derived and/or modified sequence from HRSV(A2)__F_DSCav1_mut0 (opt6)
gggagacuuucccauucuguagcagaauuugguguugccuguggucuuggucccgcggagaagcuuaccauggaacuacuaauacuaaaagccaaugcaauaacaaccauacuaaccgccguaacauuuuguuucgcaucaggucaaaacauaaccgaagaauuuuaucaaucaacaugcucagcaguaucaaaaggauacuuauccgcucuaagaacaggaugguacacaaguguaauuacaauagagcucucaaacauaaaagaaaacaaaugcaauggaacugacgcaaaaguuaaacuuauaaaacaagaacuagauaaauauaaaaaugcaguaaccgaauuacaacuccuaaugcaauccacaccugcuaccgguuccggaucagccauagcaucuggaguagccguaugcaaaguccuccaccuagaaggagaaguaaauaaaaucaaaucagcacuauuaucuaccaauaaagcaguugucucacuauccaauggcguaucaguacuaacauucaaaguauuagaccuuaaaaacuacauagacaaacaacuauuaccaauucugaacaaacaauccuguucaauaucaaacaucgaaacgguaauagaauuucaacaaaaaaauaacagauuacuugaaauaacaagagaauuuucaguaaaugcaggaguuacaacacccgucuccaccuacaugcucacaaauucagaauuauuaucacuuauaaacgacaugccaauaacuaacgaccaaaaaaaacuaaugucaaacaauguccaaauaguccgacaacaauccuacucaauaaugugcauuauaaaagaagaaguccuagccuacguuguccaacuacccuuauauggaguaauagauaccccaugcuggaaacuucauaccuccccccuaugcacaacaaacacaaaagaaggcucaaacaucugcuuaacacguacagaccgagguugguacugugauaacgcaggauccguaucauuuuucccacaagcagaaacaugcaaaguacaaucaaaccgcguuuuuugugacaccaugaacagcagaacccucccuucagaaguaaaccuaugcaacgucgauauauuuaacccaaaauacgauugcaaaauaaugacaucaaaaaccgaugucucaucuucaguaauaaccucucuaggagcaauagucucauguuacggaaaaacaaaaugcacagcaaguaauaaaaauagaggaauaauaaaaacauucucuaauggcugcgacuacguauccaauaaaggcguugacacaguauccguaggcaacacacucuacuauguuaacaaacaagaaggaaaaaguuuauacguuaaaggagaaccaauuauaaacuuuuacgacccacucguauucccaucugaugaauuugacgcaucaaucucacaaguaaaugaaaaaaucaaucagucccuugccuuuauaagaaaaucagaugaacuuuuacacaacguuaacgccggaaaaucaacaaccaauauaaugaucacaaccauaauaauaguuauaauuguaauuuuauuauccuuaauagccgucggacuacuacuauacugcaaagcaagaucuacacccguaacccuaucaaaagaccaacuaaguggaauaaauaacauugcauucucaaauuaaggacuagucccuguucccagagcccacuuuuuuuucuuuuuuugaaauaaaauagccugucuuucagaucuaaaaaaaaaaaaaaaaaaaaaaaaaaaaaaaaaaaaaaaaaaaaaaaaaaaaaaaaaaaaaaaaugcaucccccccccccccccccccccccccccccccaaaggcucuuuucagagccaccagaauu

SEQ ID NO: 3898 - RNA, 1876 nt, Artificial Sequence
  mRNA product Design a-5 comprising derived and/or modified sequence from HRSV(A2)__F_DSCav1_mut0 (opt11)
gggagacuuucccauucuguagcagaauuugguguugccuguggucuuggucccgcggagaagcuuaccauggaacuccuaauacuaaaggcaaacgcaaucacuacaauucuaaccgccgugacauucugcuucgccuccggacaaaacaucaccgaagaauuuuaccaauccacaugcucggccgucaguaaaggcuaccucucggcucuccgaaccggcugguacaccuccgucaucaccaucgaacucuccaacaucaaagaaaacaaaugcaacggcaccgacgccaaagucaaacuaaucaaacaagaacucgacaaauacaaaaacgccgucacagaacuccaacuacuaaugcaaucaacacccgcuacaggaagcggcuccgccaucgccagcggcguagcugucugcaaaguccuccaccucgaaggugaagucaacaaaaucaaaucagcccuacucagcacaaacaaagccguuguaagccuauccaacggcgucuccguacuaacauucaaaguccuugaccucaagaacuacaucgacaaacaacuucucccaauccuaaacaaacaaagcugcucaauuuccaacaucgaaacaguaaucgaauuucaacaaaaaaacaaccgacuccucgaaaucacccgcgaauuuuccguuaacgccggcguuacaacccccgucuccaccuacaugcucaccaauuccgaacuacuaucacucauaaacgacaugccuaucacaaacgaccaaaaaaaacuaaugucaaacaauguccaaaucguccgccagcaaagcuauuccaucaugugcaucaucaaagaggaaguccucgccuacguaguccaacugccccucuacggcgucauugauacccccugcuggaaacuccacaccuccccccucugcaccacaaacaccaaagaagguuccaacaucugccuaacacgaaccgacagaggcugguacugcgacaacgccggcagcgucuccuucuucccccaagcagaaaccuguaaaguccagucuaaccgcgucuucugcgacacaaugaacucaagaacccuaccuuccgaaguaaaccucugcaacguagacaucuucaacccuaaauacgacugcaaaaucaugacuucaaaaacagacguaagcucuuccguaaucacuucccucggcgccaucguauccugcuacgguaaaaccaaaugcaccgccuccaacaaaaaccgagggaucauaaaaaccuucuccaacggcugcgacuacguaucuaacaaaggcgucgacaccgucuccgucggcaacacccucuauuacguaaacaaacaagagggcaaaucacuauacgucaaaggcgagccaaucauaaacuucuaugacccacucgucuucccuucagacgaauuugaugccagcaucagccaagucaacgaaaaaaucaaccaaucacucgccuucauccgcaaaagcgacgaacuccuucacaacgucaacgcaggcaaaucaaccaccaacaucaugaucaccaccaucaucaucgucaucaucguuauccuacucagccucaucgcaguuggucuucuccuuuacugcaaagcccgcuccacccccgucacccucaguaaagaccaacucagcggaaucaacaacauagcauucuccaacuaaggacuagucccuguucccagagcccacuuuuuuuucuuuuuuugaaauaaaauagccugucuuucagaucuaaaaaaaaaaaaaaaaaaaaaaaaaaaaaaaaaaaaaaaaaaaaaaaaaaaaaaaaaaaaaaaaugcaucccccccccccccccccccccccccccccccaaaggcucuuuucagagccaccagaauu

SEQ ID NO: 3899 - RNA, 2057 nt, Artificial Sequence
  mRNA product Design b-1 comprising derived and/or modified sequence from HRSV(A2)__F_DSCav1_mut0 (opt1)
gggagacggagacggccugcaggaccugcucucucagcccucagccgaggccuacgccgagccgagugcgcagccgacgaccgggaggagccgcagccuucaacucugagguacugugauccgcgcugcccgccgggccgccccaguccgcugcugcggcaccuccuucccucgcgcccucuucgcucgccagcgccuucccugugagccugcgucaccgcggccgccaagcuuaccauggagcugcucauccugaaggccaacgccaucaccaccauccugacggcggugaccuucugcuucgccagcggccagaacaucaccgaggaguucuaccaguccacgugcagcgccgucuccaagggguaccucagcgcccugcggaccggcugguacaccuccgugaucaccaucgagcugagcaacaucaaggagaacaagugcaacgggaccgacgccaaggugaagcucaucaagcaggagcuggacaaguacaagaacgcggucacggagcugcagcuccugaugcaguccaccccggcaaccggcuccggcuccgccaucgcgagcggcgucgccgugugcaaggugcugcaccucgagggggaggucaacaagaucaagagcgcccugcuguccaccaacaaggccguggugagccucuccaacggcgucagcgugcugaccuucaaggugcuggaccucaagaacuacaucgacaagcagcugcugcccauccugaacaagcagagcugcuccaucagcaacaucgagacggugaucgaguuccagcagaagaacaaccggcuccuggagaucacccgcgaguucagcgugaacgccggggucaccacccccguguccacguacaugcugaccaacagcgagcuccugucccugaucaacgacaugccgaucaccaacgaccagaagaagcucaugagcaacaacgugcagaucguccggcagcaguccuacagcaucaugugcaucaucaaggaggaggugcuggcguacgugguccagcugccccucuacggcgugaucgacacccccugcuggaagcugcacacgagcccccugugcaccaccaacaccaaggagggguccaacaucugccucacgcgcaccgaccggggcugguacugcgacaacgccggcagcgucuccuucuucccgcaggccgagaccugcaaggugcagagcaaccgcguguucugcgacaccaugaacucccggacgcugcccagcgagguaaaccucugcaacgucgacaucuucaaccccaaguacgacugcaagaucaugaccuccaagaccgacgugagcuccagcgugaucaccucccugggggccaucgucagcugcuacggcaagacgaagugcaccgccagcaacaagaaccgggggaucaucaagaccuucuccaacggcugcgacuacgugagcaacaagggcguggacaccguguccgucgggaacacccuguacuacgugaacaagcaggagggcaagagccucuacgugaagggggagcccaucaucaacuucuacgacccgcuggucuuccccuccgacgaguucgacgcgagcaucucccaggugaacgagaagaucaaccagagccuggccuucauccgcaaguccgacgagcugcuccacaacgugaacgccggcaagagcacgaccaacaucaugaucaccaccaucaucaucgucaucaucgugauccugcugucccucaucgccguggggcugcugcucuacugcaaggcccggagcacgcccgucacccuguccaaggaccagcugagcggcaucaacaacaucgcguucuccaacugaggacuaguguccaccugucccuccugggcugcuggauugucucguuuuccugccaaauaaacaggaucagcgcuuuacagaucuaaaaaaaaaaaaaaaaaaaaaaaaaaaaaaaaaaaaaaaaaaaaaaaaaaaaaaaaaaaaaaaaugcaucccccccccccccccccccccccccccccccaaaggcucuuuucagagccaccagaauu

SEQ ID NO: 3900 - RNA, 2057 nt, Artificial Sequence
  mRNA product Design b-1 comprising derived and/or modified sequence from HRSV(A2)__F_DSCav1_mut0 (opt1)
gggagacggagacggccugcaggaccugcucucucagcccucagccgaggccuacgccgagccgagugcgcagccgacgaccgggaggagccgcagccuucaacucugagguacugugauccgcgcugcccgccgggccgccccaguccgcugcugcggcaccuccuucccucgcgcccucuucgcucgccagcgccuucccugugagccugcgucaccgcggccgccaagcuuaccauggagcugcucauccugaaggccaacgccaucaccaccauccugacggcggugaccuucugcuucgccagcggccagaacaucaccgaggaguucuaccaguccacgugcagcgccgucuccaagggguaccucagcgcccugcgcaccggcugguacaccuccgugaucaccaucgagcugagcaacaucaaggagaacaagugcaacgggaccgacgccaaggugaagcucaucaagcaggagcuggacaaguacaagaacgcggucacggagcugcagcuccugaugcaguccacccccgccaccggcagcggguccgccaucgccagcggcguggcggugugcaagguccugcaccucgagggcgaggugaacaagaucaaguccgcccugcugagcaccaacaaggccguggucucccucagcaacgggguguccgugcugacguucaagguccuggaccucaagaacuacaucgacaagcagcugcugccgauccucaacaagcagagcugcuccaucagcaacaucgagaccgugaucgaguuccagcagaagaacaaccggcugcuggagaucacccgcgaguucuccgugaacgccggcgucaccacgcccgugagcaccuacaugcucaccaacagcgagcugcugucccucaucaacgacaugcccaucaccaacgaccagaagaagcugaugagcaacaacgugcagaucguccggcagcaguccuacagcaucaugugcaucaucaaggaggaggugcuggccuacgugguccagcucccccuguacggggugaucgacacgccgugcuggaagcugcacaccagcccccucugcaccaccaacacgaaggagggcuccaacaucugccugacccgcaccgaccgggggugguacugcgacaacgcgggcuccgugagcuucuucccccaggccgagaccugcaagguccaguccaaccgcguguucugcgacacgaugaacagccggacccuccccuccgaggucaaccugugcaacguggacaucuucaacccgaaguacgacugcaagaucaugaccagcaagaccgacguguccagcuccgucaucacgagccugggcgccaucguguccugcuacgggaagaccaagugcaccgccagcaacaagaaccggggcaucaucaagaccuucuccaacgggugcgacuacgugagcaacaagggcgucgacacggugagcgugggcaacacccucuacuacgucaacaagcaggaggggaagucccuguacgugaagggcgagcccaucaucaacuucuacgacccccugguguuccccagcgacgaguucgacgccuccaucagccaggucaacgagaagaucaaccagucccucgcguucauccgcaagagcgacgagcugcugcacaacgugaacgccgggaaguccaccaccaacaucaugaucaccacgaucaucaucgugaucaucgucauccuccugagccugaucgccgugggccuccugcuguacugcaaggcccgguccaccccggugacccugagcaaggaccagcucuccgggaucaacaacaucgccuucagcaacugaggacuaguguccaccugucccuccugggcugcuggauugucucguuuuccugccaaauaaacaggaucagcgcuuuacagaucuaaaaaaaaaaaaaaaaaaaaaaaaaaaaaaaaaaaaaaaaaaaaaaaaaaaaaaaaaaaaaaaaugcaucccccccccccccccccccccccccccccccaaaggcucuuuucagagccaccagaauu

SEQ ID NO: 3901 - RNA, 2057 nt, Artificial Sequence
  mRNA product Design b-1 comprising derived and/or modified sequence from HRSV(A2)__F_DSCav1_mut0 (opt2)
gggagacggagacggccugcaggaccugcucucucagcccucagccgaggccuacgccgagccgagugcgcagccgacgaccgggaggagccgcagccuucaacucugagguacugugauccgcgcugcccgccgggccgccccaguccgcugcugcggcaccuccuucccucgcgcccucuucgcucgccagcgccuucccugugagccugcgucaccgcggccgccaagcuuaccauggagcuccucauccucaaggccaacgccaucaccaccauccucaccgccgucaccuucugcuucgccuccggccagaacaucaccgaggaguucuaccaguccaccugcuccgccgucuccaagggcuaccucuccgcccuccgcaccggcugguacaccuccgucaucaccaucgagcucuccaacaucaaggagaacaagugcaacggcaccgacgccaaggucaagcucaucaagcaggagcucgacaaguacaagaacgccgucaccgagcuccagcuccucaugcaguccacccccgccaccggcuccggcuccgccaucgccuccggcgucgccgucugcaagguccuccaccucgagggcgaggucaacaagaucaaguccgcccuccucuccaccaacaaggccgucgucucccucuccaacggcgucuccguccucaccuucaagguccucgaccucaagaacuacaucgacaagcagcuccuccccauccucaacaagcaguccugcuccaucuccaacaucgagaccgucaucgaguuccagcagaagaacaaccgccuccucgagaucacccgcgaguucuccgucaacgccggcgucaccacccccgucuccaccuacaugcucaccaacuccgagcuccucucccucaucaacgacaugcccaucaccaacgaccagaagaagcucauguccaacaacguccagaucguccgccagcaguccuacuccaucaugugcaucaucaaggaggagguccucgccuacgucguccagcucccccucuacggcgucaucgacacccccugcuggaagcuccacaccuccccccucugcaccaccaacaccaaggagggcuccaacaucugccucacccgcaccgaccgcggcugguacugcgacaacgccggcuccgucuccuucuucccccaggccgagaccugcaagguccaguccaaccgcgucuucugcgacaccaugaacucccgcacccuccccuccgaggucaaccucugcaacgucgacaucuucaaccccaaguacgacugcaagaucaugaccuccaagaccgacgucuccuccuccgucaucaccucccucggcgccaucgucuccugcuacggcaagaccaagugcaccgccuccaacaagaaccgcggcaucaucaagaccuucuccaacggcugcgacuacgucuccaacaagggcgucgacaccgucuccgucggcaacacccucuacuacgucaacaagcaggagggcaagucccucuacgucaagggcgagcccaucaucaacuucuacgacccccucgucuuccccuccgacgaguucgacgccuccaucucccaggucaacgagaagaucaaccagucccucgccuucauccgcaaguccgacgagcuccuccacaacgucaacgccggcaaguccaccaccaacaucaugaucaccaccaucaucaucgucaucaucgucauccuccucucccucaucgccgucggccuccuccucuacugcaaggcccgcuccacccccgucacccucuccaaggaccagcucuccggcaucaacaacaucgccuucuccaacugaggacuaguguccaccugucccuccugggcugcuggauugucucguuuuccugccaaauaaacaggaucagcgcuuuacagaucuaaaaaaaaaaaaaaaaaaaaaaaaaaaaaaaaaaaaaaaaaaaaaaaaaaaaaaaaaaaaaaaaugcaucccccccccccccccccccccccccccccccaaaggcucuuuucagagccaccagaauu

SEQ ID NO: 3902 - RNA, 2057 nt, Artificial Sequence
  mRNA product Design b-1 comprising derived and/or modified sequence from HRSV(A2)__F_DSCav1_mut0 (opt3)
gggagacggagacggccugcaggaccugcucucucagcccucagccgaggccuacgccgagccgagugcgcagccgacgaccgggaggagccgcagccuucaacucugagguacugugauccgcgcugcccgccgggccgccccaguccgcugcugcggcaccuccuucccucgcgcccucuucgcucgccagcgccuucccugugagccugcgucaccgcggccgccaagcuuaccauggagcugcucauccuuaaggccaacgcuauuaccacaauacugacugcagugacguucugcuuugccagcggccagaauaucaccgaagaguucuaccaauccacauguucugcggucucaaaaggguauuugagugcuuuaagaacuggaugguacaccagcguuauuacaaucgaacuguccaacauuaaggagaauaaaugcaacgguaccgacgccaaggugaaacuaaucaagcaggaacucgauaaguauaaaaaugcaguaacugagcugcagcuucugaugcagucuacacccgccaccggcucggggucagcuauagcaagcggaguggccgucuguaagguguugcaccucgagggcgaaguuaacaaaaucaagagugcucugcuguccacgaauaaagccguggucucucucagcaacgguguguccguauuaacuuuuaagguucuggaccuuaagaauuacauugauaaacaauugcugccuauccuaaacaagcagucaugcaguauuagcaauaucgagaccgugauagaguuccagcagaaaaacaauaggcuccuggaaauuacacgggaguuuucugucaacgcgggggugacuaccccaguguccacauauaugcuuaccaauucagaacuguugagccucaucaacgacaugccgauuacgaacgaucaaaagaaacugaugaguaauaacguccagaucguucgccagcagucuuacuccaucauguguauuauaaaggaggaaguguuagcauauguagugcaacugccccucuacggagucaucgacacuccuugcuggaaacuucauacaagcccacuguguaccacuaauacaaaggagggcucgaacauuugcuugacccgaacggaucguggcugguacugugacaaugccgggucuguguccuucuuuccccaggcugaaaccugcaagguucagucaaacagaguguucugugauacaaugaauaguagaacucugccuagcgaggucaaccucugcaauguggacaucuuuaacccaaaauaugauugcaagauaaugaccuccaaaacagacguaucuagcucaguuauuaccagucugggagccaucguguccuguuacgguaagacuaaaugcacagcaagcaauaagaacaggggcaucauuaagaccuucucuaaugggugugauuaugucucaaacaaaggaguggacacugucagugugggcaauacgcuuuacuauguuaacaagcaagaggguaaaagccuguacgugaagggggaacccaucauuaacuuuuaugacccuuugguauucccauccgaugaguuugacgcuucuauaucgcaggucaaugagaaaaucaaccagagccucgccuucauucggaaguccgaugaacuguuacacaaugugaacgcgggaaagucaacaaccaauaucaugaucacuaccauuauaaucguuauuaucgugauucugcuaagucucaucgccgucggccugcuuuuguacugcaaagcacgcucuacaccggugacccugagcaaggaccagcucuccggcauaaacaauaucgcuuucucaaacugaggacuaguguccaccugucccuccugggcugcuggauugucucguuuuccugccaaauaaacaggaucagcgcuuuacagaucuaaaaaaaaaaaaaaaaaaaaaaaaaaaaaaaaaaaaaaaaaaaaaaaaaaaaaaaaaaaaaaaaugcaucccccccccccccccccccccccccccccccaaaggcucuuuucagagccaccagaauu

SEQ ID NO: 3903 - RNA, 2057 nt, Artificial Sequence
  mRNA product Design b-1 comprising derived and/or modified sequence from HRSV(A2)__F_DSCav1_mut0 (opt4)
gggagacggagacggccugcaggaccugcucucucagcccucagccgaggccuacgccgagccgagugcgcagccgacgaccgggaggagccgcagccuucaacucugagguacugugauccgcgcugcccgccgggccgccccaguccgcugcugcggcaccuccuucccucgcgcccucuucgcucgccagcgccuucccugugagccugcgucaccgcggccgccaagcuuaccauggagcugcugauccugaaggccaacgccaucaccaccauccugaccgccgugaccuucugcuucgccagcggccagaacaucaccgaggaguucuaccagagcaccugcagcgccgugagcaagggcuaccugagcgcccugagaaccggcugguacaccagcgugaucaccaucgagcugagcaacaucaaggagaacaagugcaacggcaccgacgccaaggugaagcugaucaagcaggagcuggacaaguacaagaacgccgugaccgagcugcagcugcugaugcagagcacccccgccaccggcagcggcagcgccaucgccagcggcguggccgugugcaaggugcugcaccuggagggcgaggugaacaagaucaagagcgcccugcugagcaccaacaaggccguggugagccugagcaacggcgugagcgugcugaccuucaaggugcuggaccugaagaacuacaucgacaagcagcugcugcccauccugaacaagcagagcugcagcaucagcaacaucgagaccgugaucgaguuccagcagaagaacaacagacugcuggagaucaccagagaguucagcgugaacgccggcgugaccacccccgugagcaccuacaugcugaccaacagcgagcugcugagccugaucaacgacaugcccaucaccaacgaccagaagaagcugaugagcaacaacgugcagaucgugagacagcagagcuacagcaucaugugcaucaucaaggaggaggugcuggccuacguggugcagcugccccuguacggcgugaucgacacccccugcuggaagcugcacaccagcccccugugcaccaccaacaccaaggagggcagcaacaucugccugaccagaaccgacagaggcugguacugcgacaacgccggcagcgugagcuucuucccccaggccgagaccugcaaggugcagagcaacagaguguucugcgacaccaugaacagcagaacccugcccagcgaggugaaccugugcaacguggacaucuucaaccccaaguacgacugcaagaucaugaccagcaagaccgacgugagcagcagcgugaucaccagccugggcgccaucgugagcugcuacggcaagaccaagugcaccgccagcaacaagaacagaggcaucaucaagaccuucagcaacggcugcgacuacgugagcaacaagggcguggacaccgugagcgugggcaacacccuguacuacgugaacaagcaggagggcaagagccuguacgugaagggcgagcccaucaucaacuucuacgacccccugguguuccccagcgacgaguucgacgccagcaucagccaggugaacgagaagaucaaccagagccuggccuucaucagaaagagcgacgagcugcugcacaacgugaacgccggcaagagcaccaccaacaucaugaucaccaccaucaucaucgugaucaucgugauccugcugagccugaucgccgugggccugcugcuguacugcaaggccagaagcacccccgugacccugagcaaggaccagcugagcggcaucaacaacaucgccuucagcaacugaggacuaguguccaccugucccuccugggcugcuggauugucucguuuuccugccaaauaaacaggaucagcgcuuuacagaucuaaaaaaaaaaaaaaaaaaaaaaaaaaaaaaaaaaaaaaaaaaaaaaaaaaaaaaaaaaaaaaaaugcaucccccccccccccccccccccccccccccccaaaggcucuuuucagagccaccagaauu

SEQ ID NO: 3904 - RNA, 2057 nt, Artificial Sequence
  mRNA product Design b-1 comprising derived and/or modified sequence from HRSV(A2)__F_DSCav1_mut0 (opt5)
gggagacggagacggccugcaggaccugcucucucagcccucagccgaggccuacgccgagccgagugcgcagccgacgaccgggaggagccgcagccuucaacucugagguacugugauccgcgcugcccgccgggccgccccaguccgcugcugcggcaccuccuucccucgcgcccucuucgcucgccagcgccuucccugugagccugcgucaccgcggccgccaagcuuaccauggagcugcucauccugaaggccaacgcuauuaccacaauccuuacggccgugaccuucugcuuugcgagcggccagaauauuacagaagaguucuaccaauccaccuguucugcugucagcaaaggguaucuguccgcccucagaacaggaugguacaccucuguuaucacaauugaacugagcaacaucaaggagaauaaaugcaacggcaccgacgccaaggugaaacuuaucaagcaggaacuggauaaguauaaaaaugcugugacggagcuccagcugcugaugcaguccacccccgccacagggucuggaagcgcuauugccuccggcgucgcgguguguaagguucuccaccuggagggggaagugaacaaaaucaagagcgcccuucugucuaccaauaaagcugucgugucccucagcaacggaguuucugugcugacauuuaagguccuugaccugaagaauuacauugauaaacaacuccugccuauccugaacaagcaguccugcagcauuucuaauaucgagaccgugauugaguuccagcagaaaaacaaucggcuccuggaaaucacgcgcgaguuuuccgugaacgccggcgucacaaccccgguuagcacauauaugcuuaccaauuccgaacugcucucucugaucaacgacaugcccauuaccaacgaucaaaagaaacuuaugagcaauaacgugcagaucgugagacagcaguccuacagcauuauguguaucauuaaggaggaaguccuggcuuaugugguucaacucccucuguacggcgugaucgacacacccugcuggaaacugcauacgucuccucucuguaccacaaauaccaaggagggguccaacaucugccugacacggaccgaucgcggaugguacugugacaaugccggcagcgucucuuucuuuccccaggcggaaacgugcaaggugcagagcaacagaguuuucugugauacaaugaacuccagaacccugccuucugaggugaaucucugcaaugucgacauuuuuaacccgaaauaugauugcaagaucaugaccagcaaaacagacguguccagcucugucauuaccucccugggggccaucgugagcuguuacggaaagacaaaaugcacggcuucuaauaagaaccggggcauuaucaagaccuucuccaaugggugugauuauguuagcaacaaaggaguggacacagucuccgugggcaauacccuuuacuauguuaacaagcaagagggcaaaucucuguacgugaagggggaacccaucauuaacuuuuaugacccucucgucuuccccagcgaugaguuugacgccuccaucucucaggugaaugagaaaauuaaccagagccuggcuuucauccgcaaguccgaugaacugcuccacaaugugaacgccggaaagagcacaaccaauauuaugaucacgaccauuaucaucguuauuaucgucauucugcuuucucugaucgccgugggccuccugcuguacugcaaagcuagauccacaccugugacccuuagcaaggaccagcucucugggauuaacaauaucgcguucuccaacugaggacuaguguccaccugucccuccugggcugcuggauugucucguuuuccugccaaauaaacaggaucagcgcuuuacagaucuaaaaaaaaaaaaaaaaaaaaaaaaaaaaaaaaaaaaaaaaaaaaaaaaaaaaaaaaaaaaaaaaugcaucccccccccccccccccccccccccccccccaaaggcucuuuucagagccaccagaauu

SEQ ID NO: 3905 - RNA, 2057 nt, Artificial Sequence
  mRNA product Design b-1 comprising derived and/or modified sequence from HRSV(A2)__F_DSCav1_mut0 (opt6)
gggagacggagacggccugcaggaccugcucucucagcccucagccgaggccuacgccgagccgagugcgcagccgacgaccgggaggagccgcagccuucaacucugagguacugugauccgcgcugcccgccgggccgccccaguccgcugcugcggcaccuccuucccucgcgcccucuucgcucgccagcgccuucccugugagccugcgucaccgcggccgccaagcuuaccauggaacuacuaauacuaaaagccaaugcaauaacaaccauacuaaccgccguaacauuuuguuucgcaucaggucaaaacauaaccgaagaauuuuaucaaucaacaugcucagcaguaucaaaaggauacuuauccgcucuaagaacaggaugguacacaaguguaauuacaauagagcucucaaacauaaaagaaaacaaaugcaauggaacugacgcaaaaguuaaacuuauaaaacaagaacuagauaaauauaaaaaugcaguaaccgaauuacaacuccuaaugcaauccacaccugcuaccgguuccggaucagccauagcaucuggaguagccguaugcaaaguccuccaccuagaaggagaaguaaauaaaaucaaaucagcacuauuaucuaccaauaaagcaguugucucacuauccaauggcguaucaguacuaacauucaaaguauuagaccuuaaaaacuacauagacaaacaacuauuaccaauucugaacaaacaauccuguucaauaucaaacaucgaaacgguaauagaauuucaacaaaaaaauaacagauuacuugaaauaacaagagaauuuucaguaaaugcaggaguuacaacacccgucuccaccuacaugcucacaaauucagaauuauuaucacuuauaaacgacaugccaauaacuaacgaccaaaaaaaacuaaugucaaacaauguccaaauaguccgacaacaauccuacucaauaaugugcauuauaaaagaagaaguccuagccuacguuguccaacuacccuuauauggaguaauagauaccccaugcuggaaacuucauaccuccccccuaugcacaacaaacacaaaagaaggcucaaacaucugcuuaacacguacagaccgagguugguacugugauaacgcaggauccguaucauuuuucccacaagcagaaacaugcaaaguacaaucaaaccgcguuuuuugugacaccaugaacagcagaacccucccuucagaaguaaaccuaugcaacgucgauauauuuaacccaaaauacgauugcaaaauaaugacaucaaaaaccgaugucucaucuucaguaauaaccucucuaggagcaauagucucauguuacggaaaaacaaaaugcacagcaaguaauaaaaauagaggaauaauaaaaacauucucuaauggcugcgacuacguauccaauaaaggcguugacacaguauccguaggcaacacacucuacuauguuaacaaacaagaaggaaaaaguuuauacguuaaaggagaaccaauuauaaacuuuuacgacccacucguauucccaucugaugaauuugacgcaucaaucucacaaguaaaugaaaaaaucaaucagucccuugccuuuauaagaaaaucagaugaacuuuuacacaacguuaacgccggaaaaucaacaaccaauauaaugaucacaaccauaauaauaguuauaauuguaauuuuauuauccuuaauagccgucggacuacuacuauacugcaaagcaagaucuacacccguaacccuaucaaaagaccaacuaaguggaauaaauaacauugcauucucaaauuaaggacuaguguccaccugucccuccugggcugcuggauugucucguuuuccugccaaauaaacaggaucagcgcuuuacagaucuaaaaaaaaaaaaaaaaaaaaaaaaaaaaaaaaaaaaaaaaaaaaaaaaaaaaaaaaaaaaaaaaugcaucccccccccccccccccccccccccccccccaaaggcucuuuucagagccaccagaauu

SEQ ID NO: 3906 - RNA, 2057 nt, Artificial Sequence
  mRNA product Design b-1 comprising derived and/or modified sequence from HRSV(A2)__F_DSCav1_mut0 (opt11)
gggagacggagacggccugcaggaccugcucucucagcccucagccgaggccuacgccgagccgagugcgcagccgacgaccgggaggagccgcagccuucaacucugagguacugugauccgcgcugcccgccgggccgccccaguccgcugcugcggcaccuccuucccucgcgcccucuucgcucgccagcgccuucccugugagccugcgucaccgcggccgccaagcuuaccauggaacuccuaauacuaaaggcaaacgcaaucacuacaauucuaaccgccgugacauucugcuucgccuccggacaaaacaucaccgaagaauuuuaccaauccacaugcucggccgucaguaaaggcuaccucucggcucuccgaaccggcugguacaccuccgucaucaccaucgaacucuccaacaucaaagaaaacaaaugcaacggcaccgacgccaaagucaaacuaaucaaacaagaacucgacaaauacaaaaacgccgucacagaacuccaacuacuaaugcaaucaacacccgcuacaggaagcggcuccgccaucgccagcggcguagcugucugcaaaguccuccaccucgaaggugaagucaacaaaaucaaaucagcccuacucagcacaaacaaagccguuguaagccuauccaacggcgucuccguacuaacauucaaaguccuugaccucaagaacuacaucgacaaacaacuucucccaauccuaaacaaacaaagcugcucaauuuccaacaucgaaacaguaaucgaauuucaacaaaaaaacaaccgacuccucgaaaucacccgcgaauuuuccguuaacgccggcguuacaacccccgucuccaccuacaugcucaccaauuccgaacuacuaucacucauaaacgacaugccuaucacaaacgaccaaaaaaaacuaaugucaaacaauguccaaaucguccgccagcaaagcuauuccaucaugugcaucaucaaagaggaaguccucgccuacguaguccaacugccccucuacggcgucauugauacccccugcuggaaacuccacaccuccccccucugcaccacaaacaccaaagaagguuccaacaucugccuaacacgaaccgacagaggcugguacugcgacaacgccggcagcgucuccuucuucccccaagcagaaaccuguaaaguccagucuaaccgcgucuucugcgacacaaugaacucaagaacccuaccuuccgaaguaaaccucugcaacguagacaucuucaacccuaaauacgacugcaaaaucaugacuucaaaaacagacguaagcucuuccguaaucacuucccucggcgccaucguauccugcuacgguaaaaccaaaugcaccgccuccaacaaaaaccgagggaucauaaaaaccuucuccaacggcugcgacuacguaucuaacaaaggcgucgacaccgucuccgucggcaacacccucuauuacguaaacaaacaagagggcaaaucacuauacgucaaaggcgagccaaucauaaacuucuaugacccacucgucuucccuucagacgaauuugaugccagcaucagccaagucaacgaaaaaaucaaccaaucacucgccuucauccgcaaaagcgacgaacuccuucacaacgucaacgcaggcaaaucaaccaccaacaucaugaucaccaccaucaucaucgucaucaucguuauccuacucagccucaucgcaguuggucuucuccuuuacugcaaagcccgcuccacccccgucacccucaguaaagaccaacucagcggaaucaacaacauagcauucuccaacuaaggacuaguguccaccugucccuccugggcugcuggauugucucguuuuccugccaaauaaacaggaucagcgcuuuacagaucuaaaaaaaaaaaaaaaaaaaaaaaaaaaaaaaaaaaaaaaaaaaaaaaaaaaaaaaaaaaaaaaaugcaucccccccccccccccccccccccccccccccaaaggcucuuuucagagccaccagaauu

SEQ ID NO: 3907 - RNA, 1877 nt, Artificial Sequence
  mRNA product Design b-2 comprising derived and/or modified sequence from HRSV(A2)__F_DSCav1_mut0 (opt1)
gggagagccucugcuggaguccggggaguggcguuggcugcuagagcgaagcuuaccauggagcugcucauccugaaggccaacgccaucaccaccauccugacggcggugaccuucugcuucgccagcggccagaacaucaccgaggaguucuaccaguccacgugcagcgccgucuccaagggguaccucagcgcccugcggaccggcugguacaccuccgugaucaccaucgagcugagcaacaucaaggagaacaagugcaacgggaccgacgccaaggugaagcucaucaagcaggagcuggacaaguacaagaacgcggucacggagcugcagcuccugaugcaguccaccccggcaaccggcuccggcuccgccaucgcgagcggcgucgccgugugcaaggugcugcaccucgagggggaggucaacaagaucaagagcgcccugcuguccaccaacaaggccguggugagccucuccaacggcgucagcgugcugaccuucaaggugcuggaccucaagaacuacaucgacaagcagcugcugcccauccugaacaagcagagcugcuccaucagcaacaucgagacggugaucgaguuccagcagaagaacaaccggcuccuggagaucacccgcgaguucagcgugaacgccggggucaccacccccguguccacguacaugcugaccaacagcgagcuccugucccugaucaacgacaugccgaucaccaacgaccagaagaagcucaugagcaacaacgugcagaucguccggcagcaguccuacagcaucaugugcaucaucaaggaggaggugcuggcguacgugguccagcugccccucuacggcgugaucgacacccccugcuggaagcugcacacgagcccccugugcaccaccaacaccaaggagggguccaacaucugccucacgcgcaccgaccggggcugguacugcgacaacgccggcagcgucuccuucuucccgcaggccgagaccugcaaggugcagagcaaccgcguguucugcgacaccaugaacucccggacgcugcccagcgagguaaaccucugcaacgucgacaucuucaaccccaaguacgacugcaagaucaugaccuccaagaccgacgugagcuccagcgugaucaccucccugggggccaucgucagcugcuacggcaagacgaagugcaccgccagcaacaagaaccgggggaucaucaagaccuucuccaacggcugcgacuacgugagcaacaagggcguggacaccguguccgucgggaacacccuguacuacgugaacaagcaggagggcaagagccucuacgugaagggggagcccaucaucaacuucuacgacccgcuggucuuccccuccgacgaguucgacgcgagcaucucccaggugaacgagaagaucaaccagagccuggccuucauccgcaaguccgacgagcugcuccacaacgugaacgccggcaagagcacgaccaacaucaugaucaccaccaucaucaucgucaucaucgugauccugcugucccucaucgccguggggcugcugcucuacugcaaggcccggagcacgcccgucacccuguccaaggaccagcugagcggcaucaacaacaucgcguucuccaacugaggacuaguguccaccugucccuccugggcugcuggauugucucguuuuccugccaaauaaacaggaucagcgcuuuacagaucuaaaaaaaaaaaaaaaaaaaaaaaaaaaaaaaaaaaaaaaaaaaaaaaaaaaaaaaaaaaaaaaaugcaucccccccccccccccccccccccccccccccaaaggcucuuuucagagccaccagaauu

SEQ ID NO: 3908 - RNA, 1877 nt, Artificial Sequence
  mRNA product Design b-2 comprising derived and/or modified sequence from HRSV(A2)__F_DSCav1_mut0 (opt1)
gggagagccucugcuggaguccggggaguggcguuggcugcuagagcgaagcuuaccauggagcugcucauccugaaggccaacgccaucaccaccauccugacggcggugaccuucugcuucgccagcggccagaacaucaccgaggaguucuaccaguccacgugcagcgccgucuccaagggguaccucagcgcccugcgcaccggcugguacaccuccgugaucaccaucgagcugagcaacaucaaggagaacaagugcaacgggaccgacgccaaggugaagcucaucaagcaggagcuggacaaguacaagaacgcggucacggagcugcagcuccugaugcaguccacccccgccaccggcagcggguccgccaucgccagcggcguggcggugugcaagguccugcaccucgagggcgaggugaacaagaucaaguccgcccugcugagcaccaacaaggccguggucucccucagcaacgggguguccgugcugacguucaagguccuggaccucaagaacuacaucgacaagcagcugcugccgauccucaacaagcagagcugcuccaucagcaacaucgagaccgugaucgaguuccagcagaagaacaaccggcugcuggagaucacccgcgaguucuccgugaacgccggcgucaccacgcccgugagcaccuacaugcucaccaacagcgagcugcugucccucaucaacgacaugcccaucaccaacgaccagaagaagcugaugagcaacaacgugcagaucguccggcagcaguccuacagcaucaugugcaucaucaaggaggaggugcuggccuacgugguccagcucccccuguacggggugaucgacacgccgugcuggaagcugcacaccagcccccucugcaccaccaacacgaaggagggcuccaacaucugccugacccgcaccgaccgggggugguacugcgacaacgcgggcuccgugagcuucuucccccaggccgagaccugcaagguccaguccaaccgcguguucugcgacacgaugaacagccggacccuccccuccgaggucaaccugugcaacguggacaucuucaacccgaaguacgacugcaagaucaugaccagcaagaccgacguguccagcuccgucaucacgagccugggcgccaucguguccugcuacgggaagaccaagugcaccgccagcaacaagaaccggggcaucaucaagaccuucuccaacgggugcgacuacgugagcaacaagggcgucgacacggugagcgugggcaacacccucuacuacgucaacaagcaggaggggaagucccuguacgugaagggcgagcccaucaucaacuucuacgacccccugguguuccccagcgacgaguucgacgccuccaucagccaggucaacgagaagaucaaccagucccucgcguucauccgcaagagcgacgagcugcugcacaacgugaacgccgggaaguccaccaccaacaucaugaucaccacgaucaucaucgugaucaucgucauccuccugagccugaucgccgugggccuccugcuguacugcaaggcccgguccaccccggugacccugagcaaggaccagcucuccgggaucaacaacaucgccuucagcaacugaggacuaguguccaccugucccuccugggcugcuggauugucucguuuuccugccaaauaaacaggaucagcgcuuuacagaucuaaaaaaaaaaaaaaaaaaaaaaaaaaaaaaaaaaaaaaaaaaaaaaaaaaaaaaaaaaaaaaaaugcaucccccccccccccccccccccccccccccccaaaggcucuuuucagagccaccagaauu

SEQ ID NO: 3909 - RNA, 1877 nt, Artificial Sequence
  mRNA product Design b-2 comprising derived and/or modified sequence from HRSV(A2)__F_DSCav1_mut0 (opt2)
gggagagccucugcuggaguccggggaguggcguuggcugcuagagcgaagcuuaccauggagcuccucauccucaaggccaacgccaucaccaccauccucaccgccgucaccuucugcuucgccuccggccagaacaucaccgaggaguucuaccaguccaccugcuccgccgucuccaagggcuaccucuccgcccuccgcaccggcugguacaccuccgucaucaccaucgagcucuccaacaucaaggagaacaagugcaacggcaccgacgccaaggucaagcucaucaagcaggagcucgacaaguacaagaacgccgucaccgagcuccagcuccucaugcaguccacccccgccaccggcuccggcuccgccaucgccuccggcgucgccgucugcaagguccuccaccucgagggcgaggucaacaagaucaaguccgcccuccucuccaccaacaaggccgucgucucccucuccaacggcgucuccguccucaccuucaagguccucgaccucaagaacuacaucgacaagcagcuccuccccauccucaacaagcaguccugcuccaucuccaacaucgagaccgucaucgaguuccagcagaagaacaaccgccuccucgagaucacccgcgaguucuccgucaacgccggcgucaccacccccgucuccaccuacaugcucaccaacuccgagcuccucucccucaucaacgacaugcccaucaccaacgaccagaagaagcucauguccaacaacguccagaucguccgccagcaguccuacuccaucaugugcaucaucaaggaggagguccucgccuacgucguccagcucccccucuacggcgucaucgacacccccugcuggaagcuccacaccuccccccucugcaccaccaacaccaaggagggcuccaacaucugccucacccgcaccgaccgcggcugguacugcgacaacgccggcuccgucuccuucuucccccaggccgagaccugcaagguccaguccaaccgcgucuucugcgacaccaugaacucccgcacccuccccuccgaggucaaccucugcaacgucgacaucuucaaccccaaguacgacugcaagaucaugaccuccaagaccgacgucuccuccuccgucaucaccucccucggcgccaucgucuccugcuacggcaagaccaagugcaccgccuccaacaagaaccgcggcaucaucaagaccuucuccaacggcugcgacuacgucuccaacaagggcgucgacaccgucuccgucggcaacacccucuacuacgucaacaagcaggagggcaagucccucuacgucaagggcgagcccaucaucaacuucuacgacccccucgucuuccccuccgacgaguucgacgccuccaucucccaggucaacgagaagaucaaccagucccucgccuucauccgcaaguccgacgagcuccuccacaacgucaacgccggcaaguccaccaccaacaucaugaucaccaccaucaucaucgucaucaucgucauccuccucucccucaucgccgucggccuccuccucuacugcaaggcccgcuccacccccgucacccucuccaaggaccagcucuccggcaucaacaacaucgccuucuccaacugaggacuaguguccaccugucccuccugggcugcuggauugucucguuuuccugccaaauaaacaggaucagcgcuuuacagaucuaaaaaaaaaaaaaaaaaaaaaaaaaaaaaaaaaaaaaaaaaaaaaaaaaaaaaaaaaaaaaaaaugcaucccccccccccccccccccccccccccccccaaaggcucuuuucagagccaccagaauu

SEQ ID NO: 3910 - RNA, 1877 nt, Artificial Sequence
  mRNA product Design b-2 comprising derived and/or modified sequence from HRSV(A2)__F_DSCav1_mut0 (opt3)
gggagagccucugcuggaguccggggaguggcguuggcugcuagagcgaagcuuaccauggagcugcucauccuuaaggccaacgcuauuaccacaauacugacugcagugacguucugcuuugccagcggccagaauaucaccgaagaguucuaccaauccacauguucugcggucucaaaaggguauuugagugcuuuaagaacuggaugguacaccagcguuauuacaaucgaacuguccaacauuaaggagaauaaaugcaacgguaccgacgccaaggugaaacuaaucaagcaggaacucgauaaguauaaaaaugcaguaacugagcugcagcuucugaugcagucuacacccgccaccggcucggggucagcuauagcaagcggaguggccgucuguaagguguugcaccucgagggcgaaguuaacaaaaucaagagugcucugcuguccacgaauaaagccguggucucucucagcaacgguguguccguauuaacuuuuaagguucuggaccuuaagaauuacauugauaaacaauugcugccuauccuaaacaagcagucaugcaguauuagcaauaucgagaccgugauagaguuccagcagaaaaacaauaggcuccuggaaauuacacgggaguuuucugucaacgcgggggugacuaccccaguguccacauauaugcuuaccaauucagaacuguugagccucaucaacgacaugccgauuacgaacgaucaaaagaaacugaugaguaauaacguccagaucguucgccagcagucuuacuccaucauguguauuauaaaggaggaaguguuagcauauguagugcaacugccccucuacggagucaucgacacuccuugcuggaaacuucauacaagcccacuguguaccacuaauacaaaggagggcucgaacauuugcuugacccgaacggaucguggcugguacugugacaaugccgggucuguguccuucuuuccccaggcugaaaccugcaagguucagucaaacagaguguucugugauacaaugaauaguagaacucugccuagcgaggucaaccucugcaauguggacaucuuuaacccaaaauaugauugcaagauaaugaccuccaaaacagacguaucuagcucaguuauuaccagucugggagccaucguguccuguuacgguaagacuaaaugcacagcaagcaauaagaacaggggcaucauuaagaccuucucuaaugggugugauuaugucucaaacaaaggaguggacacugucagugugggcaauacgcuuuacuauguuaacaagcaagaggguaaaagccuguacgugaagggggaacccaucauuaacuuuuaugacccuuugguauucccauccgaugaguuugacgcuucuauaucgcaggucaaugagaaaaucaaccagagccucgccuucauucggaaguccgaugaacuguuacacaaugugaacgcgggaaagucaacaaccaauaucaugaucacuaccauuauaaucguuauuaucgugauucugcuaagucucaucgccgucggccugcuuuuguacugcaaagcacgcucuacaccggugacccugagcaaggaccagcucuccggcauaaacaauaucgcuuucucaaacugaggacuaguguccaccugucccuccugggcugcuggauugucucguuuuccugccaaauaaacaggaucagcgcuuuacagaucuaaaaaaaaaaaaaaaaaaaaaaaaaaaaaaaaaaaaaaaaaaaaaaaaaaaaaaaaaaaaaaaaugcaucccccccccccccccccccccccccccccccaaaggcucuuuucagagccaccagaauu

SEQ ID NO: 3911 - RNA, 1877 nt, Artificial Sequence
  mRNA product Design b-2 comprising derived and/or modified sequence from HRSV(A2)__F_DSCav1_mut0 (opt4)
gggagagccucugcuggaguccggggaguggcguuggcugcuagagcgaagcuuaccauggagcugcugauccugaaggccaacgccaucaccaccauccugaccgccgugaccuucugcuucgccagcggccagaacaucaccgaggaguucuaccagagcaccugcagcgccgugagcaagggcuaccugagcgcccugagaaccggcugguacaccagcgugaucaccaucgagcugagcaacaucaaggagaacaagugcaacggcaccgacgccaaggugaagcugaucaagcaggagcuggacaaguacaagaacgccgugaccgagcugcagcugcugaugcagagcacccccgccaccggcagcggcagcgccaucgccagcggcguggccgugugcaaggugcugcaccuggagggcgaggugaacaagaucaagagcgcccugcugagcaccaacaaggccguggugagccugagcaacggcgugagcgugcugaccuucaaggugcuggaccugaagaacuacaucgacaagcagcugcugcccauccugaacaagcagagcugcagcaucagcaacaucgagaccgugaucgaguuccagcagaagaacaacagacugcuggagaucaccagagaguucagcgugaacgccggcgugaccacccccgugagcaccuacaugcugaccaacagcgagcugcugagccugaucaacgacaugcccaucaccaacgaccagaagaagcugaugagcaacaacgugcagaucgugagacagcagagcuacagcaucaugugcaucaucaaggaggaggugcuggccuacguggugcagcugccccuguacggcgugaucgacacccccugcuggaagcugcacaccagcccccugugcaccaccaacaccaaggagggcagcaacaucugccugaccagaaccgacagaggcugguacugcgacaacgccggcagcgugagcuucuucccccaggccgagaccugcaaggugcagagcaacagaguguucugcgacaccaugaacagcagaacccugcccagcgaggugaaccugugcaacguggacaucuucaaccccaaguacgacugcaagaucaugaccagcaagaccgacgugagcagcagcgugaucaccagccugggcgccaucgugagcugcuacggcaagaccaagugcaccgccagcaacaagaacagaggcaucaucaagaccuucagcaacggcugcgacuacgugagcaacaagggcguggacaccgugagcgugggcaacacccuguacuacgugaacaagcaggagggcaagagccuguacgugaagggcgagcccaucaucaacuucuacgacccccugguguuccccagcgacgaguucgacgccagcaucagccaggugaacgagaagaucaaccagagccuggccuucaucagaaagagcgacgagcugcugcacaacgugaacgccggcaagagcaccaccaacaucaugaucaccaccaucaucaucgugaucaucgugauccugcugagccugaucgccgugggccugcugcuguacugcaaggccagaagcacccccgugacccugagcaaggaccagcugagcggcaucaacaacaucgccuucagcaacugaggacuaguguccaccugucccuccugggcugcuggauugucucguuuuccugccaaauaaacaggaucagcgcuuuacagaucuaaaaaaaaaaaaaaaaaaaaaaaaaaaaaaaaaaaaaaaaaaaaaaaaaaaaaaaaaaaaaaaaugcaucccccccccccccccccccccccccccccccaaaggcucuuuucagagccaccagaauu

SEQ ID NO: 3912 - RNA, 1877 nt, Artificial Sequence
  mRNA product Design b-2 comprising derived and/or modified sequence from HRSV(A2)__F_DSCav1_mut0 (opt5)
gggagagccucugcuggaguccggggaguggcguuggcugcuagagcgaagcuuaccauggagcugcucauccugaaggccaacgcuauuaccacaauccuuacggccgugaccuucugcuuugcgagcggccagaauauuacagaagaguucuaccaauccaccuguucugcugucagcaaaggguaucuguccgcccucagaacaggaugguacaccucuguuaucacaauugaacugagcaacaucaaggagaauaaaugcaacggcaccgacgccaaggugaaacuuaucaagcaggaacuggauaaguauaaaaaugcugugacggagcuccagcugcugaugcaguccacccccgccacagggucuggaagcgcuauugccuccggcgucgcgguguguaagguucuccaccuggagggggaagugaacaaaaucaagagcgcccuucugucuaccaauaaagcugucgugucccucagcaacggaguuucugugcugacauuuaagguccuugaccugaagaauuacauugauaaacaacuccugccuauccugaacaagcaguccugcagcauuucuaauaucgagaccgugauugaguuccagcagaaaaacaaucggcuccuggaaaucacgcgcgaguuuuccgugaacgccggcgucacaaccccgguuagcacauauaugcuuaccaauuccgaacugcucucucugaucaacgacaugcccauuaccaacgaucaaaagaaacuuaugagcaauaacgugcagaucgugagacagcaguccuacagcauuauguguaucauuaaggaggaaguccuggcuuaugugguucaacucccucuguacggcgugaucgacacacccugcuggaaacugcauacgucuccucucuguaccacaaauaccaaggagggguccaacaucugccugacacggaccgaucgcggaugguacugugacaaugccggcagcgucucuuucuuuccccaggcggaaacgugcaaggugcagagcaacagaguuuucugugauacaaugaacuccagaacccugccuucugaggugaaucucugcaaugucgacauuuuuaacccgaaauaugauugcaagaucaugaccagcaaaacagacguguccagcucugucauuaccucccugggggccaucgugagcuguuacggaaagacaaaaugcacggcuucuaauaagaaccggggcauuaucaagaccuucuccaaugggugugauuauguuagcaacaaaggaguggacacagucuccgugggcaauacccuuuacuauguuaacaagcaagagggcaaaucucuguacgugaagggggaacccaucauuaacuuuuaugacccucucgucuuccccagcgaugaguuugacgccuccaucucucaggugaaugagaaaauuaaccagagccuggcuuucauccgcaaguccgaugaacugcuccacaaugugaacgccggaaagagcacaaccaauauuaugaucacgaccauuaucaucguuauuaucgucauucugcuuucucugaucgccgugggccuccugcuguacugcaaagcuagauccacaccugugacccuuagcaaggaccagcucucugggauuaacaauaucgcguucuccaacugaggacuaguguccaccugucccuccugggcugcuggauugucucguuuuccugccaaauaaacaggaucagcgcuuuacagaucuaaaaaaaaaaaaaaaaaaaaaaaaaaaaaaaaaaaaaaaaaaaaaaaaaaaaaaaaaaaaaaaaugcaucccccccccccccccccccccccccccccccaaaggcucuuuucagagccaccagaauu

SEQ ID NO: 3913 - RNA, 1877 nt, Artificial Sequence
  mRNA product Design b-2 comprising derived and/or modified sequence from HRSV(A2)__F_DSCav1_mut0 (opt6)
gggagagccucugcuggaguccggggaguggcguuggcugcuagagcgaagcuuaccauggaacuacuaauacuaaaagccaaugcaauaacaaccauacuaaccgccguaacauuuuguuucgcaucaggucaaaacauaaccgaagaauuuuaucaaucaacaugcucagcaguaucaaaaggauacuuauccgcucuaagaacaggaugguacacaaguguaauuacaauagagcucucaaacauaaaagaaaacaaaugcaauggaacugacgcaaaaguuaaacuuauaaaacaagaacuagauaaauauaaaaaugcaguaaccgaauuacaacuccuaaugcaauccacaccugcuaccgguuccggaucagccauagcaucuggaguagccguaugcaaaguccuccaccuagaaggagaaguaaauaaaaucaaaucagcacuauuaucuaccaauaaagcaguugucucacuauccaauggcguaucaguacuaacauucaaaguauuagaccuuaaaaacuacauagacaaacaacuauuaccaauucugaacaaacaauccuguucaauaucaaacaucgaaacgguaauagaauuucaacaaaaaaauaacagauuacuugaaauaacaagagaauuuucaguaaaugcaggaguuacaacacccgucuccaccuacaugcucacaaauucagaauuauuaucacuuauaaacgacaugccaauaacuaacgaccaaaaaaaacuaaugucaaacaauguccaaauaguccgacaacaauccuacucaauaaugugcauuauaaaagaagaaguccuagccuacguuguccaacuacccuuauauggaguaauagauaccccaugcuggaaacuucauaccuccccccuaugcacaacaaacacaaaagaaggcucaaacaucugcuuaacacguacagaccgagguugguacugugauaacgcaggauccguaucauuuuucccacaagcagaaacaugcaaaguacaaucaaaccgcguuuuuugugacaccaugaacagcagaacccucccuucagaaguaaaccuaugcaacgucgauauauuuaacccaaaauacgauugcaaaauaaugacaucaaaaaccgaugucucaucuucaguaauaaccucucuaggagcaauagucucauguuacggaaaaacaaaaugcacagcaaguaauaaaaauagaggaauaauaaaaacauucucuaauggcugcgacuacguauccaauaaaggcguugacacaguauccguaggcaacacacucuacuauguuaacaaacaagaaggaaaaaguuuauacguuaaaggagaaccaauuauaaacuuuuacgacccacucguauucccaucugaugaauuugacgcaucaaucucacaaguaaaugaaaaaaucaaucagucccuugccuuuauaagaaaaucagaugaacuuuuacacaacguuaacgccggaaaaucaacaaccaauauaaugaucacaaccauaauaauaguuauaauuguaauuuuauuauccuuaauagccgucggacuacuacuauacugcaaagcaagaucuacacccguaacccuaucaaaagaccaacuaaguggaauaaauaacauugcauucucaaauuaaggacuaguguccaccugucccuccugggcugcuggauugucucguuuuccugccaaauaaacaggaucagcgcuuuacagaucuaaaaaaaaaaaaaaaaaaaaaaaaaaaaaaaaaaaaaaaaaaaaaaaaaaaaaaaaaaaaaaaaugcaucccccccccccccccccccccccccccccccaaaggcucuuuucagagccaccagaauu

SEQ ID NO: 3914 - RNA, 1877 nt, Artificial Sequence
  mRNA product Design b-2 comprising derived and/or modified sequence from HRSV(A2)__F_DSCav1_mut0 (opt11)
gggagagccucugcuggaguccggggaguggcguuggcugcuagagcgaagcuuaccauggaacuccuaauacuaaaggcaaacgcaaucacuacaauucuaaccgccgugacauucugcuucgccuccggacaaaacaucaccgaagaauuuuaccaauccacaugcucggccgucaguaaaggcuaccucucggcucuccgaaccggcugguacaccuccgucaucaccaucgaacucuccaacaucaaagaaaacaaaugcaacggcaccgacgccaaagucaaacuaaucaaacaagaacucgacaaauacaaaaacgccgucacagaacuccaacuacuaaugcaaucaacacccgcuacaggaagcggcuccgccaucgccagcggcguagcugucugcaaaguccuccaccucgaaggugaagucaacaaaaucaaaucagcccuacucagcacaaacaaagccguuguaagccuauccaacggcgucuccguacuaacauucaaaguccuugaccucaagaacuacaucgacaaacaacuucucccaauccuaaacaaacaaagcugcucaauuuccaacaucgaaacaguaaucgaauuucaacaaaaaaacaaccgacuccucgaaaucacccgcgaauuuuccguuaacgccggcguuacaacccccgucuccaccuacaugcucaccaauuccgaacuacuaucacucauaaacgacaugccuaucacaaacgaccaaaaaaaacuaaugucaaacaauguccaaaucguccgccagcaaagcuauuccaucaugugcaucaucaaagaggaaguccucgccuacguaguccaacugccccucuacggcgucauugauacccccugcuggaaacuccacaccuccccccucugcaccacaaacaccaaagaagguuccaacaucugccuaacacgaaccgacagaggcugguacugcgacaacgccggcagcgucuccuucuucccccaagcagaaaccuguaaaguccagucuaaccgcgucuucugcgacacaaugaacucaagaacccuaccuuccgaaguaaaccucugcaacguagacaucuucaacccuaaauacgacugcaaaaucaugacuucaaaaacagacguaagcucuuccguaaucacuucccucggcgccaucguauccugcuacgguaaaaccaaaugcaccgccuccaacaaaaaccgagggaucauaaaaaccuucuccaacggcugcgacuacguaucuaacaaaggcgucgacaccgucuccgucggcaacacccucuauuacguaaacaaacaagagggcaaaucacuauacgucaaaggcgagccaaucauaaacuucuaugacccacucgucuucccuucagacgaauuugaugccagcaucagccaagucaacgaaaaaaucaaccaaucacucgccuucauccgcaaaagcgacgaacuccuucacaacgucaacgcaggcaaaucaaccaccaacaucaugaucaccaccaucaucaucgucaucaucguuauccuacucagccucaucgcaguuggucuucuccuuuacugcaaagcccgcuccacccccgucacccucaguaaagaccaacucagcggaaucaacaacauagcauucuccaacuaaggacuaguguccaccugucccuccugggcugcuggauugucucguuuuccugccaaauaaacaggaucagcgcuuuacagaucuaaaaaaaaaaaaaaaaaaaaaaaaaaaaaaaaaaaaaaaaaaaaaaaaaaaaaaaaaaaaaaaaugcaucccccccccccccccccccccccccccccccaaaggcucuuuucagagccaccagaauu

SEQ ID NO: 3915 - RNA, 1897 nt, Artificial Sequence
  mRNA product Design b-3 comprising derived and/or modified sequence from HRSV(A2)__F_DSCav1_mut0 (opt1)
gggagagucccgcagucggcguccagcggcucugcuuguucgugugugugucguugcaggccuuauucaagcuuaccauggagcugcucauccugaaggccaacgccaucaccaccauccugacggcggugaccuucugcuucgccagcggccagaacaucaccgaggaguucuaccaguccacgugcagcgccgucuccaagggguaccucagcgcccugcggaccggcugguacaccuccgugaucaccaucgagcugagcaacaucaaggagaacaagugcaacgggaccgacgccaaggugaagcucaucaagcaggagcuggacaaguacaagaacgcggucacggagcugcagcuccugaugcaguccaccccggcaaccggcuccggcuccgccaucgcgagcggcgucgccgugugcaaggugcugcaccucgagggggaggucaacaagaucaagagcgcccugcuguccaccaacaaggccguggugagccucuccaacggcgucagcgugcugaccuucaaggugcuggaccucaagaacuacaucgacaagcagcugcugcccauccugaacaagcagagcugcuccaucagcaacaucgagacggugaucgaguuccagcagaagaacaaccggcuccuggagaucacccgcgaguucagcgugaacgccggggucaccacccccguguccacguacaugcugaccaacagcgagcuccugucccugaucaacgacaugccgaucaccaacgaccagaagaagcucaugagcaacaacgugcagaucguccggcagcaguccuacagcaucaugugcaucaucaaggaggaggugcuggcguacgugguccagcugccccucuacggcgugaucgacacccccugcuggaagcugcacacgagcccccugugcaccaccaacaccaaggagggguccaacaucugccucacgcgcaccgaccggggcugguacugcgacaacgccggcagcgucuccuucuucccgcaggccgagaccugcaaggugcagagcaaccgcguguucugcgacaccaugaacucccggacgcugcccagcgagguaaaccucugcaacgucgacaucuucaaccccaaguacgacugcaagaucaugaccuccaagaccgacgugagcuccagcgugaucaccucccugggggccaucgucagcugcuacggcaagacgaagugcaccgccagcaacaagaaccgggggaucaucaagaccuucuccaacggcugcgacuacgugagcaacaagggcguggacaccguguccgucgggaacacccuguacuacgugaacaagcaggagggcaagagccucuacgugaagggggagcccaucaucaacuucuacgacccgcuggucuuccccuccgacgaguucgacgcgagcaucucccaggugaacgagaagaucaaccagagccuggccuucauccgcaaguccgacgagcugcuccacaacgugaacgccggcaagagcacgaccaacaucaugaucaccaccaucaucaucgucaucaucgugauccugcugucccucaucgccguggggcugcugcucuacugcaaggcccggagcacgcccgucacccuguccaaggaccagcugagcggcaucaacaacaucgcguucuccaacugaggacuaguguccaccugucccuccugggcugcuggauugucucguuuuccugccaaauaaacaggaucagcgcuuuacagaucuaaaaaaaaaaaaaaaaaaaaaaaaaaaaaaaaaaaaaaaaaaaaaaaaaaaaaaaaaaaaaaaaugcaucccccccccccccccccccccccccccccccaaaggcucuuuucagagccaccagaauu

SEQ ID NO: 3916 - RNA, 1897 nt, Artificial Sequence
  mRNA product Design b-3 comprising derived and/or modified sequence from HRSV(A2)__F_DSCav1_mut0 (opt1)
gggagagucccgcagucggcguccagcggcucugcuuguucgugugugugucguugcaggccuuauucaagcuuaccauggagcugcucauccugaaggccaacgccaucaccaccauccugacggcggugaccuucugcuucgccagcggccagaacaucaccgaggaguucuaccaguccacgugcagcgccgucuccaagggguaccucagcgcccugcgcaccggcugguacaccuccgugaucaccaucgagcugagcaacaucaaggagaacaagugcaacgggaccgacgccaaggugaagcucaucaagcaggagcuggacaaguacaagaacgcggucacggagcugcagcuccugaugcaguccacccccgccaccggcagcggguccgccaucgccagcggcguggcggugugcaagguccugcaccucgagggcgaggugaacaagaucaaguccgcccugcugagcaccaacaaggccguggucucccucagcaacgggguguccgugcugacguucaagguccuggaccucaagaacuacaucgacaagcagcugcugccgauccucaacaagcagagcugcuccaucagcaacaucgagaccgugaucgaguuccagcagaagaacaaccggcugcuggagaucacccgcgaguucuccgugaacgccggcgucaccacgcccgugagcaccuacaugcucaccaacagcgagcugcugucccucaucaacgacaugcccaucaccaacgaccagaagaagcugaugagcaacaacgugcagaucguccggcagcaguccuacagcaucaugugcaucaucaaggaggaggugcuggccuacgugguccagcucccccuguacggggugaucgacacgccgugcuggaagcugcacaccagcccccucugcaccaccaacacgaaggagggcuccaacaucugccugacccgcaccgaccgggggugguacugcgacaacgcgggcuccgugagcuucuucccccaggccgagaccugcaagguccaguccaaccgcguguucugcgacacgaugaacagccggacccuccccuccgaggucaaccugugcaacguggacaucuucaacccgaaguacgacugcaagaucaugaccagcaagaccgacguguccagcuccgucaucacgagccugggcgccaucguguccugcuacgggaagaccaagugcaccgccagcaacaagaaccggggcaucaucaagaccuucuccaacgggugcgacuacgugagcaacaagggcgucgacacggugagcgugggcaacacccucuacuacgucaacaagcaggaggggaagucccuguacgugaagggcgagcccaucaucaacuucuacgacccccugguguuccccagcgacgaguucgacgccuccaucagccaggucaacgagaagaucaaccagucccucgcguucauccgcaagagcgacgagcugcugcacaacgugaacgccgggaaguccaccaccaacaucaugaucaccacgaucaucaucgugaucaucgucauccuccugagccugaucgccgugggccuccugcuguacugcaaggcccgguccaccccggugacccugagcaaggaccagcucuccgggaucaacaacaucgccuucagcaacugaggacuaguguccaccugucccuccugggcugcuggauugucucguuuuccugccaaauaaacaggaucagcgcuuuacagaucuaaaaaaaaaaaaaaaaaaaaaaaaaaaaaaaaaaaaaaaaaaaaaaaaaaaaaaaaaaaaaaaaugcaucccccccccccccccccccccccccccccccaaaggcucuuuucagagccaccagaauu

SEQ ID NO: 3917 - RNA, 1897 nt, Artificial Sequence
  mRNA product Design b-3 comprising derived and/or modified sequence from HRSV(A2)__F_DSCav1_mut0 (opt2)
gggagagucccgcagucggcguccagcggcucugcuuguucgugugugugucguugcaggccuuauucaagcuuaccauggagcuccucauccucaaggccaacgccaucaccaccauccucaccgccgucaccuucugcuucgccuccggccagaacaucaccgaggaguucuaccaguccaccugcuccgccgucuccaagggcuaccucuccgcccuccgcaccggcugguacaccuccgucaucaccaucgagcucuccaacaucaaggagaacaagugcaacggcaccgacgccaaggucaagcucaucaagcaggagcucgacaaguacaagaacgccgucaccgagcuccagcuccucaugcaguccacccccgccaccggcuccggcuccgccaucgccuccggcgucgccgucugcaagguccuccaccucgagggcgaggucaacaagaucaaguccgcccuccucuccaccaacaaggccgucgucucccucuccaacggcgucuccguccucaccuucaagguccucgaccucaagaacuacaucgacaagcagcuccuccccauccucaacaagcaguccugcuccaucuccaacaucgagaccgucaucgaguuccagcagaagaacaaccgccuccucgagaucacccgcgaguucuccgucaacgccggcgucaccacccccgucuccaccuacaugcucaccaacuccgagcuccucucccucaucaacgacaugcccaucaccaacgaccagaagaagcucauguccaacaacguccagaucguccgccagcaguccuacuccaucaugugcaucaucaaggaggagguccucgccuacgucguccagcucccccucuacggcgucaucgacacccccugcuggaagcuccacaccuccccccucugcaccaccaacaccaaggagggcuccaacaucugccucacccgcaccgaccgcggcugguacugcgacaacgccggcuccgucuccuucuucccccaggccgagaccugcaagguccaguccaaccgcgucuucugcgacaccaugaacucccgcacccuccccuccgaggucaaccucugcaacgucgacaucuucaaccccaaguacgacugcaagaucaugaccuccaagaccgacgucuccuccuccgucaucaccucccucggcgccaucgucuccugcuacggcaagaccaagugcaccgccuccaacaagaaccgcggcaucaucaagaccuucuccaacggcugcgacuacgucuccaacaagggcgucgacaccgucuccgucggcaacacccucuacuacgucaacaagcaggagggcaagucccucuacgucaagggcgagcccaucaucaacuucuacgacccccucgucuuccccuccgacgaguucgacgccuccaucucccaggucaacgagaagaucaaccagucccucgccuucauccgcaaguccgacgagcuccuccacaacgucaacgccggcaaguccaccaccaacaucaugaucaccaccaucaucaucgucaucaucgucauccuccucucccucaucgccgucggccuccuccucuacugcaaggcccgcuccacccccgucacccucuccaaggaccagcucuccggcaucaacaacaucgccuucuccaacugaggacuaguguccaccugucccuccugggcugcuggauugucucguuuuccugccaaauaaacaggaucagcgcuuuacagaucuaaaaaaaaaaaaaaaaaaaaaaaaaaaaaaaaaaaaaaaaaaaaaaaaaaaaaaaaaaaaaaaaugcaucccccccccccccccccccccccccccccccaaaggcucuuuucagagccaccagaauu

SEQ ID NO: 3918 - RNA, 1897 nt, Artificial Sequence
  mRNA product Design b-3 comprising derived and/or modified sequence from HRSV(A2)__F_DSCav1_mut0 (opt3)
gggagagucccgcagucggcguccagcggcucugcuuguucgugugugugucguugcaggccuuauucaagcuuaccauggagcugcucauccuuaaggccaacgcuauuaccacaauacugacugcagugacguucugcuuugccagcggccagaauaucaccgaagaguucuaccaauccacauguucugcggucucaaaaggguauuugagugcuuuaagaacuggaugguacaccagcguuauuacaaucgaacuguccaacauuaaggagaauaaaugcaacgguaccgacgccaaggugaaacuaaucaagcaggaacucgauaaguauaaaaaugcaguaacugagcugcagcuucugaugcagucuacacccgccaccggcucggggucagcuauagcaagcggaguggccgucuguaagguguugcaccucgagggcgaaguuaacaaaaucaagagugcucugcuguccacgaauaaagccguggucucucucagcaacgguguguccguauuaacuuuuaagguucuggaccuuaagaauuacauugauaaacaauugcugccuauccuaaacaagcagucaugcaguauuagcaauaucgagaccgugauagaguuccagcagaaaaacaauaggcuccuggaaauuacacgggaguuuucugucaacgcgggggugacuaccccaguguccacauauaugcuuaccaauucagaacuguugagccucaucaacgacaugccgauuacgaacgaucaaaagaaacugaugaguaauaacguccagaucguucgccagcagucuuacuccaucauguguauuauaaaggaggaaguguuagcauauguagugcaacugccccucuacggagucaucgacacuccuugcuggaaacuucauacaagcccacuguguaccacuaauacaaaggagggcucgaacauuugcuugacccgaacggaucguggcugguacugugacaaugccgggucuguguccuucuuuccccaggcugaaaccugcaagguucagucaaacagaguguucugugauacaaugaauaguagaacucugccuagcgaggucaaccucugcaauguggacaucuuuaacccaaaauaugauugcaagauaaugaccuccaaaacagacguaucuagcucaguuauuaccagucugggagccaucguguccuguuacgguaagacuaaaugcacagcaagcaauaagaacaggggcaucauuaagaccuucucuaaugggugugauuaugucucaaacaaaggaguggacacugucagugugggcaauacgcuuuacuauguuaacaagcaagaggguaaaagccuguacgugaagggggaacccaucauuaacuuuuaugacccuuugguauucccauccgaugaguuugacgcuucuauaucgcaggucaaugagaaaaucaaccagagccucgccuucauucggaaguccgaugaacuguuacacaaugugaacgcgggaaagucaacaaccaauaucaugaucacuaccauuauaaucguuauuaucgugauucugcuaagucucaucgccgucggccugcuuuuguacugcaaagcacgcucuacaccggugacccugagcaaggaccagcucuccggcauaaacaauaucgcuuucucaaacugaggacuaguguccaccugucccuccugggcugcuggauugucucguuuuccugccaaauaaacaggaucagcgcuuuacagaucuaaaaaaaaaaaaaaaaaaaaaaaaaaaaaaaaaaaaaaaaaaaaaaaaaaaaaaaaaaaaaaaaugcaucccccccccccccccccccccccccccccccaaaggcucuuuucagagccaccagaauu

SEQ ID NO: 3919 - RNA, 1897 nt, Artificial Sequence
  mRNA product Design b-3 comprising derived and/or modified sequence from HRSV(A2)__F_DSCav1_mut0 (opt4)
gggagagucccgcagucggcguccagcggcucugcuuguucgugugugugucguugcaggccuuauucaagcuuaccauggagcugcugauccugaaggccaacgccaucaccaccauccugaccgccgugaccuucugcuucgccagcggccagaacaucaccgaggaguucuaccagagcaccugcagcgccgugagcaagggcuaccugagcgcccugagaaccggcugguacaccagcgugaucaccaucgagcugagcaacaucaaggagaacaagugcaacggcaccgacgccaaggugaagcugaucaagcaggagcuggacaaguacaagaacgccgugaccgagcugcagcugcugaugcagagcacccccgccaccggcagcggcagcgccaucgccagcggcguggccgugugcaaggugcugcaccuggagggcgaggugaacaagaucaagagcgcccugcugagcaccaacaaggccguggugagccugagcaacggcgugagcgugcugaccuucaaggugcuggaccugaagaacuacaucgacaagcagcugcugcccauccugaacaagcagagcugcagcaucagcaacaucgagaccgugaucgaguuccagcagaagaacaacagacugcuggagaucaccagagaguucagcgugaacgccggcgugaccacccccgugagcaccuacaugcugaccaacagcgagcugcugagccugaucaacgacaugcccaucaccaacgaccagaagaagcugaugagcaacaacgugcagaucgugagacagcagagcuacagcaucaugugcaucaucaaggaggaggugcuggccuacguggugcagcugccccuguacggcgugaucgacacccccugcuggaagcugcacaccagcccccugugcaccaccaacaccaaggagggcagcaacaucugccugaccagaaccgacagaggcugguacugcgacaacgccggcagcgugagcuucuucccccaggccgagaccugcaaggugcagagcaacagaguguucugcgacaccaugaacagcagaacccugcccagcgaggugaaccugugcaacguggacaucuucaaccccaaguacgacugcaagaucaugaccagcaagaccgacgugagcagcagcgugaucaccagccugggcgccaucgugagcugcuacggcaagaccaagugcaccgccagcaacaagaacagaggcaucaucaagaccuucagcaacggcugcgacuacgugagcaacaagggcguggacaccgugagcgugggcaacacccuguacuacgugaacaagcaggagggcaagagccuguacgugaagggcgagcccaucaucaacuucuacgacccccugguguuccccagcgacgaguucgacgccagcaucagccaggugaacgagaagaucaaccagagccuggccuucaucagaaagagcgacgagcugcugcacaacgugaacgccggcaagagcaccaccaacaucaugaucaccaccaucaucaucgugaucaucgugauccugcugagccugaucgccgugggccugcugcuguacugcaaggccagaagcacccccgugacccugagcaaggaccagcugagcggcaucaacaacaucgccuucagcaacugaggacuaguguccaccugucccuccugggcugcuggauugucucguuuuccugccaaauaaacaggaucagcgcuuuacagaucuaaaaaaaaaaaaaaaaaaaaaaaaaaaaaaaaaaaaaaaaaaaaaaaaaaaaaaaaaaaaaaaaugcaucccccccccccccccccccccccccccccccaaaggcucuuuucagagccaccagaauu

SEQ ID NO: 3920 - RNA, 1897 nt, Artificial Sequence
  mRNA product Design b-3 comprising derived and/or modified sequence from HRSV(A2)__F_DSCav1_mut0 (opt5)
gggagagucccgcagucggcguccagcggcucugcuuguucgugugugugucguugcaggccuuauucaagcuuaccauggagcugcucauccugaaggccaacgcuauuaccacaauccuuacggccgugaccuucugcuuugcgagcggccagaauauuacagaagaguucuaccaauccaccuguucugcugucagcaaaggguaucuguccgcccucagaacaggaugguacaccucuguuaucacaauugaacugagcaacaucaaggagaauaaaugcaacggcaccgacgccaaggugaaacuuaucaagcaggaacuggauaaguauaaaaaugcugugacggagcuccagcugcugaugcaguccacccccgccacagggucuggaagcgcuauugccuccggcgucgcgguguguaagguucuccaccuggagggggaagugaacaaaaucaagagcgcccuucugucuaccaauaaagcugucgugucccucagcaacggaguuucugugcugacauuuaagguccuugaccugaagaauuacauugauaaacaacuccugccuauccugaacaagcaguccugcagcauuucuaauaucgagaccgugauugaguuccagcagaaaaacaaucggcuccuggaaaucacgcgcgaguuuuccgugaacgccggcgucacaaccccgguuagcacauauaugcuuaccaauuccgaacugcucucucugaucaacgacaugcccauuaccaacgaucaaaagaaacuuaugagcaauaacgugcagaucgugagacagcaguccuacagcauuauguguaucauuaaggaggaaguccuggcuuaugugguucaacucccucuguacggcgugaucgacacacccugcuggaaacugcauacgucuccucucuguaccacaaauaccaaggagggguccaacaucugccugacacggaccgaucgcggaugguacugugacaaugccggcagcgucucuuucuuuccccaggcggaaacgugcaaggugcagagcaacagaguuuucugugauacaaugaacuccagaacccugccuucugaggugaaucucugcaaugucgacauuuuuaacccgaaauaugauugcaagaucaugaccagcaaaacagacguguccagcucugucauuaccucccugggggccaucgugagcuguuacggaaagacaaaaugcacggcuucuaauaagaaccggggcauuaucaagaccuucuccaaugggugugauuauguuagcaacaaaggaguggacacagucuccgugggcaauacccuuuacuauguuaacaagcaagagggcaaaucucuguacgugaagggggaacccaucauuaacuuuuaugacccucucgucuuccccagcgaugaguuugacgccuccaucucucaggugaaugagaaaauuaaccagagccuggcuuucauccgcaaguccgaugaacugcuccacaaugugaacgccggaaagagcacaaccaauauuaugaucacgaccauuaucaucguuauuaucgucauucugcuuucucugaucgccgugggccuccugcuguacugcaaagcuagauccacaccugugacccuuagcaaggaccagcucucugggauuaacaauaucgcguucuccaacugaggacuaguguccaccugucccuccugggcugcuggauugucucguuuuccugccaaauaaacaggaucagcgcuuuacagaucuaaaaaaaaaaaaaaaaaaaaaaaaaaaaaaaaaaaaaaaaaaaaaaaaaaaaaaaaaaaaaaaaugcaucccccccccccccccccccccccccccccccaaaggcucuuuucagagccaccagaauu

SEQ ID NO: 3921 - RNA, 1897 nt, Artificial Sequence
  mRNA product Design b-3 comprising derived and/or modified sequence from HRSV(A2)__F_DSCav1_mut0 (opt6)
gggagagucccgcagucggcguccagcggcucugcuuguucgugugugugucguugcaggccuuauucaagcuuaccauggaacuacuaauacuaaaagccaaugcaauaacaaccauacuaaccgccguaacauuuuguuucgcaucaggucaaaacauaaccgaagaauuuuaucaaucaacaugcucagcaguaucaaaaggauacuuauccgcucuaagaacaggaugguacacaaguguaauuacaauagagcucucaaacauaaaagaaaacaaaugcaauggaacugacgcaaaaguuaaacuuauaaaacaagaacuagauaaauauaaaaaugcaguaaccgaauuacaacuccuaaugcaauccacaccugcuaccgguuccggaucagccauagcaucuggaguagccguaugcaaaguccuccaccuagaaggagaaguaaauaaaaucaaaucagcacuauuaucuaccaauaaagcaguugucucacuauccaauggcguaucaguacuaacauucaaaguauuagaccuuaaaaacuacauagacaaacaacuauuaccaauucugaacaaacaauccuguucaauaucaaacaucgaaacgguaauagaauuucaacaaaaaaauaacagauuacuugaaauaacaagagaauuuucaguaaaugcaggaguuacaacacccgucuccaccuacaugcucacaaauucagaauuauuaucacuuauaaacgacaugccaauaacuaacgaccaaaaaaaacuaaugucaaacaauguccaaauaguccgacaacaauccuacucaauaaugugcauuauaaaagaagaaguccuagccuacguuguccaacuacccuuauauggaguaauagauaccccaugcuggaaacuucauaccuccccccuaugcacaacaaacacaaaagaaggcucaaacaucugcuuaacacguacagaccgagguugguacugugauaacgcaggauccguaucauuuuucccacaagcagaaacaugcaaaguacaaucaaaccgcguuuuuugugacaccaugaacagcagaacccucccuucagaaguaaaccuaugcaacgucgauauauuuaacccaaaauacgauugcaaaauaaugacaucaaaaaccgaugucucaucuucaguaauaaccucucuaggagcaauagucucauguuacggaaaaacaaaaugcacagcaaguaauaaaaauagaggaauaauaaaaacauucucuaauggcugcgacuacguauccaauaaaggcguugacacaguauccguaggcaacacacucuacuauguuaacaaacaagaaggaaaaaguuuauacguuaaaggagaaccaauuauaaacuuuuacgacccacucguauucccaucugaugaauuugacgcaucaaucucacaaguaaaugaaaaaaucaaucagucccuugccuuuauaagaaaaucagaugaacuuuuacacaacguuaacgccggaaaaucaacaaccaauauaaugaucacaaccauaauaauaguuauaauuguaauuuuauuauccuuaauagccgucggacuacuacuauacugcaaagcaagaucuacacccguaacccuaucaaaagaccaacuaaguggaauaaauaacauugcauucucaaauuaaggacuaguguccaccugucccuccugggcugcuggauugucucguuuuccugccaaauaaacaggaucagcgcuuuacagaucuaaaaaaaaaaaaaaaaaaaaaaaaaaaaaaaaaaaaaaaaaaaaaaaaaaaaaaaaaaaaaaaaugcaucccccccccccccccccccccccccccccccaaaggcucuuuucagagccaccagaauu

SEQ ID NO: 3922 - RNA, 1897 nt, Artificial Sequence
  mRNA product Design b-3 comprising derived and/or modified sequence from HRSV(A2)__F_DSCav1_mut0 (opt11)
gggagagucccgcagucggcguccagcggcucugcuuguucgugugugugucguugcaggccuuauucaagcuuaccauggaacuccuaauacuaaaggcaaacgcaaucacuacaauucuaaccgccgugacauucugcuucgccuccggacaaaacaucaccgaagaauuuuaccaauccacaugcucggccgucaguaaaggcuaccucucggcucuccgaaccggcugguacaccuccgucaucaccaucgaacucuccaacaucaaagaaaacaaaugcaacggcaccgacgccaaagucaaacuaaucaaacaagaacucgacaaauacaaaaacgccgucacagaacuccaacuacuaaugcaaucaacacccgcuacaggaagcggcuccgccaucgccagcggcguagcugucugcaaaguccuccaccucgaaggugaagucaacaaaaucaaaucagcccuacucagcacaaacaaagccguuguaagccuauccaacggcgucuccguacuaacauucaaaguccuugaccucaagaacuacaucgacaaacaacuucucccaauccuaaacaaacaaagcugcucaauuuccaacaucgaaacaguaaucgaauuucaacaaaaaaacaaccgacuccucgaaaucacccgcgaauuuuccguuaacgccggcguuacaacccccgucuccaccuacaugcucaccaauuccgaacuacuaucacucauaaacgacaugccuaucacaaacgaccaaaaaaaacuaaugucaaacaauguccaaaucguccgccagcaaagcuauuccaucaugugcaucaucaaagaggaaguccucgccuacguaguccaacugccccucuacggcgucauugauacccccugcuggaaacuccacaccuccccccucugcaccacaaacaccaaagaagguuccaacaucugccuaacacgaaccgacagaggcugguacugcgacaacgccggcagcgucuccuucuucccccaagcagaaaccuguaaaguccagucuaaccgcgucuucugcgacacaaugaacucaagaacccuaccuuccgaaguaaaccucugcaacguagacaucuucaacccuaaauacgacugcaaaaucaugacuucaaaaacagacguaagcucuuccguaaucacuucccucggcgccaucguauccugcuacgguaaaaccaaaugcaccgccuccaacaaaaaccgagggaucauaaaaaccuucuccaacggcugcgacuacguaucuaacaaaggcgucgacaccgucuccgucggcaacacccucuauuacguaaacaaacaagagggcaaaucacuauacgucaaaggcgagccaaucauaaacuucuaugacccacucgucuucccuucagacgaauuugaugccagcaucagccaagucaacgaaaaaaucaaccaaucacucgccuucauccgcaaaagcgacgaacuccuucacaacgucaacgcaggcaaaucaaccaccaacaucaugaucaccaccaucaucaucgucaucaucguuauccuacucagccucaucgcaguuggucuucuccuuuacugcaaagcccgcuccacccccgucacccucaguaaagaccaacucagcggaaucaacaacauagcauucuccaacuaaggacuaguguccaccugucccuccugggcugcuggauugucucguuuuccugccaaauaaacaggaucagcgcuuuacagaucuaaaaaaaaaaaaaaaaaaaaaaaaaaaaaaaaaaaaaaaaaaaaaaaaaaaaaaaaaaaaaaaaugcaucccccccccccccccccccccccccccccccaaaggcucuuuucagagccaccagaauu

SEQ ID NO: 3923 - RNA, 1948 nt, Artificial Sequence
  mRNA product Design b-4 comprising derived and/or modified sequence from HRSV(A2)__F_DSCav1_mut0 (opt1)
gggagagucccgcagucggcguccagcggcucugcuuguucgugugugugucguugcaggccuuauucaagcuuaccauggagcugcucauccugaaggccaacgccaucaccaccauccugacggcggugaccuucugcuucgccagcggccagaacaucaccgaggaguucuaccaguccacgugcagcgccgucuccaagggguaccucagcgcccugcggaccggcugguacaccuccgugaucaccaucgagcugagcaacaucaaggagaacaagugcaacgggaccgacgccaaggugaagcucaucaagcaggagcuggacaaguacaagaacgcggucacggagcugcagcuccugaugcaguccaccccggcaaccggcuccggcuccgccaucgcgagcggcgucgccgugugcaaggugcugcaccucgagggggaggucaacaagaucaagagcgcccugcuguccaccaacaaggccguggugagccucuccaacggcgucagcgugcugaccuucaaggugcuggaccucaagaacuacaucgacaagcagcugcugcccauccugaacaagcagagcugcuccaucagcaacaucgagacggugaucgaguuccagcagaagaacaaccggcuccuggagaucacccgcgaguucagcgugaacgccggggucaccacccccguguccacguacaugcugaccaacagcgagcuccugucccugaucaacgacaugccgaucaccaacgaccagaagaagcucaugagcaacaacgugcagaucguccggcagcaguccuacagcaucaugugcaucaucaaggaggaggugcuggcguacgugguccagcugccccucuacggcgugaucgacacccccugcuggaagcugcacacgagcccccugugcaccaccaacaccaaggagggguccaacaucugccucacgcgcaccgaccggggcugguacugcgacaacgccggcagcgucuccuucuucccgcaggccgagaccugcaaggugcagagcaaccgcguguucugcgacaccaugaacucccggacgcugcccagcgagguaaaccucugcaacgucgacaucuucaaccccaaguacgacugcaagaucaugaccuccaagaccgacgugagcuccagcgugaucaccucccugggggccaucgucagcugcuacggcaagacgaagugcaccgccagcaacaagaaccgggggaucaucaagaccuucuccaacggcugcgacuacgugagcaacaagggcguggacaccguguccgucgggaacacccuguacuacgugaacaagcaggagggcaagagccucuacgugaagggggagcccaucaucaacuucuacgacccgcuggucuuccccuccgacgaguucgacgcgagcaucucccaggugaacgagaagaucaaccagagccuggccuucauccgcaaguccgacgagcugcuccacaacgugaacgccggcaagagcacgaccaacaucaugaucaccaccaucaucaucgucaucaucgugauccugcugucccucaucgccguggggcugcugcucuacugcaaggcccggagcacgcccgucacccuguccaaggaccagcugagcggcaucaacaacaucgcguucuccaacugaggacuaguaauaaggaaacuguaugaaugucugugggcaggaagugaagagauccuucuguaaagguuuuuggaauuaugucugcugaauaauaaacuuuuuugaaauaauaaaucugguagaaaaaugagaucuaaaaaaaaaaaaaaaaaaaaaaaaaaaaaaaaaaaaaaaaaaaaaaaaaaaaaaaaaaaaaaaaugcaucccccccccccccccccccccccccccccccaaaggcucuuuucagagccaccagaauu

SEQ ID NO: 3924 - RNA, 1948 nt, Artificial Sequence
  mRNA product Design b-4 comprising derived and/or modified sequence from HRSV(A2)__F_DSCav1_mut0 (opt1)
gggagagucccgcagucggcguccagcggcucugcuuguucgugugugugucguugcaggccuuauucaagcuuaccauggagcugcucauccugaaggccaacgccaucaccaccauccugacggcggugaccuucugcuucgccagcggccagaacaucaccgaggaguucuaccaguccacgugcagcgccgucuccaagggguaccucagcgcccugcgcaccggcugguacaccuccgugaucaccaucgagcugagcaacaucaaggagaacaagugcaacgggaccgacgccaaggugaagcucaucaagcaggagcuggacaaguacaagaacgcggucacggagcugcagcuccugaugcaguccacccccgccaccggcagcggguccgccaucgccagcggcguggcggugugcaagguccugcaccucgagggcgaggugaacaagaucaaguccgcccugcugagcaccaacaaggccguggucucccucagcaacgggguguccgugcugacguucaagguccuggaccucaagaacuacaucgacaagcagcugcugccgauccucaacaagcagagcugcuccaucagcaacaucgagaccgugaucgaguuccagcagaagaacaaccggcugcuggagaucacccgcgaguucuccgugaacgccggcgucaccacgcccgugagcaccuacaugcucaccaacagcgagcugcugucccucaucaacgacaugcccaucaccaacgaccagaagaagcugaugagcaacaacgugcagaucguccggcagcaguccuacagcaucaugugcaucaucaaggaggaggugcuggccuacgugguccagcucccccuguacggggugaucgacacgccgugcuggaagcugcacaccagcccccucugcaccaccaacacgaaggagggcuccaacaucugccugacccgcaccgaccgggggugguacugcgacaacgcgggcuccgugagcuucuucccccaggccgagaccugcaagguccaguccaaccgcguguucugcgacacgaugaacagccggacccuccccuccgaggucaaccugugcaacguggacaucuucaacccgaaguacgacugcaagaucaugaccagcaagaccgacguguccagcuccgucaucacgagccugggcgccaucguguccugcuacgggaagaccaagugcaccgccagcaacaagaaccggggcaucaucaagaccuucuccaacgggugcgacuacgugagcaacaagggcgucgacacggugagcgugggcaacacccucuacuacgucaacaagcaggaggggaagucccuguacgugaagggcgagcccaucaucaacuucuacgacccccugguguuccccagcgacgaguucgacgccuccaucagccaggucaacgagaagaucaaccagucccucgcguucauccgcaagagcgacgagcugcugcacaacgugaacgccgggaaguccaccaccaacaucaugaucaccacgaucaucaucgugaucaucgucauccuccugagccugaucgccgugggccuccugcuguacugcaaggcccgguccaccccggugacccugagcaaggaccagcucuccgggaucaacaacaucgccuucagcaacugaggacuaguaauaaggaaacuguaugaaugucugugggcaggaagugaagagauccuucuguaaagguuuuuggaauuaugucugcugaauaauaaacuuuuuugaaauaauaaaucugguagaaaaaugagaucuaaaaaaaaaaaaaaaaaaaaaaaaaaaaaaaaaaaaaaaaaaaaaaaaaaaaaaaaaaaaaaaaugcaucccccccccccccccccccccccccccccccaaaggcucuuuucagagccaccagaauu

SEQ ID NO: 3925 - RNA, 1948 nt, Artificial Sequence
  mRNA product Design b-4 comprising derived and/or modified sequence from HRSV(A2)__F_DSCav1_mut0 (opt2)
gggagagucccgcagucggcguccagcggcucugcuuguucgugugugugucguugcaggccuuauucaagcuuaccauggagcuccucauccucaaggccaacgccaucaccaccauccucaccgccgucaccuucugcuucgccuccggccagaacaucaccgaggaguucuaccaguccaccugcuccgccgucuccaagggcuaccucuccgcccuccgcaccggcugguacaccuccgucaucaccaucgagcucuccaacaucaaggagaacaagugcaacggcaccgacgccaaggucaagcucaucaagcaggagcucgacaaguacaagaacgccgucaccgagcuccagcuccucaugcaguccacccccgccaccggcuccggcuccgccaucgccuccggcgucgccgucugcaagguccuccaccucgagggcgaggucaacaagaucaaguccgcccuccucuccaccaacaaggccgucgucucccucuccaacggcgucuccguccucaccuucaagguccucgaccucaagaacuacaucgacaagcagcuccuccccauccucaacaagcaguccugcuccaucuccaacaucgagaccgucaucgaguuccagcagaagaacaaccgccuccucgagaucacccgcgaguucuccgucaacgccggcgucaccacccccgucuccaccuacaugcucaccaacuccgagcuccucucccucaucaacgacaugcccaucaccaacgaccagaagaagcucauguccaacaacguccagaucguccgccagcaguccuacuccaucaugugcaucaucaaggaggagguccucgccuacgucguccagcucccccucuacggcgucaucgacacccccugcuggaagcuccacaccuccccccucugcaccaccaacaccaaggagggcuccaacaucugccucacccgcaccgaccgcggcugguacugcgacaacgccggcuccgucuccuucuucccccaggccgagaccugcaagguccaguccaaccgcgucuucugcgacaccaugaacucccgcacccuccccuccgaggucaaccucugcaacgucgacaucuucaaccccaaguacgacugcaagaucaugaccuccaagaccgacgucuccuccuccgucaucaccucccucggcgccaucgucuccugcuacggcaagaccaagugcaccgccuccaacaagaaccgcggcaucaucaagaccuucuccaacggcugcgacuacgucuccaacaagggcgucgacaccgucuccgucggcaacacccucuacuacgucaacaagcaggagggcaagucccucuacgucaagggcgagcccaucaucaacuucuacgacccccucgucuuccccuccgacgaguucgacgccuccaucucccaggucaacgagaagaucaaccagucccucgccuucauccgcaaguccgacgagcuccuccacaacgucaacgccggcaaguccaccaccaacaucaugaucaccaccaucaucaucgucaucaucgucauccuccucucccucaucgccgucggccuccuccucuacugcaaggcccgcuccacccccgucacccucuccaaggaccagcucuccggcaucaacaacaucgccuucuccaacugaggacuaguaauaaggaaacuguaugaaugucugugggcaggaagugaagagauccuucuguaaagguuuuuggaauuaugucugcugaauaauaaacuuuuuugaaauaauaaaucugguagaaaaaugagaucuaaaaaaaaaaaaaaaaaaaaaaaaaaaaaaaaaaaaaaaaaaaaaaaaaaaaaaaaaaaaaaaaugcaucccccccccccccccccccccccccccccccaaaggcucuuuucagagccaccagaauu

SEQ ID NO: 3926 - RNA, 1948 nt, Artificial Sequence
  mRNA product Design b-4 comprising derived and/or modified sequence from HRSV(A2)__F_DSCav1_mut0 (opt3)
gggagagucccgcagucggcguccagcggcucugcuuguucgugugugugucguugcaggccuuauucaagcuuaccauggagcugcucauccuuaaggccaacgcuauuaccacaauacugacugcagugacguucugcuuugccagcggccagaauaucaccgaagaguucuaccaauccacauguucugcggucucaaaaggguauuugagugcuuuaagaacuggaugguacaccagcguuauuacaaucgaacuguccaacauuaaggagaauaaaugcaacgguaccgacgccaaggugaaacuaaucaagcaggaacucgauaaguauaaaaaugcaguaacugagcugcagcuucugaugcagucuacacccgccaccggcucggggucagcuauagcaagcggaguggccgucuguaagguguugcaccucgagggcgaaguuaacaaaaucaagagugcucugcuguccacgaauaaagccguggucucucucagcaacgguguguccguauuaacuuuuaagguucuggaccuuaagaauuacauugauaaacaauugcugccuauccuaaacaagcagucaugcaguauuagcaauaucgagaccgugauagaguuccagcagaaaaacaauaggcuccuggaaauuacacgggaguuuucugucaacgcgggggugacuaccccaguguccacauauaugcuuaccaauucagaacuguugagccucaucaacgacaugccgauuacgaacgaucaaaagaaacugaugaguaauaacguccagaucguucgccagcagucuuacuccaucauguguauuauaaaggaggaaguguuagcauauguagugcaacugccccucuacggagucaucgacacuccuugcuggaaacuucauacaagcccacuguguaccacuaauacaaaggagggcucgaacauuugcuugacccgaacggaucguggcugguacugugacaaugccgggucuguguccuucuuuccccaggcugaaaccugcaagguucagucaaacagaguguucugugauacaaugaauaguagaacucugccuagcgaggucaaccucugcaauguggacaucuuuaacccaaaauaugauugcaagauaaugaccuccaaaacagacguaucuagcucaguuauuaccagucugggagccaucguguccuguuacgguaagacuaaaugcacagcaagcaauaagaacaggggcaucauuaagaccuucucuaaugggugugauuaugucucaaacaaaggaguggacacugucagugugggcaauacgcuuuacuauguuaacaagcaagaggguaaaagccuguacgugaagggggaacccaucauuaacuuuuaugacccuuugguauucccauccgaugaguuugacgcuucuauaucgcaggucaaugagaaaaucaaccagagccucgccuucauucggaaguccgaugaacuguuacacaaugugaacgcgggaaagucaacaaccaauaucaugaucacuaccauuauaaucguuauuaucgugauucugcuaagucucaucgccgucggccugcuuuuguacugcaaagcacgcucuacaccggugacccugagcaaggaccagcucuccggcauaaacaauaucgcuuucucaaacugaggacuaguaauaaggaaacuguaugaaugucugugggcaggaagugaagagauccuucuguaaagguuuuuggaauuaugucugcugaauaauaaacuuuuuugaaauaauaaaucugguagaaaaaugagaucuaaaaaaaaaaaaaaaaaaaaaaaaaaaaaaaaaaaaaaaaaaaaaaaaaaaaaaaaaaaaaaaaugcaucccccccccccccccccccccccccccccccaaaggcucuuuucagagccaccagaauu

SEQ ID NO: 3927 - RNA, 1948 nt, Artificial Sequence
  mRNA product Design b-4 comprising derived and/or modified sequence from HRSV(A2)__F_DSCav1_mut0 (opt4)
gggagagucccgcagucggcguccagcggcucugcuuguucgugugugugucguugcaggccuuauucaagcuuaccauggagcugcugauccugaaggccaacgccaucaccaccauccugaccgccgugaccuucugcuucgccagcggccagaacaucaccgaggaguucuaccagagcaccugcagcgccgugagcaagggcuaccugagcgcccugagaaccggcugguacaccagcgugaucaccaucgagcugagcaacaucaaggagaacaagugcaacggcaccgacgccaaggugaagcugaucaagcaggagcuggacaaguacaagaacgccgugaccgagcugcagcugcugaugcagagcacccccgccaccggcagcggcagcgccaucgccagcggcguggccgugugcaaggugcugcaccuggagggcgaggugaacaagaucaagagcgcccugcugagcaccaacaaggccguggugagccugagcaacggcgugagcgugcugaccuucaaggugcuggaccugaagaacuacaucgacaagcagcugcugcccauccugaacaagcagagcugcagcaucagcaacaucgagaccgugaucgaguuccagcagaagaacaacagacugcuggagaucaccagagaguucagcgugaacgccggcgugaccacccccgugagcaccuacaugcugaccaacagcgagcugcugagccugaucaacgacaugcccaucaccaacgaccagaagaagcugaugagcaacaacgugcagaucgugagacagcagagcuacagcaucaugugcaucaucaaggaggaggugcuggccuacguggugcagcugccccuguacggcgugaucgacacccccugcuggaagcugcacaccagcccccugugcaccaccaacaccaaggagggcagcaacaucugccugaccagaaccgacagaggcugguacugcgacaacgccggcagcgugagcuucuucccccaggccgagaccugcaaggugcagagcaacagaguguucugcgacaccaugaacagcagaacccugcccagcgaggugaaccugugcaacguggacaucuucaaccccaaguacgacugcaagaucaugaccagcaagaccgacgugagcagcagcgugaucaccagccugggcgccaucgugagcugcuacggcaagaccaagugcaccgccagcaacaagaacagaggcaucaucaagaccuucagcaacggcugcgacuacgugagcaacaagggcguggacaccgugagcgugggcaacacccuguacuacgugaacaagcaggagggcaagagccuguacgugaagggcgagcccaucaucaacuucuacgacccccugguguuccccagcgacgaguucgacgccagcaucagccaggugaacgagaagaucaaccagagccuggccuucaucagaaagagcgacgagcugcugcacaacgugaacgccggcaagagcaccaccaacaucaugaucaccaccaucaucaucgugaucaucgugauccugcugagccugaucgccgugggccugcugcuguacugcaaggccagaagcacccccgugacccugagcaaggaccagcugagcggcaucaacaacaucgccuucagcaacugaggacuaguaauaaggaaacuguaugaaugucugugggcaggaagugaagagauccuucuguaaagguuuuuggaauuaugucugcugaauaauaaacuuuuuugaaauaauaaaucugguagaaaaaugagaucuaaaaaaaaaaaaaaaaaaaaaaaaaaaaaaaaaaaaaaaaaaaaaaaaaaaaaaaaaaaaaaaaugcaucccccccccccccccccccccccccccccccaaaggcucuuuucagagccaccagaauu

SEQ ID NO: 3928 - RNA, 1948 nt, Artificial Sequence
  mRNA product Design b-4 comprising derived and/or modified sequence from HRSV(A2)__F_DSCav1_mut0 (opt5)
gggagagucccgcagucggcguccagcggcucugcuuguucgugugugugucguugcaggccuuauucaagcuuaccauggagcugcucauccugaaggccaacgcuauuaccacaauccuuacggccgugaccuucugcuuugcgagcggccagaauauuacagaagaguucuaccaauccaccuguucugcugucagcaaaggguaucuguccgcccucagaacaggaugguacaccucuguuaucacaauugaacugagcaacaucaaggagaauaaaugcaacggcaccgacgccaaggugaaacuuaucaagcaggaacuggauaaguauaaaaaugcugugacggagcuccagcugcugaugcaguccacccccgccacagggucuggaagcgcuauugccuccggcgucgcgguguguaagguucuccaccuggagggggaagugaacaaaaucaagagcgcccuucugucuaccaauaaagcugucgugucccucagcaacggaguuucugugcugacauuuaagguccuugaccugaagaauuacauugauaaacaacuccugccuauccugaacaagcaguccugcagcauuucuaauaucgagaccgugauugaguuccagcagaaaaacaaucggcuccuggaaaucacgcgcgaguuuuccgugaacgccggcgucacaaccccgguuagcacauauaugcuuaccaauuccgaacugcucucucugaucaacgacaugcccauuaccaacgaucaaaagaaacuuaugagcaauaacgugcagaucgugagacagcaguccuacagcauuauguguaucauuaaggaggaaguccuggcuuaugugguucaacucccucuguacggcgugaucgacacacccugcuggaaacugcauacgucuccucucuguaccacaaauaccaaggagggguccaacaucugccugacacggaccgaucgcggaugguacugugacaaugccggcagcgucucuuucuuuccccaggcggaaacgugcaaggugcagagcaacagaguuuucugugauacaaugaacuccagaacccugccuucugaggugaaucucugcaaugucgacauuuuuaacccgaaauaugauugcaagaucaugaccagcaaaacagacguguccagcucugucauuaccucccugggggccaucgugagcuguuacggaaagacaaaaugcacggcuucuaauaagaaccggggcauuaucaagaccuucuccaaugggugugauuauguuagcaacaaaggaguggacacagucuccgugggcaauacccuuuacuauguuaacaagcaagagggcaaaucucuguacgugaagggggaacccaucauuaacuuuuaugacccucucgucuuccccagcgaugaguuugacgccuccaucucucaggugaaugagaaaauuaaccagagccuggcuuucauccgcaaguccgaugaacugcuccacaaugugaacgccggaaagagcacaaccaauauuaugaucacgaccauuaucaucguuauuaucgucauucugcuuucucugaucgccgugggccuccugcuguacugcaaagcuagauccacaccugugacccuuagcaaggaccagcucucugggauuaacaauaucgcguucuccaacugaggacuaguaauaaggaaacuguaugaaugucugugggcaggaagugaagagauccuucuguaaagguuuuuggaauuaugucugcugaauaauaaacuuuuuugaaauaauaaaucugguagaaaaaugagaucuaaaaaaaaaaaaaaaaaaaaaaaaaaaaaaaaaaaaaaaaaaaaaaaaaaaaaaaaaaaaaaaaugcaucccccccccccccccccccccccccccccccaaaggcucuuuucagagccaccagaauu

SEQ ID NO: 3929 - RNA, 1948 nt, Artificial Sequence
  mRNA product Design b-4 comprising derived and/or modified sequence from HRSV(A2)__F_DSCav1_mut0 (opt6)
gggagagucccgcagucggcguccagcggcucugcuuguucgugugugugucguugcaggccuuauucaagcuuaccauggaacuacuaauacuaaaagccaaugcaauaacaaccauacuaaccgccguaacauuuuguuucgcaucaggucaaaacauaaccgaagaauuuuaucaaucaacaugcucagcaguaucaaaaggauacuuauccgcucuaagaacaggaugguacacaaguguaauuacaauagagcucucaaacauaaaagaaaacaaaugcaauggaacugacgcaaaaguuaaacuuauaaaacaagaacuagauaaauauaaaaaugcaguaaccgaauuacaacuccuaaugcaauccacaccugcuaccgguuccggaucagccauagcaucuggaguagccguaugcaaaguccuccaccuagaaggagaaguaaauaaaaucaaaucagcacuauuaucuaccaauaaagcaguugucucacuauccaauggcguaucaguacuaacauucaaaguauuagaccuuaaaaacuacauagacaaacaacuauuaccaauucugaacaaacaauccuguucaauaucaaacaucgaaacgguaauagaauuucaacaaaaaaauaacagauuacuugaaauaacaagagaauuuucaguaaaugcaggaguuacaacacccgucuccaccuacaugcucacaaauucagaauuauuaucacuuauaaacgacaugccaauaacuaacgaccaaaaaaaacuaaugucaaacaauguccaaauaguccgacaacaauccuacucaauaaugugcauuauaaaagaagaaguccuagccuacguuguccaacuacccuuauauggaguaauagauaccccaugcuggaaacuucauaccuccccccuaugcacaacaaacacaaaagaaggcucaaacaucugcuuaacacguacagaccgagguugguacugugauaacgcaggauccguaucauuuuucccacaagcagaaacaugcaaaguacaaucaaaccgcguuuuuugugacaccaugaacagcagaacccucccuucagaaguaaaccuaugcaacgucgauauauuuaacccaaaauacgauugcaaaauaaugacaucaaaaaccgaugucucaucuucaguaauaaccucucuaggagcaauagucucauguuacggaaaaacaaaaugcacagcaaguaauaaaaauagaggaauaauaaaaacauucucuaauggcugcgacuacguauccaauaaaggcguugacacaguauccguaggcaacacacucuacuauguuaacaaacaagaaggaaaaaguuuauacguuaaaggagaaccaauuauaaacuuuuacgacccacucguauucccaucugaugaauuugacgcaucaaucucacaaguaaaugaaaaaaucaaucagucccuugccuuuauaagaaaaucagaugaacuuuuacacaacguuaacgccggaaaaucaacaaccaauauaaugaucacaaccauaauaauaguuauaauuguaauuuuauuauccuuaauagccgucggacuacuacuauacugcaaagcaagaucuacacccguaacccuaucaaaagaccaacuaaguggaauaaauaacauugcauucucaaauuaaggacuaguaauaaggaaacuguaugaaugucugugggcaggaagugaagagauccuucuguaaagguuuuuggaauuaugucugcugaauaauaaacuuuuuugaaauaauaaaucugguagaaaaaugagaucuaaaaaaaaaaaaaaaaaaaaaaaaaaaaaaaaaaaaaaaaaaaaaaaaaaaaaaaaaaaaaaaaugcaucccccccccccccccccccccccccccccccaaaggcucuuuucagagccaccagaauu

SEQ ID NO: 3930 - RNA, 1948 nt, Artificial Sequence
  mRNA product Design b-4 comprising derived and/or modified sequence from HRSV(A2)__F_DSCav1_mut0 (opt11)
gggagagucccgcagucggcguccagcggcucugcuuguucgugugugugucguugcaggccuuauucaagcuuaccauggaacuccuaauacuaaaggcaaacgcaaucacuacaauucuaaccgccgugacauucugcuucgccuccggacaaaacaucaccgaagaauuuuaccaauccacaugcucggccgucaguaaaggcuaccucucggcucuccgaaccggcugguacaccuccgucaucaccaucgaacucuccaacaucaaagaaaacaaaugcaacggcaccgacgccaaagucaaacuaaucaaacaagaacucgacaaauacaaaaacgccgucacagaacuccaacuacuaaugcaaucaacacccgcuacaggaagcggcuccgccaucgccagcggcguagcugucugcaaaguccuccaccucgaaggugaagucaacaaaaucaaaucagcccuacucagcacaaacaaagccguuguaagccuauccaacggcgucuccguacuaacauucaaaguccuugaccucaagaacuacaucgacaaacaacuucucccaauccuaaacaaacaaagcugcucaauuuccaacaucgaaacaguaaucgaauuucaacaaaaaaacaaccgacuccucgaaaucacccgcgaauuuuccguuaacgccggcguuacaacccccgucuccaccuacaugcucaccaauuccgaacuacuaucacucauaaacgacaugccuaucacaaacgaccaaaaaaaacuaaugucaaacaauguccaaaucguccgccagcaaagcuauuccaucaugugcaucaucaaagaggaaguccucgccuacguaguccaacugccccucuacggcgucauugauacccccugcuggaaacuccacaccuccccccucugcaccacaaacaccaaagaagguuccaacaucugccuaacacgaaccgacagaggcugguacugcgacaacgccggcagcgucuccuucuucccccaagcagaaaccuguaaaguccagucuaaccgcgucuucugcgacacaaugaacucaagaacccuaccuuccgaaguaaaccucugcaacguagacaucuucaacccuaaauacgacugcaaaaucaugacuucaaaaacagacguaagcucuuccguaaucacuucccucggcgccaucguauccugcuacgguaaaaccaaaugcaccgccuccaacaaaaaccgagggaucauaaaaaccuucuccaacggcugcgacuacguaucuaacaaaggcgucgacaccgucuccgucggcaacacccucuauuacguaaacaaacaagagggcaaaucacuauacgucaaaggcgagccaaucauaaacuucuaugacccacucgucuucccuucagacgaauuugaugccagcaucagccaagucaacgaaaaaaucaaccaaucacucgccuucauccgcaaaagcgacgaacuccuucacaacgucaacgcaggcaaaucaaccaccaacaucaugaucaccaccaucaucaucgucaucaucguuauccuacucagccucaucgcaguuggucuucuccuuuacugcaaagcccgcuccacccccgucacccucaguaaagaccaacucagcggaaucaacaacauagcauucuccaacuaaggacuaguaauaaggaaacuguaugaaugucugugggcaggaagugaagagauccuucuguaaagguuuuuggaauuaugucugcugaauaauaaacuuuuuugaaauaauaaaucugguagaaaaaugagaucuaaaaaaaaaaaaaaaaaaaaaaaaaaaaaaaaaaaaaaaaaaaaaaaaaaaaaaaaaaaaaaaaugcaucccccccccccccccccccccccccccccccaaaggcucuuuucagagccaccagaauu

SEQ ID NO: 3931 - RNA, 2010 nt, Artificial Sequence
  mRNA product Design b-5 comprising derived and/or modified sequence from HRSV(A2)__F_DSCav1_mut0 (opt1)
gggagacuccugucgggcggaaguaggaggaguagaguuuaaaaacaguacucuuuuuccgguucgggacguaguugaagcaacgacaagccggauaaccgcucuugagacaggaagcuuaccauggagcugcucauccugaaggccaacgccaucaccaccauccugacggcggugaccuucugcuucgccagcggccagaacaucaccgaggaguucuaccaguccacgugcagcgccgucuccaagggguaccucagcgcccugcggaccggcugguacaccuccgugaucaccaucgagcugagcaacaucaaggagaacaagugcaacgggaccgacgccaaggugaagcucaucaagcaggagcuggacaaguacaagaacgcggucacggagcugcagcuccugaugcaguccaccccggcaaccggcuccggcuccgccaucgcgagcggcgucgccgugugcaaggugcugcaccucgagggggaggucaacaagaucaagagcgcccugcuguccaccaacaaggccguggugagccucuccaacggcgucagcgugcugaccuucaaggugcuggaccucaagaacuacaucgacaagcagcugcugcccauccugaacaagcagagcugcuccaucagcaacaucgagacggugaucgaguuccagcagaagaacaaccggcuccuggagaucacccgcgaguucagcgugaacgccggggucaccacccccguguccacguacaugcugaccaacagcgagcuccugucccugaucaacgacaugccgaucaccaacgaccagaagaagcucaugagcaacaacgugcagaucguccggcagcaguccuacagcaucaugugcaucaucaaggaggaggugcuggcguacgugguccagcugccccucuacggcgugaucgacacccccugcuggaagcugcacacgagcccccugugcaccaccaacaccaaggagggguccaacaucugccucacgcgcaccgaccggggcugguacugcgacaacgccggcagcgucuccuucuucccgcaggccgagaccugcaaggugcagagcaaccgcguguucugcgacaccaugaacucccggacgcugcccagcgagguaaaccucugcaacgucgacaucuucaaccccaaguacgacugcaagaucaugaccuccaagaccgacgugagcuccagcgugaucaccucccugggggccaucgucagcugcuacggcaagacgaagugcaccgccagcaacaagaaccgggggaucaucaagaccuucuccaacggcugcgacuacgugagcaacaagggcguggacaccguguccgucgggaacacccuguacuacgugaacaagcaggagggcaagagccucuacgugaagggggagcccaucaucaacuucuacgacccgcuggucuuccccuccgacgaguucgacgcgagcaucucccaggugaacgagaagaucaaccagagccuggccuucauccgcaaguccgacgagcugcuccacaacgugaacgccggcaagagcacgaccaacaucaugaucaccaccaucaucaucgucaucaucgugauccugcugucccucaucgccguggggcugcugcucuacugcaaggcccggagcacgcccgucacccuguccaaggaccagcugagcggcaucaacaacaucgcguucuccaacugaggacuaguacuggcugcaucucccuuuccucuguccuccauccuucucccaggauggugaagggggaccugguacccagugauccccaccccaggauccuaaaucaugacuuaccugcuaauaaaaacucauuggaaaagugagaagaucuaaaaaaaaaaaaaaaaaaaaaaaaaaaaaaaaaaaaaaaaaaaaaaaaaaaaaaaaaaaaaaaaugcaucccccccccccccccccccccccccccccccaaaggcucuuuucagagccaccagaauu

SEQ ID NO: 3932 - RNA, 2010 nt, Artificial Sequence
  mRNA product Design b-5 comprising derived and/or modified sequence from HRSV(A2)__F_DSCav1_mut0 (opt1)
gggagacuccugucgggcggaaguaggaggaguagaguuuaaaaacaguacucuuuuuccgguucgggacguaguugaagcaacgacaagccggauaaccgcucuugagacaggaagcuuaccauggagcugcucauccugaaggccaacgccaucaccaccauccugacggcggugaccuucugcuucgccagcggccagaacaucaccgaggaguucuaccaguccacgugcagcgccgucuccaagggguaccucagcgcccugcgcaccggcugguacaccuccgugaucaccaucgagcugagcaacaucaaggagaacaagugcaacgggaccgacgccaaggugaagcucaucaagcaggagcuggacaaguacaagaacgcggucacggagcugcagcuccugaugcaguccacccccgccaccggcagcggguccgccaucgccagcggcguggcggugugcaagguccugcaccucgagggcgaggugaacaagaucaaguccgcccugcugagcaccaacaaggccguggucucccucagcaacgggguguccgugcugacguucaagguccuggaccucaagaacuacaucgacaagcagcugcugccgauccucaacaagcagagcugcuccaucagcaacaucgagaccgugaucgaguuccagcagaagaacaaccggcugcuggagaucacccgcgaguucuccgugaacgccggcgucaccacgcccgugagcaccuacaugcucaccaacagcgagcugcugucccucaucaacgacaugcccaucaccaacgaccagaagaagcugaugagcaacaacgugcagaucguccggcagcaguccuacagcaucaugugcaucaucaaggaggaggugcuggccuacgugguccagcucccccuguacggggugaucgacacgccgugcuggaagcugcacaccagcccccucugcaccaccaacacgaaggagggcuccaacaucugccugacccgcaccgaccgggggugguacugcgacaacgcgggcuccgugagcuucuucccccaggccgagaccugcaagguccaguccaaccgcguguucugcgacacgaugaacagccggacccuccccuccgaggucaaccugugcaacguggacaucuucaacccgaaguacgacugcaagaucaugaccagcaagaccgacguguccagcuccgucaucacgagccugggcgccaucguguccugcuacgggaagaccaagugcaccgccagcaacaagaaccggggcaucaucaagaccuucuccaacgggugcgacuacgugagcaacaagggcgucgacacggugagcgugggcaacacccucuacuacgucaacaagcaggaggggaagucccuguacgugaagggcgagcccaucaucaacuucuacgacccccugguguuccccagcgacgaguucgacgccuccaucagccaggucaacgagaagaucaaccagucccucgcguucauccgcaagagcgacgagcugcugcacaacgugaacgccgggaaguccaccaccaacaucaugaucaccacgaucaucaucgugaucaucgucauccuccugagccugaucgccgugggccuccugcuguacugcaaggcccgguccaccccggugacccugagcaaggaccagcucuccgggaucaacaacaucgccuucagcaacugaggacuaguacuggcugcaucucccuuuccucuguccuccauccuucucccaggauggugaagggggaccugguacccagugauccccaccccaggauccuaaaucaugacuuaccugcuaauaaaaacucauuggaaaagugagaagaucuaaaaaaaaaaaaaaaaaaaaaaaaaaaaaaaaaaaaaaaaaaaaaaaaaaaaaaaaaaaaaaaaugcaucccccccccccccccccccccccccccccccaaaggcucuuuucagagccaccagaauu

SEQ ID NO: 3933 - RNA, 2010 nt, Artificial Sequence
  mRNA product Design b-5 comprising derived and/or modified sequence from HRSV(A2)__F_DSCav1_mut0 (opt2)
gggagacuccugucgggcggaaguaggaggaguagaguuuaaaaacaguacucuuuuuccgguucgggacguaguugaagcaacgacaagccggauaaccgcucuugagacaggaagcuuaccauggagcuccucauccucaaggccaacgccaucaccaccauccucaccgccgucaccuucugcuucgccuccggccagaacaucaccgaggaguucuaccaguccaccugcuccgccgucuccaagggcuaccucuccgcccuccgcaccggcugguacaccuccgucaucaccaucgagcucuccaacaucaaggagaacaagugcaacggcaccgacgccaaggucaagcucaucaagcaggagcucgacaaguacaagaacgccgucaccgagcuccagcuccucaugcaguccacccccgccaccggcuccggcuccgccaucgccuccggcgucgccgucugcaagguccuccaccucgagggcgaggucaacaagaucaaguccgcccuccucuccaccaacaaggccgucgucucccucuccaacggcgucuccguccucaccuucaagguccucgaccucaagaacuacaucgacaagcagcuccuccccauccucaacaagcaguccugcuccaucuccaacaucgagaccgucaucgaguuccagcagaagaacaaccgccuccucgagaucacccgcgaguucuccgucaacgccggcgucaccacccccgucuccaccuacaugcucaccaacuccgagcuccucucccucaucaacgacaugcccaucaccaacgaccagaagaagcucauguccaacaacguccagaucguccgccagcaguccuacuccaucaugugcaucaucaaggaggagguccucgccuacgucguccagcucccccucuacggcgucaucgacacccccugcuggaagcuccacaccuccccccucugcaccaccaacaccaaggagggcuccaacaucugccucacccgcaccgaccgcggcugguacugcgacaacgccggcuccgucuccuucuucccccaggccgagaccugcaagguccaguccaaccgcgucuucugcgacaccaugaacucccgcacccuccccuccgaggucaaccucugcaacgucgacaucuucaaccccaaguacgacugcaagaucaugaccuccaagaccgacgucuccuccuccgucaucaccucccucggcgccaucgucuccugcuacggcaagaccaagugcaccgccuccaacaagaaccgcggcaucaucaagaccuucuccaacggcugcgacuacgucuccaacaagggcgucgacaccgucuccgucggcaacacccucuacuacgucaacaagcaggagggcaagucccucuacgucaagggcgagcccaucaucaacuucuacgacccccucgucuuccccuccgacgaguucgacgccuccaucucccaggucaacgagaagaucaaccagucccucgccuucauccgcaaguccgacgagcuccuccacaacgucaacgccggcaaguccaccaccaacaucaugaucaccaccaucaucaucgucaucaucgucauccuccucucccucaucgccgucggccuccuccucuacugcaaggcccgcuccacccccgucacccucuccaaggaccagcucuccggcaucaacaacaucgccuucuccaacugaggacuaguacuggcugcaucucccuuuccucuguccuccauccuucucccaggauggugaagggggaccugguacccagugauccccaccccaggauccuaaaucaugacuuaccugcuaauaaaaacucauuggaaaagugagaagaucuaaaaaaaaaaaaaaaaaaaaaaaaaaaaaaaaaaaaaaaaaaaaaaaaaaaaaaaaaaaaaaaaugcaucccccccccccccccccccccccccccccccaaaggcucuuuucagagccaccagaauu

SEQ ID NO: 3934 - RNA, 2010 nt, Artificial Sequence
  mRNA product Design b-5 comprising derived and/or modified sequence from HRSV(A2)__F_DSCav1_mut0 (opt3)
gggagacuccugucgggcggaaguaggaggaguagaguuuaaaaacaguacucuuuuuccgguucgggacguaguugaagcaacgacaagccggauaaccgcucuugagacaggaagcuuaccauggagcugcucauccuuaaggccaacgcuauuaccacaauacugacugcagugacguucugcuuugccagcggccagaauaucaccgaagaguucuaccaauccacauguucugcggucucaaaaggguauuugagugcuuuaagaacuggaugguacaccagcguuauuacaaucgaacuguccaacauuaaggagaauaaaugcaacgguaccgacgccaaggugaaacuaaucaagcaggaacucgauaaguauaaaaaugcaguaacugagcugcagcuucugaugcagucuacacccgccaccggcucggggucagcuauagcaagcggaguggccgucuguaagguguugcaccucgagggcgaaguuaacaaaaucaagagugcucugcuguccacgaauaaagccguggucucucucagcaacgguguguccguauuaacuuuuaagguucuggaccuuaagaauuacauugauaaacaauugcugccuauccuaaacaagcagucaugcaguauuagcaauaucgagaccgugauagaguuccagcagaaaaacaauaggcuccuggaaauuacacgggaguuuucugucaacgcgggggugacuaccccaguguccacauauaugcuuaccaauucagaacuguugagccucaucaacgacaugccgauuacgaacgaucaaaagaaacugaugaguaauaacguccagaucguucgccagcagucuuacuccaucauguguauuauaaaggaggaaguguuagcauauguagugcaacugccccucuacggagucaucgacacuccuugcuggaaacuucauacaagcccacuguguaccacuaauacaaaggagggcucgaacauuugcuugacccgaacggaucguggcugguacugugacaaugccgggucuguguccuucuuuccccaggcugaaaccugcaagguucagucaaacagaguguucugugauacaaugaauaguagaacucugccuagcgaggucaaccucugcaauguggacaucuuuaacccaaaauaugauugcaagauaaugaccuccaaaacagacguaucuagcucaguuauuaccagucugggagccaucguguccuguuacgguaagacuaaaugcacagcaagcaauaagaacaggggcaucauuaagaccuucucuaaugggugugauuaugucucaaacaaaggaguggacacugucagugugggcaauacgcuuuacuauguuaacaagcaagaggguaaaagccuguacgugaagggggaacccaucauuaacuuuuaugacccuuugguauucccauccgaugaguuugacgcuucuauaucgcaggucaaugagaaaaucaaccagagccucgccuucauucggaaguccgaugaacuguuacacaaugugaacgcgggaaagucaacaaccaauaucaugaucacuaccauuauaaucguuauuaucgugauucugcuaagucucaucgccgucggccugcuuuuguacugcaaagcacgcucuacaccggugacccugagcaaggaccagcucuccggcauaaacaauaucgcuuucucaaacugaggacuaguacuggcugcaucucccuuuccucuguccuccauccuucucccaggauggugaagggggaccugguacccagugauccccaccccaggauccuaaaucaugacuuaccugcuaauaaaaacucauuggaaaagugagaagaucuaaaaaaaaaaaaaaaaaaaaaaaaaaaaaaaaaaaaaaaaaaaaaaaaaaaaaaaaaaaaaaaaugcaucccccccccccccccccccccccccccccccaaaggcucuuuucagagccaccagaauu

SEQ ID NO: 3935 - RNA, 2010 nt, Artificial Sequence
  mRNA product Design b-5 comprising derived and/or modified sequence from HRSV(A2)__F_DSCav1_mut0 (opt4)
gggagacuccugucgggcggaaguaggaggaguagaguuuaaaaacaguacucuuuuuccgguucgggacguaguugaagcaacgacaagccggauaaccgcucuugagacaggaagcuuaccauggagcugcugauccugaaggccaacgccaucaccaccauccugaccgccgugaccuucugcuucgccagcggccagaacaucaccgaggaguucuaccagagcaccugcagcgccgugagcaagggcuaccugagcgcccugagaaccggcugguacaccagcgugaucaccaucgagcugagcaacaucaaggagaacaagugcaacggcaccgacgccaaggugaagcugaucaagcaggagcuggacaaguacaagaacgccgugaccgagcugcagcugcugaugcagagcacccccgccaccggcagcggcagcgccaucgccagcggcguggccgugugcaaggugcugcaccuggagggcgaggugaacaagaucaagagcgcccugcugagcaccaacaaggccguggugagccugagcaacggcgugagcgugcugaccuucaaggugcuggaccugaagaacuacaucgacaagcagcugcugcccauccugaacaagcagagcugcagcaucagcaacaucgagaccgugaucgaguuccagcagaagaacaacagacugcuggagaucaccagagaguucagcgugaacgccggcgugaccacccccgugagcaccuacaugcugaccaacagcgagcugcugagccugaucaacgacaugcccaucaccaacgaccagaagaagcugaugagcaacaacgugcagaucgugagacagcagagcuacagcaucaugugcaucaucaaggaggaggugcuggccuacguggugcagcugccccuguacggcgugaucgacacccccugcuggaagcugcacaccagcccccugugcaccaccaacaccaaggagggcagcaacaucugccugaccagaaccgacagaggcugguacugcgacaacgccggcagcgugagcuucuucccccaggccgagaccugcaaggugcagagcaacagaguguucugcgacaccaugaacagcagaacccugcccagcgaggugaaccugugcaacguggacaucuucaaccccaaguacgacugcaagaucaugaccagcaagaccgacgugagcagcagcgugaucaccagccugggcgccaucgugagcugcuacggcaagaccaagugcaccgccagcaacaagaacagaggcaucaucaagaccuucagcaacggcugcgacuacgugagcaacaagggcguggacaccgugagcgugggcaacacccuguacuacgugaacaagcaggagggcaagagccuguacgugaagggcgagcccaucaucaacuucuacgacccccugguguuccccagcgacgaguucgacgccagcaucagccaggugaacgagaagaucaaccagagccuggccuucaucagaaagagcgacgagcugcugcacaacgugaacgccggcaagagcaccaccaacaucaugaucaccaccaucaucaucgugaucaucgugauccugcugagccugaucgccgugggccugcugcuguacugcaaggccagaagcacccccgugacccugagcaaggaccagcugagcggcaucaacaacaucgccuucagcaacugaggacuaguacuggcugcaucucccuuuccucuguccuccauccuucucccaggauggugaagggggaccugguacccagugauccccaccccaggauccuaaaucaugacuuaccugcuaauaaaaacucauuggaaaagugagaagaucuaaaaaaaaaaaaaaaaaaaaaaaaaaaaaaaaaaaaaaaaaaaaaaaaaaaaaaaaaaaaaaaaugcaucccccccccccccccccccccccccccccccaaaggcucuuuucagagccaccagaauu

SEQ ID NO: 3936 - RNA, 2010 nt, Artificial Sequence
  mRNA product Design b-5 comprising derived and/or modified sequence from HRSV(A2)__F_DSCav1_mut0 (opt5)
gggagacuccugucgggcggaaguaggaggaguagaguuuaaaaacaguacucuuuuuccgguucgggacguaguugaagcaacgacaagccggauaaccgcucuugagacaggaagcuuaccauggagcugcucauccugaaggccaacgcuauuaccacaauccuuacggccgugaccuucugcuuugcgagcggccagaauauuacagaagaguucuaccaauccaccuguucugcugucagcaaaggguaucuguccgcccucagaacaggaugguacaccucuguuaucacaauugaacugagcaacaucaaggagaauaaaugcaacggcaccgacgccaaggugaaacuuaucaagcaggaacuggauaaguauaaaaaugcugugacggagcuccagcugcugaugcaguccacccccgccacagggucuggaagcgcuauugccuccggcgucgcgguguguaagguucuccaccuggagggggaagugaacaaaaucaagagcgcccuucugucuaccaauaaagcugucgugucccucagcaacggaguuucugugcugacauuuaagguccuugaccugaagaauuacauugauaaacaacuccugccuauccugaacaagcaguccugcagcauuucuaauaucgagaccgugauugaguuccagcagaaaaacaaucggcuccuggaaaucacgcgcgaguuuuccgugaacgccggcgucacaaccccgguuagcacauauaugcuuaccaauuccgaacugcucucucugaucaacgacaugcccauuaccaacgaucaaaagaaacuuaugagcaauaacgugcagaucgugagacagcaguccuacagcauuauguguaucauuaaggaggaaguccuggcuuaugugguucaacucccucuguacggcgugaucgacacacccugcuggaaacugcauacgucuccucucuguaccacaaauaccaaggagggguccaacaucugccugacacggaccgaucgcggaugguacugugacaaugccggcagcgucucuuucuuuccccaggcggaaacgugcaaggugcagagcaacagaguuuucugugauacaaugaacuccagaacccugccuucugaggugaaucucugcaaugucgacauuuuuaacccgaaauaugauugcaagaucaugaccagcaaaacagacguguccagcucugucauuaccucccugggggccaucgugagcuguuacggaaagacaaaaugcacggcuucuaauaagaaccggggcauuaucaagaccuucuccaaugggugugauuauguuagcaacaaaggaguggacacagucuccgugggcaauacccuuuacuauguuaacaagcaagagggcaaaucucuguacgugaagggggaacccaucauuaacuuuuaugacccucucgucuuccccagcgaugaguuugacgccuccaucucucaggugaaugagaaaauuaaccagagccuggcuuucauccgcaaguccgaugaacugcuccacaaugugaacgccggaaagagcacaaccaauauuaugaucacgaccauuaucaucguuauuaucgucauucugcuuucucugaucgccgugggccuccugcuguacugcaaagcuagauccacaccugugacccuuagcaaggaccagcucucugggauuaacaauaucgcguucuccaacugaggacuaguacuggcugcaucucccuuuccucuguccuccauccuucucccaggauggugaagggggaccugguacccagugauccccaccccaggauccuaaaucaugacuuaccugcuaauaaaaacucauuggaaaagugagaagaucuaaaaaaaaaaaaaaaaaaaaaaaaaaaaaaaaaaaaaaaaaaaaaaaaaaaaaaaaaaaaaaaaugcaucccccccccccccccccccccccccccccccaaaggcucuuuucagagccaccagaauu

SEQ ID NO: 3937 - RNA, 2010 nt, Artificial Sequence
  mRNA product Design b-5 comprising derived and/or modified sequence from HRSV(A2)__F_DSCav1_mut0 (opt6)
gggagacuccugucgggcggaaguaggaggaguagaguuuaaaaacaguacucuuuuuccgguucgggacguaguugaagcaacgacaagccggauaaccgcucuugagacaggaagcuuaccauggaacuacuaauacuaaaagccaaugcaauaacaaccauacuaaccgccguaacauuuuguuucgcaucaggucaaaacauaaccgaagaauuuuaucaaucaacaugcucagcaguaucaaaaggauacuuauccgcucuaagaacaggaugguacacaaguguaauuacaauagagcucucaaacauaaaagaaaacaaaugcaauggaacugacgcaaaaguuaaacuuauaaaacaagaacuagauaaauauaaaaaugcaguaaccgaauuacaacuccuaaugcaauccacaccugcuaccgguuccggaucagccauagcaucuggaguagccguaugcaaaguccuccaccuagaaggagaaguaaauaaaaucaaaucagcacuauuaucuaccaauaaagcaguugucucacuauccaauggcguaucaguacuaacauucaaaguauuagaccuuaaaaacuacauagacaaacaacuauuaccaauucugaacaaacaauccuguucaauaucaaacaucgaaacgguaauagaauuucaacaaaaaaauaacagauuacuugaaauaacaagagaauuuucaguaaaugcaggaguuacaacacccgucuccaccuacaugcucacaaauucagaauuauuaucacuuauaaacgacaugccaauaacuaacgaccaaaaaaaacuaaugucaaacaauguccaaauaguccgacaacaauccuacucaauaaugugcauuauaaaagaagaaguccuagccuacguuguccaacuacccuuauauggaguaauagauaccccaugcuggaaacuucauaccuccccccuaugcacaacaaacacaaaagaaggcucaaacaucugcuuaacacguacagaccgagguugguacugugauaacgcaggauccguaucauuuuucccacaagcagaaacaugcaaaguacaaucaaaccgcguuuuuugugacaccaugaacagcagaacccucccuucagaaguaaaccuaugcaacgucgauauauuuaacccaaaauacgauugcaaaauaaugacaucaaaaaccgaugucucaucuucaguaauaaccucucuaggagcaauagucucauguuacggaaaaacaaaaugcacagcaaguaauaaaaauagaggaauaauaaaaacauucucuaauggcugcgacuacguauccaauaaaggcguugacacaguauccguaggcaacacacucuacuauguuaacaaacaagaaggaaaaaguuuauacguuaaaggagaaccaauuauaaacuuuuacgacccacucguauucccaucugaugaauuugacgcaucaaucucacaaguaaaugaaaaaaucaaucagucccuugccuuuauaagaaaaucagaugaacuuuuacacaacguuaacgccggaaaaucaacaaccaauauaaugaucacaaccauaauaauaguuauaauuguaauuuuauuauccuuaauagccgucggacuacuacuauacugcaaagcaagaucuacacccguaacccuaucaaaagaccaacuaaguggaauaaauaacauugcauucucaaauuaaggacuaguacuggcugcaucucccuuuccucuguccuccauccuucucccaggauggugaagggggaccugguacccagugauccccaccccaggauccuaaaucaugacuuaccugcuaauaaaaacucauuggaaaagugagaagaucuaaaaaaaaaaaaaaaaaaaaaaaaaaaaaaaaaaaaaaaaaaaaaaaaaaaaaaaaaaaaaaaaugcaucccccccccccccccccccccccccccccccaaaggcucuuuucagagccaccagaauu

SEQ ID NO: 3938 - RNA, 2010 nt, Artificial Sequence
  mRNA product Design b-5 comprising derived and/or modified sequence from HRSV(A2)__F_DSCav1_mut0 (opt11)
gggagacuccugucgggcggaaguaggaggaguagaguuuaaaaacaguacucuuuuuccgguucgggacguaguugaagcaacgacaagccggauaaccgcucuugagacaggaagcuuaccauggaacuccuaauacuaaaggcaaacgcaaucacuacaauucuaaccgccgugacauucugcuucgccuccggacaaaacaucaccgaagaauuuuaccaauccacaugcucggccgucaguaaaggcuaccucucggcucuccgaaccggcugguacaccuccgucaucaccaucgaacucuccaacaucaaagaaaacaaaugcaacggcaccgacgccaaagucaaacuaaucaaacaagaacucgacaaauacaaaaacgccgucacagaacuccaacuacuaaugcaaucaacacccgcuacaggaagcggcuccgccaucgccagcggcguagcugucugcaaaguccuccaccucgaaggugaagucaacaaaaucaaaucagcccuacucagcacaaacaaagccguuguaagccuauccaacggcgucuccguacuaacauucaaaguccuugaccucaagaacuacaucgacaaacaacuucucccaauccuaaacaaacaaagcugcucaauuuccaacaucgaaacaguaaucgaauuucaacaaaaaaacaaccgacuccucgaaaucacccgcgaauuuuccguuaacgccggcguuacaacccccgucuccaccuacaugcucaccaauuccgaacuacuaucacucauaaacgacaugccuaucacaaacgaccaaaaaaaacuaaugucaaacaauguccaaaucguccgccagcaaagcuauuccaucaugugcaucaucaaagaggaaguccucgccuacguaguccaacugccccucuacggcgucauugauacccccugcuggaaacuccacaccuccccccucugcaccacaaacaccaaagaagguuccaacaucugccuaacacgaaccgacagaggcugguacugcgacaacgccggcagcgucuccuucuucccccaagcagaaaccuguaaaguccagucuaaccgcgucuucugcgacacaaugaacucaagaacccuaccuuccgaaguaaaccucugcaacguagacaucuucaacccuaaauacgacugcaaaaucaugacuucaaaaacagacguaagcucuuccguaaucacuucccucggcgccaucguauccugcuacgguaaaaccaaaugcaccgccuccaacaaaaaccgagggaucauaaaaaccuucuccaacggcugcgacuacguaucuaacaaaggcgucgacaccgucuccgucggcaacacccucuauuacguaaacaaacaagagggcaaaucacuauacgucaaaggcgagccaaucauaaacuucuaugacccacucgucuucccuucagacgaauuugaugccagcaucagccaagucaacgaaaaaaucaaccaaucacucgccuucauccgcaaaagcgacgaacuccuucacaacgucaacgcaggcaaaucaaccaccaacaucaugaucaccaccaucaucaucgucaucaucguuauccuacucagccucaucgcaguuggucuucuccuuuacugcaaagcccgcuccacccccgucacccucaguaaagaccaacucagcggaaucaacaacauagcauucuccaacuaaggacuaguacuggcugcaucucccuuuccucuguccuccauccuucucccaggauggugaagggggaccugguacccagugauccccaccccaggauccuaaaucaugacuuaccugcuaauaaaaacucauuggaaaagugagaagaucuaaaaaaaaaaaaaaaaaaaaaaaaaaaaaaaaaaaaaaaaaaaaaaaaaaaaaaaaaaaaaaaaugcaucccccccccccccccccccccccccccccccaaaggcucuuuucagagccaccagaauu

SEQ ID NO: 3939 - RNA, 1916 nt, Artificial Sequence
  mRNA product Design c-1 comprising derived and/or modified sequence from HRSV(A2)__F_DSCav1_mut0 (opt1)
gggagaguccgcucagccagguugcagaagcggcuuagcguguguccuaaucuucucucugcguguagguaggccugugccgcaaacaagcuuaccauggagcugcucauccugaaggccaacgccaucaccaccauccugacggcggugaccuucugcuucgccagcggccagaacaucaccgaggaguucuaccaguccacgugcagcgccgucuccaagggguaccucagcgcccugcggaccggcugguacaccuccgugaucaccaucgagcugagcaacaucaaggagaacaagugcaacgggaccgacgccaaggugaagcucaucaagcaggagcuggacaaguacaagaacgcggucacggagcugcagcuccugaugcaguccaccccggcaaccggcuccggcuccgccaucgcgagcggcgucgccgugugcaaggugcugcaccucgagggggaggucaacaagaucaagagcgcccugcuguccaccaacaaggccguggugagccucuccaacggcgucagcgugcugaccuucaaggugcuggaccucaagaacuacaucgacaagcagcugcugcccauccugaacaagcagagcugcuccaucagcaacaucgagacggugaucgaguuccagcagaagaacaaccggcuccuggagaucacccgcgaguucagcgugaacgccggggucaccacccccguguccacguacaugcugaccaacagcgagcuccugucccugaucaacgacaugccgaucaccaacgaccagaagaagcucaugagcaacaacgugcagaucguccggcagcaguccuacagcaucaugugcaucaucaaggaggaggugcuggcguacgugguccagcugccccucuacggcgugaucgacacccccugcuggaagcugcacacgagcccccugugcaccaccaacaccaaggagggguccaacaucugccucacgcgcaccgaccggggcugguacugcgacaacgccggcagcgucuccuucuucccgcaggccgagaccugcaaggugcagagcaaccgcguguucugcgacaccaugaacucccggacgcugcccagcgagguaaaccucugcaacgucgacaucuucaaccccaaguacgacugcaagaucaugaccuccaagaccgacgugagcuccagcgugaucaccucccugggggccaucgucagcugcuacggcaagacgaagugcaccgccagcaacaagaaccgggggaucaucaagaccuucuccaacggcugcgacuacgugagcaacaagggcguggacaccguguccgucgggaacacccuguacuacgugaacaagcaggagggcaagagccucuacgugaagggggagcccaucaucaacuucuacgacccgcuggucuuccccuccgacgaguucgacgcgagcaucucccaggugaacgagaagaucaaccagagccuggccuucauccgcaaguccgacgagcugcuccacaacgugaacgccggcaagagcacgaccaacaucaugaucaccaccaucaucaucgucaucaucgugauccugcugucccucaucgccguggggcugcugcucuacugcaaggcccggagcacgcccgucacccuguccaaggaccagcugagcggcaucaacaacaucgcguucuccaacugaggacuaguguccaccugucccuccugggcugcuggauugucucguuuuccugccaaauaaacaggaucagcgcuuuacagaucuaaaaaaaaaaaaaaaaaaaaaaaaaaaaaaaaaaaaaaaaaaaaaaaaaaaaaaaaaaaaaaaaugcaucccccccccccccccccccccccccccccccaaaggcucuuuucagagccaccagaauu

SEQ ID NO: 3940 - RNA, 1916 nt, Artificial Sequence
  mRNA product Design c-1 comprising derived and/or modified sequence from HRSV(A2)__F_DSCav1_mut0 (opt1)
gggagaguccgcucagccagguugcagaagcggcuuagcguguguccuaaucuucucucugcguguagguaggccugugccgcaaacaagcuuaccauggagcugcucauccugaaggccaacgccaucaccaccauccugacggcggugaccuucugcuucgccagcggccagaacaucaccgaggaguucuaccaguccacgugcagcgccgucuccaagggguaccucagcgcccugcgcaccggcugguacaccuccgugaucaccaucgagcugagcaacaucaaggagaacaagugcaacgggaccgacgccaaggugaagcucaucaagcaggagcuggacaaguacaagaacgcggucacggagcugcagcuccugaugcaguccacccccgccaccggcagcggguccgccaucgccagcggcguggcggugugcaagguccugcaccucgagggcgaggugaacaagaucaaguccgcccugcugagcaccaacaaggccguggucucccucagcaacgggguguccgugcugacguucaagguccuggaccucaagaacuacaucgacaagcagcugcugccgauccucaacaagcagagcugcuccaucagcaacaucgagaccgugaucgaguuccagcagaagaacaaccggcugcuggagaucacccgcgaguucuccgugaacgccggcgucaccacgcccgugagcaccuacaugcucaccaacagcgagcugcugucccucaucaacgacaugcccaucaccaacgaccagaagaagcugaugagcaacaacgugcagaucguccggcagcaguccuacagcaucaugugcaucaucaaggaggaggugcuggccuacgugguccagcucccccuguacggggugaucgacacgccgugcuggaagcugcacaccagcccccucugcaccaccaacacgaaggagggcuccaacaucugccugacccgcaccgaccgggggugguacugcgacaacgcgggcuccgugagcuucuucccccaggccgagaccugcaagguccaguccaaccgcguguucugcgacacgaugaacagccggacccuccccuccgaggucaaccugugcaacguggacaucuucaacccgaaguacgacugcaagaucaugaccagcaagaccgacguguccagcuccgucaucacgagccugggcgccaucguguccugcuacgggaagaccaagugcaccgccagcaacaagaaccggggcaucaucaagaccuucuccaacgggugcgacuacgugagcaacaagggcgucgacacggugagcgugggcaacacccucuacuacgucaacaagcaggaggggaagucccuguacgugaagggcgagcccaucaucaacuucuacgacccccugguguuccccagcgacgaguucgacgccuccaucagccaggucaacgagaagaucaaccagucccucgcguucauccgcaagagcgacgagcugcugcacaacgugaacgccgggaaguccaccaccaacaucaugaucaccacgaucaucaucgugaucaucgucauccuccugagccugaucgccgugggccuccugcuguacugcaaggcccgguccaccccggugacccugagcaaggaccagcucuccgggaucaacaacaucgccuucagcaacugaggacuaguguccaccugucccuccugggcugcuggauugucucguuuuccugccaaauaaacaggaucagcgcuuuacagaucuaaaaaaaaaaaaaaaaaaaaaaaaaaaaaaaaaaaaaaaaaaaaaaaaaaaaaaaaaaaaaaaaugcaucccccccccccccccccccccccccccccccaaaggcucuuuucagagccaccagaauu

SEQ ID NO: 3941 - RNA, 1916 nt, Artificial Sequence
  mRNA product Design c-1 comprising derived and/or modified sequence from HRSV(A2)__F_DSCav1_mut0 (opt2)
gggagaguccgcucagccagguugcagaagcggcuuagcguguguccuaaucuucucucugcguguagguaggccugugccgcaaacaagcuuaccauggagcuccucauccucaaggccaacgccaucaccaccauccucaccgccgucaccuucugcuucgccuccggccagaacaucaccgaggaguucuaccaguccaccugcuccgccgucuccaagggcuaccucuccgcccuccgcaccggcugguacaccuccgucaucaccaucgagcucuccaacaucaaggagaacaagugcaacggcaccgacgccaaggucaagcucaucaagcaggagcucgacaaguacaagaacgccgucaccgagcuccagcuccucaugcaguccacccccgccaccggcuccggcuccgccaucgccuccggcgucgccgucugcaagguccuccaccucgagggcgaggucaacaagaucaaguccgcccuccucuccaccaacaaggccgucgucucccucuccaacggcgucuccguccucaccuucaagguccucgaccucaagaacuacaucgacaagcagcuccuccccauccucaacaagcaguccugcuccaucuccaacaucgagaccgucaucgaguuccagcagaagaacaaccgccuccucgagaucacccgcgaguucuccgucaacgccggcgucaccacccccgucuccaccuacaugcucaccaacuccgagcuccucucccucaucaacgacaugcccaucaccaacgaccagaagaagcucauguccaacaacguccagaucguccgccagcaguccuacuccaucaugugcaucaucaaggaggagguccucgccuacgucguccagcucccccucuacggcgucaucgacacccccugcuggaagcuccacaccuccccccucugcaccaccaacaccaaggagggcuccaacaucugccucacccgcaccgaccgcggcugguacugcgacaacgccggcuccgucuccuucuucccccaggccgagaccugcaagguccaguccaaccgcgucuucugcgacaccaugaacucccgcacccuccccuccgaggucaaccucugcaacgucgacaucuucaaccccaaguacgacugcaagaucaugaccuccaagaccgacgucuccuccuccgucaucaccucccucggcgccaucgucuccugcuacggcaagaccaagugcaccgccuccaacaagaaccgcggcaucaucaagaccuucuccaacggcugcgacuacgucuccaacaagggcgucgacaccgucuccgucggcaacacccucuacuacgucaacaagcaggagggcaagucccucuacgucaagggcgagcccaucaucaacuucuacgacccccucgucuuccccuccgacgaguucgacgccuccaucucccaggucaacgagaagaucaaccagucccucgccuucauccgcaaguccgacgagcuccuccacaacgucaacgccggcaaguccaccaccaacaucaugaucaccaccaucaucaucgucaucaucgucauccuccucucccucaucgccgucggccuccuccucuacugcaaggcccgcuccacccccgucacccucuccaaggaccagcucuccggcaucaacaacaucgccuucuccaacugaggacuaguguccaccugucccuccugggcugcuggauugucucguuuuccugccaaauaaacaggaucagcgcuuuacagaucuaaaaaaaaaaaaaaaaaaaaaaaaaaaaaaaaaaaaaaaaaaaaaaaaaaaaaaaaaaaaaaaaugcaucccccccccccccccccccccccccccccccaaaggcucuuuucagagccaccagaauu

SEQ ID NO: 3942 - RNA, 1916 nt, Artificial Sequence
  mRNA product Design c-1 comprising derived and/or modified sequence from HRSV(A2)__F_DSCav1_mut0 (opt3)
gggagaguccgcucagccagguugcagaagcggcuuagcguguguccuaaucuucucucugcguguagguaggccugugccgcaaacaagcuuaccauggagcugcucauccuuaaggccaacgcuauuaccacaauacugacugcagugacguucugcuuugccagcggccagaauaucaccgaagaguucuaccaauccacauguucugcggucucaaaaggguauuugagugcuuuaagaacuggaugguacaccagcguuauuacaaucgaacuguccaacauuaaggagaauaaaugcaacgguaccgacgccaaggugaaacuaaucaagcaggaacucgauaaguauaaaaaugcaguaacugagcugcagcuucugaugcagucuacacccgccaccggcucggggucagcuauagcaagcggaguggccgucuguaagguguugcaccucgagggcgaaguuaacaaaaucaagagugcucugcuguccacgaauaaagccguggucucucucagcaacgguguguccguauuaacuuuuaagguucuggaccuuaagaauuacauugauaaacaauugcugccuauccuaaacaagcagucaugcaguauuagcaauaucgagaccgugauagaguuccagcagaaaaacaauaggcuccuggaaauuacacgggaguuuucugucaacgcgggggugacuaccccaguguccacauauaugcuuaccaauucagaacuguugagccucaucaacgacaugccgauuacgaacgaucaaaagaaacugaugaguaauaacguccagaucguucgccagcagucuuacuccaucauguguauuauaaaggaggaaguguuagcauauguagugcaacugccccucuacggagucaucgacacuccuugcuggaaacuucauacaagcccacuguguaccacuaauacaaaggagggcucgaacauuugcuugacccgaacggaucguggcugguacugugacaaugccgggucuguguccuucuuuccccaggcugaaaccugcaagguucagucaaacagaguguucugugauacaaugaauaguagaacucugccuagcgaggucaaccucugcaauguggacaucuuuaacccaaaauaugauugcaagauaaugaccuccaaaacagacguaucuagcucaguuauuaccagucugggagccaucguguccuguuacgguaagacuaaaugcacagcaagcaauaagaacaggggcaucauuaagaccuucucuaaugggugugauuaugucucaaacaaaggaguggacacugucagugugggcaauacgcuuuacuauguuaacaagcaagaggguaaaagccuguacgugaagggggaacccaucauuaacuuuuaugacccuuugguauucccauccgaugaguuugacgcuucuauaucgcaggucaaugagaaaaucaaccagagccucgccuucauucggaaguccgaugaacuguuacacaaugugaacgcgggaaagucaacaaccaauaucaugaucacuaccauuauaaucguuauuaucgugauucugcuaagucucaucgccgucggccugcuuuuguacugcaaagcacgcucuacaccggugacccugagcaaggaccagcucuccggcauaaacaauaucgcuuucucaaacugaggacuaguguccaccugucccuccugggcugcuggauugucucguuuuccugccaaauaaacaggaucagcgcuuuacagaucuaaaaaaaaaaaaaaaaaaaaaaaaaaaaaaaaaaaaaaaaaaaaaaaaaaaaaaaaaaaaaaaaugcaucccccccccccccccccccccccccccccccaaaggcucuuuucagagccaccagaauu

SEQ ID NO: 3943 - RNA, 1916 nt, Artificial Sequence
  mRNA product Design c-1 comprising derived and/or modified sequence from HRSV(A2)__F_DSCav1_mut0 (opt4)
gggagaguccgcucagccagguugcagaagcggcuuagcguguguccuaaucuucucucugcguguagguaggccugugccgcaaacaagcuuaccauggagcugcugauccugaaggccaacgccaucaccaccauccugaccgccgugaccuucugcuucgccagcggccagaacaucaccgaggaguucuaccagagcaccugcagcgccgugagcaagggcuaccugagcgcccugagaaccggcugguacaccagcgugaucaccaucgagcugagcaacaucaaggagaacaagugcaacggcaccgacgccaaggugaagcugaucaagcaggagcuggacaaguacaagaacgccgugaccgagcugcagcugcugaugcagagcacccccgccaccggcagcggcagcgccaucgccagcggcguggccgugugcaaggugcugcaccuggagggcgaggugaacaagaucaagagcgcccugcugagcaccaacaaggccguggugagccugagcaacggcgugagcgugcugaccuucaaggugcuggaccugaagaacuacaucgacaagcagcugcugcccauccugaacaagcagagcugcagcaucagcaacaucgagaccgugaucgaguuccagcagaagaacaacagacugcuggagaucaccagagaguucagcgugaacgccggcgugaccacccccgugagcaccuacaugcugaccaacagcgagcugcugagccugaucaacgacaugcccaucaccaacgaccagaagaagcugaugagcaacaacgugcagaucgugagacagcagagcuacagcaucaugugcaucaucaaggaggaggugcuggccuacguggugcagcugccccuguacggcgugaucgacacccccugcuggaagcugcacaccagcccccugugcaccaccaacaccaaggagggcagcaacaucugccugaccagaaccgacagaggcugguacugcgacaacgccggcagcgugagcuucuucccccaggccgagaccugcaaggugcagagcaacagaguguucugcgacaccaugaacagcagaacccugcccagcgaggugaaccugugcaacguggacaucuucaaccccaaguacgacugcaagaucaugaccagcaagaccgacgugagcagcagcgugaucaccagccugggcgccaucgugagcugcuacggcaagaccaagugcaccgccagcaacaagaacagaggcaucaucaagaccuucagcaacggcugcgacuacgugagcaacaagggcguggacaccgugagcgugggcaacacccuguacuacgugaacaagcaggagggcaagagccuguacgugaagggcgagcccaucaucaacuucuacgacccccugguguuccccagcgacgaguucgacgccagcaucagccaggugaacgagaagaucaaccagagccuggccuucaucagaaagagcgacgagcugcugcacaacgugaacgccggcaagagcaccaccaacaucaugaucaccaccaucaucaucgugaucaucgugauccugcugagccugaucgccgugggccugcugcuguacugcaaggccagaagcacccccgugacccugagcaaggaccagcugagcggcaucaacaacaucgccuucagcaacugaggacuaguguccaccugucccuccugggcugcuggauugucucguuuuccugccaaauaaacaggaucagcgcuuuacagaucuaaaaaaaaaaaaaaaaaaaaaaaaaaaaaaaaaaaaaaaaaaaaaaaaaaaaaaaaaaaaaaaaugcaucccccccccccccccccccccccccccccccaaaggcucuuuucagagccaccagaauu

SEQ ID NO: 3944 - RNA, 1916 nt, Artificial Sequence
  mRNA product Design c-1 comprising derived and/or modified sequence from HRSV(A2)__F_DSCav1_mut0 (opt5)
gggagaguccgcucagccagguugcagaagcggcuuagcguguguccuaaucuucucucugcguguagguaggccugugccgcaaacaagcuuaccauggagcugcucauccugaaggccaacgcuauuaccacaauccuuacggccgugaccuucugcuuugcgagcggccagaauauuacagaagaguucuaccaauccaccuguucugcugucagcaaaggguaucuguccgcccucagaacaggaugguacaccucuguuaucacaauugaacugagcaacaucaaggagaauaaaugcaacggcaccgacgccaaggugaaacuuaucaagcaggaacuggauaaguauaaaaaugcugugacggagcuccagcugcugaugcaguccacccccgccacagggucuggaagcgcuauugccuccggcgucgcgguguguaagguucuccaccuggagggggaagugaacaaaaucaagagcgcccuucugucuaccaauaaagcugucgugucccucagcaacggaguuucugugcugacauuuaagguccuugaccugaagaauuacauugauaaacaacuccugccuauccugaacaagcaguccugcagcauuucuaauaucgagaccgugauugaguuccagcagaaaaacaaucggcuccuggaaaucacgcgcgaguuuuccgugaacgccggcgucacaaccccgguuagcacauauaugcuuaccaauuccgaacugcucucucugaucaacgacaugcccauuaccaacgaucaaaagaaacuuaugagcaauaacgugcagaucgugagacagcaguccuacagcauuauguguaucauuaaggaggaaguccuggcuuaugugguucaacucccucuguacggcgugaucgacacacccugcuggaaacugcauacgucuccucucuguaccacaaauaccaaggagggguccaacaucugccugacacggaccgaucgcggaugguacugugacaaugccggcagcgucucuuucuuuccccaggcggaaacgugcaaggugcagagcaacagaguuuucugugauacaaugaacuccagaacccugccuucugaggugaaucucugcaaugucgacauuuuuaacccgaaauaugauugcaagaucaugaccagcaaaacagacguguccagcucugucauuaccucccugggggccaucgugagcuguuacggaaagacaaaaugcacggcuucuaauaagaaccggggcauuaucaagaccuucuccaaugggugugauuauguuagcaacaaaggaguggacacagucuccgugggcaauacccuuuacuauguuaacaagcaagagggcaaaucucuguacgugaagggggaacccaucauuaacuuuuaugacccucucgucuuccccagcgaugaguuugacgccuccaucucucaggugaaugagaaaauuaaccagagccuggcuuucauccgcaaguccgaugaacugcuccacaaugugaacgccggaaagagcacaaccaauauuaugaucacgaccauuaucaucguuauuaucgucauucugcuuucucugaucgccgugggccuccugcuguacugcaaagcuagauccacaccugugacccuuagcaaggaccagcucucugggauuaacaauaucgcguucuccaacugaggacuaguguccaccugucccuccugggcugcuggauugucucguuuuccugccaaauaaacaggaucagcgcuuuacagaucuaaaaaaaaaaaaaaaaaaaaaaaaaaaaaaaaaaaaaaaaaaaaaaaaaaaaaaaaaaaaaaaaugcaucccccccccccccccccccccccccccccccaaaggcucuuuucagagccaccagaauu

SEQ ID NO: 3945 - RNA, 1916 nt, Artificial Sequence
  mRNA product Design c-1 comprising derived and/or modified sequence from HRSV(A2)__F_DSCav1_mut0 (opt6)
gggagaguccgcucagccagguugcagaagcggcuuagcguguguccuaaucuucucucugcguguagguaggccugugccgcaaacaagcuuaccauggaacuacuaauacuaaaagccaaugcaauaacaaccauacuaaccgccguaacauuuuguuucgcaucaggucaaaacauaaccgaagaauuuuaucaaucaacaugcucagcaguaucaaaaggauacuuauccgcucuaagaacaggaugguacacaaguguaauuacaauagagcucucaaacauaaaagaaaacaaaugcaauggaacugacgcaaaaguuaaacuuauaaaacaagaacuagauaaauauaaaaaugcaguaaccgaauuacaacuccuaaugcaauccacaccugcuaccgguuccggaucagccauagcaucuggaguagccguaugcaaaguccuccaccuagaaggagaaguaaauaaaaucaaaucagcacuauuaucuaccaauaaagcaguugucucacuauccaauggcguaucaguacuaacauucaaaguauuagaccuuaaaaacuacauagacaaacaacuauuaccaauucugaacaaacaauccuguucaauaucaaacaucgaaacgguaauagaauuucaacaaaaaaauaacagauuacuugaaauaacaagagaauuuucaguaaaugcaggaguuacaacacccgucuccaccuacaugcucacaaauucagaauuauuaucacuuauaaacgacaugccaauaacuaacgaccaaaaaaaacuaaugucaaacaauguccaaauaguccgacaacaauccuacucaauaaugugcauuauaaaagaagaaguccuagccuacguuguccaacuacccuuauauggaguaauagauaccccaugcuggaaacuucauaccuccccccuaugcacaacaaacacaaaagaaggcucaaacaucugcuuaacacguacagaccgagguugguacugugauaacgcaggauccguaucauuuuucccacaagcagaaacaugcaaaguacaaucaaaccgcguuuuuugugacaccaugaacagcagaacccucccuucagaaguaaaccuaugcaacgucgauauauuuaacccaaaauacgauugcaaaauaaugacaucaaaaaccgaugucucaucuucaguaauaaccucucuaggagcaauagucucauguuacggaaaaacaaaaugcacagcaaguaauaaaaauagaggaauaauaaaaacauucucuaauggcugcgacuacguauccaauaaaggcguugacacaguauccguaggcaacacacucuacuauguuaacaaacaagaaggaaaaaguuuauacguuaaaggagaaccaauuauaaacuuuuacgacccacucguauucccaucugaugaauuugacgcaucaaucucacaaguaaaugaaaaaaucaaucagucccuugccuuuauaagaaaaucagaugaacuuuuacacaacguuaacgccggaaaaucaacaaccaauauaaugaucacaaccauaauaauaguuauaauuguaauuuuauuauccuuaauagccgucggacuacuacuauacugcaaagcaagaucuacacccguaacccuaucaaaagaccaacuaaguggaauaaauaacauugcauucucaaauuaaggacuaguguccaccugucccuccugggcugcuggauugucucguuuuccugccaaauaaacaggaucagcgcuuuacagaucuaaaaaaaaaaaaaaaaaaaaaaaaaaaaaaaaaaaaaaaaaaaaaaaaaaaaaaaaaaaaaaaaugcaucccccccccccccccccccccccccccccccaaaggcucuuuucagagccaccagaauu

SEQ ID NO: 3946 - RNA, 1916 nt, Artificial Sequence
  mRNA product Design c-1 comprising derived and/or modified sequence from HRSV(A2)__F_DSCav1_mut0 (opt11)
gggagaguccgcucagccagguugcagaagcggcuuagcguguguccuaaucuucucucugcguguagguaggccugugccgcaaacaagcuuaccauggaacuccuaauacuaaaggcaaacgcaaucacuacaauucuaaccgccgugacauucugcuucgccuccggacaaaacaucaccgaagaauuuuaccaauccacaugcucggccgucaguaaaggcuaccucucggcucuccgaaccggcugguacaccuccgucaucaccaucgaacucuccaacaucaaagaaaacaaaugcaacggcaccgacgccaaagucaaacuaaucaaacaagaacucgacaaauacaaaaacgccgucacagaacuccaacuacuaaugcaaucaacacccgcuacaggaagcggcuccgccaucgccagcggcguagcugucugcaaaguccuccaccucgaaggugaagucaacaaaaucaaaucagcccuacucagcacaaacaaagccguuguaagccuauccaacggcgucuccguacuaacauucaaaguccuugaccucaagaacuacaucgacaaacaacuucucccaauccuaaacaaacaaagcugcucaauuuccaacaucgaaacaguaaucgaauuucaacaaaaaaacaaccgacuccucgaaaucacccgcgaauuuuccguuaacgccggcguuacaacccccgucuccaccuacaugcucaccaauuccgaacuacuaucacucauaaacgacaugccuaucacaaacgaccaaaaaaaacuaaugucaaacaauguccaaaucguccgccagcaaagcuauuccaucaugugcaucaucaaagaggaaguccucgccuacguaguccaacugccccucuacggcgucauugauacccccugcuggaaacuccacaccuccccccucugcaccacaaacaccaaagaagguuccaacaucugccuaacacgaaccgacagaggcugguacugcgacaacgccggcagcgucuccuucuucccccaagcagaaaccuguaaaguccagucuaaccgcgucuucugcgacacaaugaacucaagaacccuaccuuccgaaguaaaccucugcaacguagacaucuucaacccuaaauacgacugcaaaaucaugacuucaaaaacagacguaagcucuuccguaaucacuucccucggcgccaucguauccugcuacgguaaaaccaaaugcaccgccuccaacaaaaaccgagggaucauaaaaaccuucuccaacggcugcgacuacguaucuaacaaaggcgucgacaccgucuccgucggcaacacccucuauuacguaaacaaacaagagggcaaaucacuauacgucaaaggcgagccaaucauaaacuucuaugacccacucgucuucccuucagacgaauuugaugccagcaucagccaagucaacgaaaaaaucaaccaaucacucgccuucauccgcaaaagcgacgaacuccuucacaacgucaacgcaggcaaaucaaccaccaacaucaugaucaccaccaucaucaucgucaucaucguuauccuacucagccucaucgcaguuggucuucuccuuuacugcaaagcccgcuccacccccgucacccucaguaaagaccaacucagcggaaucaacaacauagcauucuccaacuaaggacuaguguccaccugucccuccugggcugcuggauugucucguuuuccugccaaauaaacaggaucagcgcuuuacagaucuaaaaaaaaaaaaaaaaaaaaaaaaaaaaaaaaaaaaaaaaaaaaaaaaaaaaaaaaaaaaaaaaugcaucccccccccccccccccccccccccccccccaaaggcucuuuucagagccaccagaauu

SEQ ID NO: 3947 - RNA, 2006 nt, Artificial Sequence
  mRNA product Design c-2 comprising derived and/or modified sequence from HRSV(A2)__F_DSCav1_mut0 (opt1)
gggagacuccugucgggcggaaguaggaggaguagaguuuaaaaacaguacucuuuuuccgguucgggacguaguugaagcaacgacaagccggauaaccgcucuugagacaggaagcuuaccauggagcugcucauccugaaggccaacgccaucaccaccauccugacggcggugaccuucugcuucgccagcggccagaacaucaccgaggaguucuaccaguccacgugcagcgccgucuccaagggguaccucagcgcccugcggaccggcugguacaccuccgugaucaccaucgagcugagcaacaucaaggagaacaagugcaacgggaccgacgccaaggugaagcucaucaagcaggagcuggacaaguacaagaacgcggucacggagcugcagcuccugaugcaguccaccccggcaaccggcuccggcuccgccaucgcgagcggcgucgccgugugcaaggugcugcaccucgagggggaggucaacaagaucaagagcgcccugcuguccaccaacaaggccguggugagccucuccaacggcgucagcgugcugaccuucaaggugcuggaccucaagaacuacaucgacaagcagcugcugcccauccugaacaagcagagcugcuccaucagcaacaucgagacggugaucgaguuccagcagaagaacaaccggcuccuggagaucacccgcgaguucagcgugaacgccggggucaccacccccguguccacguacaugcugaccaacagcgagcuccugucccugaucaacgacaugccgaucaccaacgaccagaagaagcucaugagcaacaacgugcagaucguccggcagcaguccuacagcaucaugugcaucaucaaggaggaggugcuggcguacgugguccagcugccccucuacggcgugaucgacacccccugcuggaagcugcacacgagcccccugugcaccaccaacaccaaggagggguccaacaucugccucacgcgcaccgaccggggcugguacugcgacaacgccggcagcgucuccuucuucccgcaggccgagaccugcaaggugcagagcaaccgcguguucugcgacaccaugaacucccggacgcugcccagcgagguaaaccucugcaacgucgacaucuucaaccccaaguacgacugcaagaucaugaccuccaagaccgacgugagcuccagcgugaucaccucccugggggccaucgucagcugcuacggcaagacgaagugcaccgccagcaacaagaaccgggggaucaucaagaccuucuccaacggcugcgacuacgugagcaacaagggcguggacaccguguccgucgggaacacccuguacuacgugaacaagcaggagggcaagagccucuacgugaagggggagcccaucaucaacuucuacgacccgcuggucuuccccuccgacgaguucgacgcgagcaucucccaggugaacgagaagaucaaccagagccuggccuucauccgcaaguccgacgagcugcuccacaacgugaacgccggcaagagcacgaccaacaucaugaucaccaccaucaucaucgucaucaucgugauccugcugucccucaucgccguggggcugcugcucuacugcaaggcccggagcacgcccgucacccuguccaaggaccagcugagcggcaucaacaacaucgcguucuccaacugaggacuaguggaagcauuuuccuggcugauuaaaagaaauuacucagcuauggucaucuguuccuguuagaaggcuaugcagcauauuauauacuaugcgcauguuaugaaaugcauaauaaaaaauuuuaaaaaaucuaaaagaucuaaaaaaaaaaaaaaaaaaaaaaaaaaaaaaaaaaaaaaaaaaaaaaaaaaaaaaaaaaaaaaaaugcaucccccccccccccccccccccccccccccccaaaggcucuuuucagagccaccagaauu

SEQ ID NO: 3948 - RNA, 2006 nt, Artificial Sequence
  mRNA product Design c-2 comprising derived and/or modified sequence from HRSV(A2)__F_DSCav1_mut0 (opt1)
gggagacuccugucgggcggaaguaggaggaguagaguuuaaaaacaguacucuuuuuccgguucgggacguaguugaagcaacgacaagccggauaaccgcucuugagacaggaagcuuaccauggagcugcucauccugaaggccaacgccaucaccaccauccugacggcggugaccuucugcuucgccagcggccagaacaucaccgaggaguucuaccaguccacgugcagcgccgucuccaagggguaccucagcgcccugcgcaccggcugguacaccuccgugaucaccaucgagcugagcaacaucaaggagaacaagugcaacgggaccgacgccaaggugaagcucaucaagcaggagcuggacaaguacaagaacgcggucacggagcugcagcuccugaugcaguccacccccgccaccggcagcggguccgccaucgccagcggcguggcggugugcaagguccugcaccucgagggcgaggugaacaagaucaaguccgcccugcugagcaccaacaaggccguggucucccucagcaacgggguguccgugcugacguucaagguccuggaccucaagaacuacaucgacaagcagcugcugccgauccucaacaagcagagcugcuccaucagcaacaucgagaccgugaucgaguuccagcagaagaacaaccggcugcuggagaucacccgcgaguucuccgugaacgccggcgucaccacgcccgugagcaccuacaugcucaccaacagcgagcugcugucccucaucaacgacaugcccaucaccaacgaccagaagaagcugaugagcaacaacgugcagaucguccggcagcaguccuacagcaucaugugcaucaucaaggaggaggugcuggccuacgugguccagcucccccuguacggggugaucgacacgccgugcuggaagcugcacaccagcccccucugcaccaccaacacgaaggagggcuccaacaucugccugacccgcaccgaccgggggugguacugcgacaacgcgggcuccgugagcuucuucccccaggccgagaccugcaagguccaguccaaccgcguguucugcgacacgaugaacagccggacccuccccuccgaggucaaccugugcaacguggacaucuucaacccgaaguacgacugcaagaucaugaccagcaagaccgacguguccagcuccgucaucacgagccugggcgccaucguguccugcuacgggaagaccaagugcaccgccagcaacaagaaccggggcaucaucaagaccuucuccaacgggugcgacuacgugagcaacaagggcgucgacacggugagcgugggcaacacccucuacuacgucaacaagcaggaggggaagucccuguacgugaagggcgagcccaucaucaacuucuacgacccccugguguuccccagcgacgaguucgacgccuccaucagccaggucaacgagaagaucaaccagucccucgcguucauccgcaagagcgacgagcugcugcacaacgugaacgccgggaaguccaccaccaacaucaugaucaccacgaucaucaucgugaucaucgucauccuccugagccugaucgccgugggccuccugcuguacugcaaggcccgguccaccccggugacccugagcaaggaccagcucuccgggaucaacaacaucgccuucagcaacugaggacuaguggaagcauuuuccuggcugauuaaaagaaauuacucagcuauggucaucuguuccuguuagaaggcuaugcagcauauuauauacuaugcgcauguuaugaaaugcauaauaaaaaauuuuaaaaaaucuaaaagaucuaaaaaaaaaaaaaaaaaaaaaaaaaaaaaaaaaaaaaaaaaaaaaaaaaaaaaaaaaaaaaaaaugcaucccccccccccccccccccccccccccccccaaaggcucuuuucagagccaccagaauu

SEQ ID NO: 3949 - RNA, 2006 nt, Artificial Sequence
  mRNA product Design c-2 comprising derived and/or modified sequence from HRSV(A2)__F_DSCav1_mut0 (opt2)
gggagacuccugucgggcggaaguaggaggaguagaguuuaaaaacaguacucuuuuuccgguucgggacguaguugaagcaacgacaagccggauaaccgcucuugagacaggaagcuuaccauggagcuccucauccucaaggccaacgccaucaccaccauccucaccgccgucaccuucugcuucgccuccggccagaacaucaccgaggaguucuaccaguccaccugcuccgccgucuccaagggcuaccucuccgcccuccgcaccggcugguacaccuccgucaucaccaucgagcucuccaacaucaaggagaacaagugcaacggcaccgacgccaaggucaagcucaucaagcaggagcucgacaaguacaagaacgccgucaccgagcuccagcuccucaugcaguccacccccgccaccggcuccggcuccgccaucgccuccggcgucgccgucugcaagguccuccaccucgagggcgaggucaacaagaucaaguccgcccuccucuccaccaacaaggccgucgucucccucuccaacggcgucuccguccucaccuucaagguccucgaccucaagaacuacaucgacaagcagcuccuccccauccucaacaagcaguccugcuccaucuccaacaucgagaccgucaucgaguuccagcagaagaacaaccgccuccucgagaucacccgcgaguucuccgucaacgccggcgucaccacccccgucuccaccuacaugcucaccaacuccgagcuccucucccucaucaacgacaugcccaucaccaacgaccagaagaagcucauguccaacaacguccagaucguccgccagcaguccuacuccaucaugugcaucaucaaggaggagguccucgccuacgucguccagcucccccucuacggcgucaucgacacccccugcuggaagcuccacaccuccccccucugcaccaccaacaccaaggagggcuccaacaucugccucacccgcaccgaccgcggcugguacugcgacaacgccggcuccgucuccuucuucccccaggccgagaccugcaagguccaguccaaccgcgucuucugcgacaccaugaacucccgcacccuccccuccgaggucaaccucugcaacgucgacaucuucaaccccaaguacgacugcaagaucaugaccuccaagaccgacgucuccuccuccgucaucaccucccucggcgccaucgucuccugcuacggcaagaccaagugcaccgccuccaacaagaaccgcggcaucaucaagaccuucuccaacggcugcgacuacgucuccaacaagggcgucgacaccgucuccgucggcaacacccucuacuacgucaacaagcaggagggcaagucccucuacgucaagggcgagcccaucaucaacuucuacgacccccucgucuuccccuccgacgaguucgacgccuccaucucccaggucaacgagaagaucaaccagucccucgccuucauccgcaaguccgacgagcuccuccacaacgucaacgccggcaaguccaccaccaacaucaugaucaccaccaucaucaucgucaucaucgucauccuccucucccucaucgccgucggccuccuccucuacugcaaggcccgcuccacccccgucacccucuccaaggaccagcucuccggcaucaacaacaucgccuucuccaacugaggacuaguggaagcauuuuccuggcugauuaaaagaaauuacucagcuauggucaucuguuccuguuagaaggcuaugcagcauauuauauacuaugcgcauguuaugaaaugcauaauaaaaaauuuuaaaaaaucuaaaagaucuaaaaaaaaaaaaaaaaaaaaaaaaaaaaaaaaaaaaaaaaaaaaaaaaaaaaaaaaaaaaaaaaugcaucccccccccccccccccccccccccccccccaaaggcucuuuucagagccaccagaauu

SEQ ID NO: 3950 - RNA, 2006 nt, Artificial Sequence
  mRNA product Design c-2 comprising derived and/or modified sequence from HRSV(A2)__F_DSCav1_mut0 (opt3)
gggagacuccugucgggcggaaguaggaggaguagaguuuaaaaacaguacucuuuuuccgguucgggacguaguugaagcaacgacaagccggauaaccgcucuugagacaggaagcuuaccauggagcugcucauccuuaaggccaacgcuauuaccacaauacugacugcagugacguucugcuuugccagcggccagaauaucaccgaagaguucuaccaauccacauguucugcggucucaaaaggguauuugagugcuuuaagaacuggaugguacaccagcguuauuacaaucgaacuguccaacauuaaggagaauaaaugcaacgguaccgacgccaaggugaaacuaaucaagcaggaacucgauaaguauaaaaaugcaguaacugagcugcagcuucugaugcagucuacacccgccaccggcucggggucagcuauagcaagcggaguggccgucuguaagguguugcaccucgagggcgaaguuaacaaaaucaagagugcucugcuguccacgaauaaagccguggucucucucagcaacgguguguccguauuaacuuuuaagguucuggaccuuaagaauuacauugauaaacaauugcugccuauccuaaacaagcagucaugcaguauuagcaauaucgagaccgugauagaguuccagcagaaaaacaauaggcuccuggaaauuacacgggaguuuucugucaacgcgggggugacuaccccaguguccacauauaugcuuaccaauucagaacuguugagccucaucaacgacaugccgauuacgaacgaucaaaagaaacugaugaguaauaacguccagaucguucgccagcagucuuacuccaucauguguauuauaaaggaggaaguguuagcauauguagugcaacugccccucuacggagucaucgacacuccuugcuggaaacuucauacaagcccacuguguaccacuaauacaaaggagggcucgaacauuugcuugacccgaacggaucguggcugguacugugacaaugccgggucuguguccuucuuuccccaggcugaaaccugcaagguucagucaaacagaguguucugugauacaaugaauaguagaacucugccuagcgaggucaaccucugcaauguggacaucuuuaacccaaaauaugauugcaagauaaugaccuccaaaacagacguaucuagcucaguuauuaccagucugggagccaucguguccuguuacgguaagacuaaaugcacagcaagcaauaagaacaggggcaucauuaagaccuucucuaaugggugugauuaugucucaaacaaaggaguggacacugucagugugggcaauacgcuuuacuauguuaacaagcaagaggguaaaagccuguacgugaagggggaacccaucauuaacuuuuaugacccuuugguauucccauccgaugaguuugacgcuucuauaucgcaggucaaugagaaaaucaaccagagccucgccuucauucggaaguccgaugaacuguuacacaaugugaacgcgggaaagucaacaaccaauaucaugaucacuaccauuauaaucguuauuaucgugauucugcuaagucucaucgccgucggccugcuuuuguacugcaaagcacgcucuacaccggugacccugagcaaggaccagcucuccggcauaaacaauaucgcuuucucaaacugaggacuaguggaagcauuuuccuggcugauuaaaagaaauuacucagcuauggucaucuguuccuguuagaaggcuaugcagcauauuauauacuaugcgcauguuaugaaaugcauaauaaaaaauuuuaaaaaaucuaaaagaucuaaaaaaaaaaaaaaaaaaaaaaaaaaaaaaaaaaaaaaaaaaaaaaaaaaaaaaaaaaaaaaaaugcaucccccccccccccccccccccccccccccccaaaggcucuuuucagagccaccagaauu

SEQ ID NO: 3951 - RNA, 2006 nt, Artificial Sequence
  mRNA product Design c-2 comprising derived and/or modified sequence from HRSV(A2)__F_DSCav1_mut0 (opt4)
gggagacuccugucgggcggaaguaggaggaguagaguuuaaaaacaguacucuuuuuccgguucgggacguaguugaagcaacgacaagccggauaaccgcucuugagacaggaagcuuaccauggagcugcugauccugaaggccaacgccaucaccaccauccugaccgccgugaccuucugcuucgccagcggccagaacaucaccgaggaguucuaccagagcaccugcagcgccgugagcaagggcuaccugagcgcccugagaaccggcugguacaccagcgugaucaccaucgagcugagcaacaucaaggagaacaagugcaacggcaccgacgccaaggugaagcugaucaagcaggagcuggacaaguacaagaacgccgugaccgagcugcagcugcugaugcagagcacccccgccaccggcagcggcagcgccaucgccagcggcguggccgugugcaaggugcugcaccuggagggcgaggugaacaagaucaagagcgcccugcugagcaccaacaaggccguggugagccugagcaacggcgugagcgugcugaccuucaaggugcuggaccugaagaacuacaucgacaagcagcugcugcccauccugaacaagcagagcugcagcaucagcaacaucgagaccgugaucgaguuccagcagaagaacaacagacugcuggagaucaccagagaguucagcgugaacgccggcgugaccacccccgugagcaccuacaugcugaccaacagcgagcugcugagccugaucaacgacaugcccaucaccaacgaccagaagaagcugaugagcaacaacgugcagaucgugagacagcagagcuacagcaucaugugcaucaucaaggaggaggugcuggccuacguggugcagcugccccuguacggcgugaucgacacccccugcuggaagcugcacaccagcccccugugcaccaccaacaccaaggagggcagcaacaucugccugaccagaaccgacagaggcugguacugcgacaacgccggcagcgugagcuucuucccccaggccgagaccugcaaggugcagagcaacagaguguucugcgacaccaugaacagcagaacccugcccagcgaggugaaccugugcaacguggacaucuucaaccccaaguacgacugcaagaucaugaccagcaagaccgacgugagcagcagcgugaucaccagccugggcgccaucgugagcugcuacggcaagaccaagugcaccgccagcaacaagaacagaggcaucaucaagaccuucagcaacggcugcgacuacgugagcaacaagggcguggacaccgugagcgugggcaacacccuguacuacgugaacaagcaggagggcaagagccuguacgugaagggcgagcccaucaucaacuucuacgacccccugguguuccccagcgacgaguucgacgccagcaucagccaggugaacgagaagaucaaccagagccuggccuucaucagaaagagcgacgagcugcugcacaacgugaacgccggcaagagcaccaccaacaucaugaucaccaccaucaucaucgugaucaucgugauccugcugagccugaucgccgugggccugcugcuguacugcaaggccagaagcacccccgugacccugagcaaggaccagcugagcggcaucaacaacaucgccuucagcaacugaggacuaguggaagcauuuuccuggcugauuaaaagaaauuacucagcuauggucaucuguuccuguuagaaggcuaugcagcauauuauauacuaugcgcauguuaugaaaugcauaauaaaaaauuuuaaaaaaucuaaaagaucuaaaaaaaaaaaaaaaaaaaaaaaaaaaaaaaaaaaaaaaaaaaaaaaaaaaaaaaaaaaaaaaaugcaucccccccccccccccccccccccccccccccaaaggcucuuuucagagccaccagaauu

SEQ ID NO: 3952 - RNA, 2006 nt, Artificial Sequence
  mRNA product Design c-2 comprising derived and/or modified sequence from HRSV(A2)__F_DSCav1_mut0 (opt5)
gggagacuccugucgggcggaaguaggaggaguagaguuuaaaaacaguacucuuuuuccgguucgggacguaguugaagcaacgacaagccggauaaccgcucuugagacaggaagcuuaccauggagcugcucauccugaaggccaacgcuauuaccacaauccuuacggccgugaccuucugcuuugcgagcggccagaauauuacagaagaguucuaccaauccaccuguucugcugucagcaaaggguaucuguccgcccucagaacaggaugguacaccucuguuaucacaauugaacugagcaacaucaaggagaauaaaugcaacggcaccgacgccaaggugaaacuuaucaagcaggaacuggauaaguauaaaaaugcugugacggagcuccagcugcugaugcaguccacccccgccacagggucuggaagcgcuauugccuccggcgucgcgguguguaagguucuccaccuggagggggaagugaacaaaaucaagagcgcccuucugucuaccaauaaagcugucgugucccucagcaacggaguuucugugcugacauuuaagguccuugaccugaagaauuacauugauaaacaacuccugccuauccugaacaagcaguccugcagcauuucuaauaucgagaccgugauugaguuccagcagaaaaacaaucggcuccuggaaaucacgcgcgaguuuuccgugaacgccggcgucacaaccccgguuagcacauauaugcuuaccaauuccgaacugcucucucugaucaacgacaugcccauuaccaacgaucaaaagaaacuuaugagcaauaacgugcagaucgugagacagcaguccuacagcauuauguguaucauuaaggaggaaguccuggcuuaugugguucaacucccucuguacggcgugaucgacacacccugcuggaaacugcauacgucuccucucuguaccacaaauaccaaggagggguccaacaucugccugacacggaccgaucgcggaugguacugugacaaugccggcagcgucucuuucuuuccccaggcggaaacgugcaaggugcagagcaacagaguuuucugugauacaaugaacuccagaacccugccuucugaggugaaucucugcaaugucgacauuuuuaacccgaaauaugauugcaagaucaugaccagcaaaacagacguguccagcucugucauuaccucccugggggccaucgugagcuguuacggaaagacaaaaugcacggcuucuaauaagaaccggggcauuaucaagaccuucuccaaugggugugauuauguuagcaacaaaggaguggacacagucuccgugggcaauacccuuuacuauguuaacaagcaagagggcaaaucucuguacgugaagggggaacccaucauuaacuuuuaugacccucucgucuuccccagcgaugaguuugacgccuccaucucucaggugaaugagaaaauuaaccagagccuggcuuucauccgcaaguccgaugaacugcuccacaaugugaacgccggaaagagcacaaccaauauuaugaucacgaccauuaucaucguuauuaucgucauucugcuuucucugaucgccgugggccuccugcuguacugcaaagcuagauccacaccugugacccuuagcaaggaccagcucucugggauuaacaauaucgcguucuccaacugaggacuaguggaagcauuuuccuggcugauuaaaagaaauuacucagcuauggucaucuguuccuguuagaaggcuaugcagcauauuauauacuaugcgcauguuaugaaaugcauaauaaaaaauuuuaaaaaaucuaaaagaucuaaaaaaaaaaaaaaaaaaaaaaaaaaaaaaaaaaaaaaaaaaaaaaaaaaaaaaaaaaaaaaaaugcaucccccccccccccccccccccccccccccccaaaggcucuuuucagagccaccagaauu

SEQ ID NO: 3953 - RNA, 2006 nt, Artificial Sequence
  mRNA product Design c-2 comprising derived and/or modified sequence from HRSV(A2)__F_DSCav1_mut0 (opt6)
gggagacuccugucgggcggaaguaggaggaguagaguuuaaaaacaguacucuuuuuccgguucgggacguaguugaagcaacgacaagccggauaaccgcucuugagacaggaagcuuaccauggaacuacuaauacuaaaagccaaugcaauaacaaccauacuaaccgccguaacauuuuguuucgcaucaggucaaaacauaaccgaagaauuuuaucaaucaacaugcucagcaguaucaaaaggauacuuauccgcucuaagaacaggaugguacacaaguguaauuacaauagagcucucaaacauaaaagaaaacaaaugcaauggaacugacgcaaaaguuaaacuuauaaaacaagaacuagauaaauauaaaaaugcaguaaccgaauuacaacuccuaaugcaauccacaccugcuaccgguuccggaucagccauagcaucuggaguagccguaugcaaaguccuccaccuagaaggagaaguaaauaaaaucaaaucagcacuauuaucuaccaauaaagcaguugucucacuauccaauggcguaucaguacuaacauucaaaguauuagaccuuaaaaacuacauagacaaacaacuauuaccaauucugaacaaacaauccuguucaauaucaaacaucgaaacgguaauagaauuucaacaaaaaaauaacagauuacuugaaauaacaagagaauuuucaguaaaugcaggaguuacaacacccgucuccaccuacaugcucacaaauucagaauuauuaucacuuauaaacgacaugccaauaacuaacgaccaaaaaaaacuaaugucaaacaauguccaaauaguccgacaacaauccuacucaauaaugugcauuauaaaagaagaaguccuagccuacguuguccaacuacccuuauauggaguaauagauaccccaugcuggaaacuucauaccuccccccuaugcacaacaaacacaaaagaaggcucaaacaucugcuuaacacguacagaccgagguugguacugugauaacgcaggauccguaucauuuuucccacaagcagaaacaugcaaaguacaaucaaaccgcguuuuuugugacaccaugaacagcagaacccucccuucagaaguaaaccuaugcaacgucgauauauuuaacccaaaauacgauugcaaaauaaugacaucaaaaaccgaugucucaucuucaguaauaaccucucuaggagcaauagucucauguuacggaaaaacaaaaugcacagcaaguaauaaaaauagaggaauaauaaaaacauucucuaauggcugcgacuacguauccaauaaaggcguugacacaguauccguaggcaacacacucuacuauguuaacaaacaagaaggaaaaaguuuauacguuaaaggagaaccaauuauaaacuuuuacgacccacucguauucccaucugaugaauuugacgcaucaaucucacaaguaaaugaaaaaaucaaucagucccuugccuuuauaagaaaaucagaugaacuuuuacacaacguuaacgccggaaaaucaacaaccaauauaaugaucacaaccauaauaauaguuauaauuguaauuuuauuauccuuaauagccgucggacuacuacuauacugcaaagcaagaucuacacccguaacccuaucaaaagaccaacuaaguggaauaaauaacauugcauucucaaauuaaggacuaguggaagcauuuuccuggcugauuaaaagaaauuacucagcuauggucaucuguuccuguuagaaggcuaugcagcauauuauauacuaugcgcauguuaugaaaugcauaauaaaaaauuuuaaaaaaucuaaaagaucuaaaaaaaaaaaaaaaaaaaaaaaaaaaaaaaaaaaaaaaaaaaaaaaaaaaaaaaaaaaaaaaaugcaucccccccccccccccccccccccccccccccaaaggcucuuuucagagccaccagaauu

SEQ ID NO: 3954 - RNA, 2006 nt, Artificial Sequence
  mRNA product Design c-2 comprising derived and/or modified sequence from HRSV(A2)__F_DSCav1_mut0 (opt11)
gggagacuccugucgggcggaaguaggaggaguagaguuuaaaaacaguacucuuuuuccgguucgggacguaguugaagcaacgacaagccggauaaccgcucuugagacaggaagcuuaccauggaacuccuaauacuaaaggcaaacgcaaucacuacaauucuaaccgccgugacauucugcuucgccuccggacaaaacaucaccgaagaauuuuaccaauccacaugcucggccgucaguaaaggcuaccucucggcucuccgaaccggcugguacaccuccgucaucaccaucgaacucuccaacaucaaagaaaacaaaugcaacggcaccgacgccaaagucaaacuaaucaaacaagaacucgacaaauacaaaaacgccgucacagaacuccaacuacuaaugcaaucaacacccgcuacaggaagcggcuccgccaucgccagcggcguagcugucugcaaaguccuccaccucgaaggugaagucaacaaaaucaaaucagcccuacucagcacaaacaaagccguuguaagccuauccaacggcgucuccguacuaacauucaaaguccuugaccucaagaacuacaucgacaaacaacuucucccaauccuaaacaaacaaagcugcucaauuuccaacaucgaaacaguaaucgaauuucaacaaaaaaacaaccgacuccucgaaaucacccgcgaauuuuccguuaacgccggcguuacaacccccgucuccaccuacaugcucaccaauuccgaacuacuaucacucauaaacgacaugccuaucacaaacgaccaaaaaaaacuaaugucaaacaauguccaaaucguccgccagcaaagcuauuccaucaugugcaucaucaaagaggaaguccucgccuacguaguccaacugccccucuacggcgucauugauacccccugcuggaaacuccacaccuccccccucugcaccacaaacaccaaagaagguuccaacaucugccuaacacgaaccgacagaggcugguacugcgacaacgccggcagcgucuccuucuucccccaagcagaaaccuguaaaguccagucuaaccgcgucuucugcgacacaaugaacucaagaacccuaccuuccgaaguaaaccucugcaacguagacaucuucaacccuaaauacgacugcaaaaucaugacuucaaaaacagacguaagcucuuccguaaucacuucccucggcgccaucguauccugcuacgguaaaaccaaaugcaccgccuccaacaaaaaccgagggaucauaaaaaccuucuccaacggcugcgacuacguaucuaacaaaggcgucgacaccgucuccgucggcaacacccucuauuacguaaacaaacaagagggcaaaucacuauacgucaaaggcgagccaaucauaaacuucuaugacccacucgucuucccuucagacgaauuugaugccagcaucagccaagucaacgaaaaaaucaaccaaucacucgccuucauccgcaaaagcgacgaacuccuucacaacgucaacgcaggcaaaucaaccaccaacaucaugaucaccaccaucaucaucgucaucaucguuauccuacucagccucaucgcaguuggucuucuccuuuacugcaaagcccgcuccacccccgucacccucaguaaagaccaacucagcggaaucaacaacauagcauucuccaacuaaggacuaguggaagcauuuuccuggcugauuaaaagaaauuacucagcuauggucaucuguuccuguuagaaggcuaugcagcauauuauauacuaugcgcauguuaugaaaugcauaauaaaaaauuuuaaaaaaucuaaaagaucuaaaaaaaaaaaaaaaaaaaaaaaaaaaaaaaaaaaaaaaaaaaaaaaaaaaaaaaaaaaaaaaaugcaucccccccccccccccccccccccccccccccaaaggcucuuuucagagccaccagaauu

SEQ ID NO: 3955 - RNA, 1983 nt, Artificial Sequence
  mRNA product Design c-3 comprising derived and/or modified sequence from HRSV(A2)__F_DSCav1_mut0 (opt1)
gggagaguccgcucagccagguugcagaagcggcuuagcguguguccuaaucuucucucugcguguagguaggccugugccgcaaacaagcuuaccauggagcugcucauccugaaggccaacgccaucaccaccauccugacggcggugaccuucugcuucgccagcggccagaacaucaccgaggaguucuaccaguccacgugcagcgccgucuccaagggguaccucagcgcccugcggaccggcugguacaccuccgugaucaccaucgagcugagcaacaucaaggagaacaagugcaacgggaccgacgccaaggugaagcucaucaagcaggagcuggacaaguacaagaacgcggucacggagcugcagcuccugaugcaguccaccccggcaaccggcuccggcuccgccaucgcgagcggcgucgccgugugcaaggugcugcaccucgagggggaggucaacaagaucaagagcgcccugcuguccaccaacaaggccguggugagccucuccaacggcgucagcgugcugaccuucaaggugcuggaccucaagaacuacaucgacaagcagcugcugcccauccugaacaagcagagcugcuccaucagcaacaucgagacggugaucgaguuccagcagaagaacaaccggcuccuggagaucacccgcgaguucagcgugaacgccggggucaccacccccguguccacguacaugcugaccaacagcgagcuccugucccugaucaacgacaugccgaucaccaacgaccagaagaagcucaugagcaacaacgugcagaucguccggcagcaguccuacagcaucaugugcaucaucaaggaggaggugcuggcguacgugguccagcugccccucuacggcgugaucgacacccccugcuggaagcugcacacgagcccccugugcaccaccaacaccaaggagggguccaacaucugccucacgcgcaccgaccggggcugguacugcgacaacgccggcagcgucuccuucuucccgcaggccgagaccugcaaggugcagagcaaccgcguguucugcgacaccaugaacucccggacgcugcccagcgagguaaaccucugcaacgucgacaucuucaaccccaaguacgacugcaagaucaugaccuccaagaccgacgugagcuccagcgugaucaccucccugggggccaucgucagcugcuacggcaagacgaagugcaccgccagcaacaagaaccgggggaucaucaagaccuucuccaacggcugcgacuacgugagcaacaagggcguggacaccguguccgucgggaacacccuguacuacgugaacaagcaggagggcaagagccucuacgugaagggggagcccaucaucaacuucuacgacccgcuggucuuccccuccgacgaguucgacgcgagcaucucccaggugaacgagaagaucaaccagagccuggccuucauccgcaaguccgacgagcugcuccacaacgugaacgccggcaagagcacgaccaacaucaugaucaccaccaucaucaucgucaucaucgugauccugcugucccucaucgccguggggcugcugcucuacugcaaggcccggagcacgcccgucacccuguccaaggaccagcugagcggcaucaacaacaucgcguucuccaacugaggacuaguacuggcugcaucucccuuuccucuguccuccauccuucucccaggauggugaagggggaccugguacccagugauccccaccccaggauccuaaaucaugacuuaccugcuaauaaaaacucauuggaaaagugagaagaucuaaaaaaaaaaaaaaaaaaaaaaaaaaaaaaaaaaaaaaaaaaaaaaaaaaaaaaaaaaaaaaaaugcaucccccccccccccccccccccccccccccccaaaggcucuuuucagagccaccagaauu

SEQ ID NO: 3956 - RNA, 1983 nt, Artificial Sequence
  mRNA product Design c-3 comprising derived and/or modified sequence from HRSV(A2)__F_DSCav1_mut0 (opt1)
gggagaguccgcucagccagguugcagaagcggcuuagcguguguccuaaucuucucucugcguguagguaggccugugccgcaaacaagcuuaccauggagcugcucauccugaaggccaacgccaucaccaccauccugacggcggugaccuucugcuucgccagcggccagaacaucaccgaggaguucuaccaguccacgugcagcgccgucuccaagggguaccucagcgcccugcgcaccggcugguacaccuccgugaucaccaucgagcugagcaacaucaaggagaacaagugcaacgggaccgacgccaaggugaagcucaucaagcaggagcuggacaaguacaagaacgcggucacggagcugcagcuccugaugcaguccacccccgccaccggcagcggguccgccaucgccagcggcguggcggugugcaagguccugcaccucgagggcgaggugaacaagaucaaguccgcccugcugagcaccaacaaggccguggucucccucagcaacgggguguccgugcugacguucaagguccuggaccucaagaacuacaucgacaagcagcugcugccgauccucaacaagcagagcugcuccaucagcaacaucgagaccgugaucgaguuccagcagaagaacaaccggcugcuggagaucacccgcgaguucuccgugaacgccggcgucaccacgcccgugagcaccuacaugcucaccaacagcgagcugcugucccucaucaacgacaugcccaucaccaacgaccagaagaagcugaugagcaacaacgugcagaucguccggcagcaguccuacagcaucaugugcaucaucaaggaggaggugcuggccuacgugguccagcucccccuguacggggugaucgacacgccgugcuggaagcugcacaccagcccccucugcaccaccaacacgaaggagggcuccaacaucugccugacccgcaccgaccgggggugguacugcgacaacgcgggcuccgugagcuucuucccccaggccgagaccugcaagguccaguccaaccgcguguucugcgacacgaugaacagccggacccuccccuccgaggucaaccugugcaacguggacaucuucaacccgaaguacgacugcaagaucaugaccagcaagaccgacguguccagcuccgucaucacgagccugggcgccaucguguccugcuacgggaagaccaagugcaccgccagcaacaagaaccggggcaucaucaagaccuucuccaacgggugcgacuacgugagcaacaagggcgucgacacggugagcgugggcaacacccucuacuacgucaacaagcaggaggggaagucccuguacgugaagggcgagcccaucaucaacuucuacgacccccugguguuccccagcgacgaguucgacgccuccaucagccaggucaacgagaagaucaaccagucccucgcguucauccgcaagagcgacgagcugcugcacaacgugaacgccgggaaguccaccaccaacaucaugaucaccacgaucaucaucgugaucaucgucauccuccugagccugaucgccgugggccuccugcuguacugcaaggcccgguccaccccggugacccugagcaaggaccagcucuccgggaucaacaacaucgccuucagcaacugaggacuaguacuggcugcaucucccuuuccucuguccuccauccuucucccaggauggugaagggggaccugguacccagugauccccaccccaggauccuaaaucaugacuuaccugcuaauaaaaacucauuggaaaagugagaagaucuaaaaaaaaaaaaaaaaaaaaaaaaaaaaaaaaaaaaaaaaaaaaaaaaaaaaaaaaaaaaaaaaugcaucccccccccccccccccccccccccccccccaaaggcucuuuucagagccaccagaauu

SEQ ID NO: 3957 - RNA, 1983 nt, Artificial Sequence
  mRNA product Design c-3 comprising derived and/or modified sequence from HRSV(A2)__F_DSCav1_mut0 (opt2)
gggagaguccgcucagccagguugcagaagcggcuuagcguguguccuaaucuucucucugcguguagguaggccugugccgcaaacaagcuuaccauggagcuccucauccucaaggccaacgccaucaccaccauccucaccgccgucaccuucugcuucgccuccggccagaacaucaccgaggaguucuaccaguccaccugcuccgccgucuccaagggcuaccucuccgcccuccgcaccggcugguacaccuccgucaucaccaucgagcucuccaacaucaaggagaacaagugcaacggcaccgacgccaaggucaagcucaucaagcaggagcucgacaaguacaagaacgccgucaccgagcuccagcuccucaugcaguccacccccgccaccggcuccggcuccgccaucgccuccggcgucgccgucugcaagguccuccaccucgagggcgaggucaacaagaucaaguccgcccuccucuccaccaacaaggccgucgucucccucuccaacggcgucuccguccucaccuucaagguccucgaccucaagaacuacaucgacaagcagcuccuccccauccucaacaagcaguccugcuccaucuccaacaucgagaccgucaucgaguuccagcagaagaacaaccgccuccucgagaucacccgcgaguucuccgucaacgccggcgucaccacccccgucuccaccuacaugcucaccaacuccgagcuccucucccucaucaacgacaugcccaucaccaacgaccagaagaagcucauguccaacaacguccagaucguccgccagcaguccuacuccaucaugugcaucaucaaggaggagguccucgccuacgucguccagcucccccucuacggcgucaucgacacccccugcuggaagcuccacaccuccccccucugcaccaccaacaccaaggagggcuccaacaucugccucacccgcaccgaccgcggcugguacugcgacaacgccggcuccgucuccuucuucccccaggccgagaccugcaagguccaguccaaccgcgucuucugcgacaccaugaacucccgcacccuccccuccgaggucaaccucugcaacgucgacaucuucaaccccaaguacgacugcaagaucaugaccuccaagaccgacgucuccuccuccgucaucaccucccucggcgccaucgucuccugcuacggcaagaccaagugcaccgccuccaacaagaaccgcggcaucaucaagaccuucuccaacggcugcgacuacgucuccaacaagggcgucgacaccgucuccgucggcaacacccucuacuacgucaacaagcaggagggcaagucccucuacgucaagggcgagcccaucaucaacuucuacgacccccucgucuuccccuccgacgaguucgacgccuccaucucccaggucaacgagaagaucaaccagucccucgccuucauccgcaaguccgacgagcuccuccacaacgucaacgccggcaaguccaccaccaacaucaugaucaccaccaucaucaucgucaucaucgucauccuccucucccucaucgccgucggccuccuccucuacugcaaggcccgcuccacccccgucacccucuccaaggaccagcucuccggcaucaacaacaucgccuucuccaacugaggacuaguacuggcugcaucucccuuuccucuguccuccauccuucucccaggauggugaagggggaccugguacccagugauccccaccccaggauccuaaaucaugacuuaccugcuaauaaaaacucauuggaaaagugagaagaucuaaaaaaaaaaaaaaaaaaaaaaaaaaaaaaaaaaaaaaaaaaaaaaaaaaaaaaaaaaaaaaaaugcaucccccccccccccccccccccccccccccccaaaggcucuuuucagagccaccagaauu

SEQ ID NO: 3958 - RNA, 1983 nt, Artificial Sequence
  mRNA product Design c-3 comprising derived and/or modified sequence from HRSV(A2)__F_DSCav1_mut0 (opt3)
gggagaguccgcucagccagguugcagaagcggcuuagcguguguccuaaucuucucucugcguguagguaggccugugccgcaaacaagcuuaccauggagcugcucauccuuaaggccaacgcuauuaccacaauacugacugcagugacguucugcuuugccagcggccagaauaucaccgaagaguucuaccaauccacauguucugcggucucaaaaggguauuugagugcuuuaagaacuggaugguacaccagcguuauuacaaucgaacuguccaacauuaaggagaauaaaugcaacgguaccgacgccaaggugaaacuaaucaagcaggaacucgauaaguauaaaaaugcaguaacugagcugcagcuucugaugcagucuacacccgccaccggcucggggucagcuauagcaagcggaguggccgucuguaagguguugcaccucgagggcgaaguuaacaaaaucaagagugcucugcuguccacgaauaaagccguggucucucucagcaacgguguguccguauuaacuuuuaagguucuggaccuuaagaauuacauugauaaacaauugcugccuauccuaaacaagcagucaugcaguauuagcaauaucgagaccgugauagaguuccagcagaaaaacaauaggcuccuggaaauuacacgggaguuuucugucaacgcgggggugacuaccccaguguccacauauaugcuuaccaauucagaacuguugagccucaucaacgacaugccgauuacgaacgaucaaaagaaacugaugaguaauaacguccagaucguucgccagcagucuuacuccaucauguguauuauaaaggaggaaguguuagcauauguagugcaacugccccucuacggagucaucgacacuccuugcuggaaacuucauacaagcccacuguguaccacuaauacaaaggagggcucgaacauuugcuugacccgaacggaucguggcugguacugugacaaugccgggucuguguccuucuuuccccaggcugaaaccugcaagguucagucaaacagaguguucugugauacaaugaauaguagaacucugccuagcgaggucaaccucugcaauguggacaucuuuaacccaaaauaugauugcaagauaaugaccuccaaaacagacguaucuagcucaguuauuaccagucugggagccaucguguccuguuacgguaagacuaaaugcacagcaagcaauaagaacaggggcaucauuaagaccuucucuaaugggugugauuaugucucaaacaaaggaguggacacugucagugugggcaauacgcuuuacuauguuaacaagcaagaggguaaaagccuguacgugaagggggaacccaucauuaacuuuuaugacccuuugguauucccauccgaugaguuugacgcuucuauaucgcaggucaaugagaaaaucaaccagagccucgccuucauucggaaguccgaugaacuguuacacaaugugaacgcgggaaagucaacaaccaauaucaugaucacuaccauuauaaucguuauuaucgugauucugcuaagucucaucgccgucggccugcuuuuguacugcaaagcacgcucuacaccggugacccugagcaaggaccagcucuccggcauaaacaauaucgcuuucucaaacugaggacuaguacuggcugcaucucccuuuccucuguccuccauccuucucccaggauggugaagggggaccugguacccagugauccccaccccaggauccuaaaucaugacuuaccugcuaauaaaaacucauuggaaaagugagaagaucuaaaaaaaaaaaaaaaaaaaaaaaaaaaaaaaaaaaaaaaaaaaaaaaaaaaaaaaaaaaaaaaaugcaucccccccccccccccccccccccccccccccaaaggcucuuuucagagccaccagaauu

SEQ ID NO: 3959 - RNA, 1983 nt, Artificial Sequence
  mRNA product Design c-3 comprising derived and/or modified sequence from HRSV(A2)__F_DSCav1_mut0 (opt4)
gggagaguccgcucagccagguugcagaagcggcuuagcguguguccuaaucuucucucugcguguagguaggccugugccgcaaacaagcuuaccauggagcugcugauccugaaggccaacgccaucaccaccauccugaccgccgugaccuucugcuucgccagcggccagaacaucaccgaggaguucuaccagagcaccugcagcgccgugagcaagggcuaccugagcgcccugagaaccggcugguacaccagcgugaucaccaucgagcugagcaacaucaaggagaacaagugcaacggcaccgacgccaaggugaagcugaucaagcaggagcuggacaaguacaagaacgccgugaccgagcugcagcugcugaugcagagcacccccgccaccggcagcggcagcgccaucgccagcggcguggccgugugcaaggugcugcaccuggagggcgaggugaacaagaucaagagcgcccugcugagcaccaacaaggccguggugagccugagcaacggcgugagcgugcugaccuucaaggugcuggaccugaagaacuacaucgacaagcagcugcugcccauccugaacaagcagagcugcagcaucagcaacaucgagaccgugaucgaguuccagcagaagaacaacagacugcuggagaucaccagagaguucagcgugaacgccggcgugaccacccccgugagcaccuacaugcugaccaacagcgagcugcugagccugaucaacgacaugcccaucaccaacgaccagaagaagcugaugagcaacaacgugcagaucgugagacagcagagcuacagcaucaugugcaucaucaaggaggaggugcuggccuacguggugcagcugccccuguacggcgugaucgacacccccugcuggaagcugcacaccagcccccugugcaccaccaacaccaaggagggcagcaacaucugccugaccagaaccgacagaggcugguacugcgacaacgccggcagcgugagcuucuucccccaggccgagaccugcaaggugcagagcaacagaguguucugcgacaccaugaacagcagaacccugcccagcgaggugaaccugugcaacguggacaucuucaaccccaaguacgacugcaagaucaugaccagcaagaccgacgugagcagcagcgugaucaccagccugggcgccaucgugagcugcuacggcaagaccaagugcaccgccagcaacaagaacagaggcaucaucaagaccuucagcaacggcugcgacuacgugagcaacaagggcguggacaccgugagcgugggcaacacccuguacuacgugaacaagcaggagggcaagagccuguacgugaagggcgagcccaucaucaacuucuacgacccccugguguuccccagcgacgaguucgacgccagcaucagccaggugaacgagaagaucaaccagagccuggccuucaucagaaagagcgacgagcugcugcacaacgugaacgccggcaagagcaccaccaacaucaugaucaccaccaucaucaucgugaucaucgugauccugcugagccugaucgccgugggccugcugcuguacugcaaggccagaagcacccccgugacccugagcaaggaccagcugagcggcaucaacaacaucgccuucagcaacugaggacuaguacuggcugcaucucccuuuccucuguccuccauccuucucccaggauggugaagggggaccugguacccagugauccccaccccaggauccuaaaucaugacuuaccugcuaauaaaaacucauuggaaaagugagaagaucuaaaaaaaaaaaaaaaaaaaaaaaaaaaaaaaaaaaaaaaaaaaaaaaaaaaaaaaaaaaaaaaaugcaucccccccccccccccccccccccccccccccaaaggcucuuuucagagccaccagaauu

SEQ ID NO: 3960 - RNA, 1983 nt, Artificial Sequence
  mRNA product Design c-3 comprising derived and/or modified sequence from HRSV(A2)__F_DSCav1_mut0 (opt5)
gggagaguccgcucagccagguugcagaagcggcuuagcguguguccuaaucuucucucugcguguagguaggccugugccgcaaacaagcuuaccauggagcugcucauccugaaggccaacgcuauuaccacaauccuuacggccgugaccuucugcuuugcgagcggccagaauauuacagaagaguucuaccaauccaccuguucugcugucagcaaaggguaucuguccgcccucagaacaggaugguacaccucuguuaucacaauugaacugagcaacaucaaggagaauaaaugcaacggcaccgacgccaaggugaaacuuaucaagcaggaacuggauaaguauaaaaaugcugugacggagcuccagcugcugaugcaguccacccccgccacagggucuggaagcgcuauugccuccggcgucgcgguguguaagguucuccaccuggagggggaagugaacaaaaucaagagcgcccuucugucuaccaauaaagcugucgugucccucagcaacggaguuucugugcugacauuuaagguccuugaccugaagaauuacauugauaaacaacuccugccuauccugaacaagcaguccugcagcauuucuaauaucgagaccgugauugaguuccagcagaaaaacaaucggcuccuggaaaucacgcgcgaguuuuccgugaacgccggcgucacaaccccgguuagcacauauaugcuuaccaauuccgaacugcucucucugaucaacgacaugcccauuaccaacgaucaaaagaaacuuaugagcaauaacgugcagaucgugagacagcaguccuacagcauuauguguaucauuaaggaggaaguccuggcuuaugugguucaacucccucuguacggcgugaucgacacacccugcuggaaacugcauacgucuccucucuguaccacaaauaccaaggagggguccaacaucugccugacacggaccgaucgcggaugguacugugacaaugccggcagcgucucuuucuuuccccaggcggaaacgugcaaggugcagagcaacagaguuuucugugauacaaugaacuccagaacccugccuucugaggugaaucucugcaaugucgacauuuuuaacccgaaauaugauugcaagaucaugaccagcaaaacagacguguccagcucugucauuaccucccugggggccaucgugagcuguuacggaaagacaaaaugcacggcuucuaauaagaaccggggcauuaucaagaccuucuccaaugggugugauuauguuagcaacaaaggaguggacacagucuccgugggcaauacccuuuacuauguuaacaagcaagagggcaaaucucuguacgugaagggggaacccaucauuaacuuuuaugacccucucgucuuccccagcgaugaguuugacgccuccaucucucaggugaaugagaaaauuaaccagagccuggcuuucauccgcaaguccgaugaacugcuccacaaugugaacgccggaaagagcacaaccaauauuaugaucacgaccauuaucaucguuauuaucgucauucugcuuucucugaucgccgugggccuccugcuguacugcaaagcuagauccacaccugugacccuuagcaaggaccagcucucugggauuaacaauaucgcguucuccaacugaggacuaguacuggcugcaucucccuuuccucuguccuccauccuucucccaggauggugaagggggaccugguacccagugauccccaccccaggauccuaaaucaugacuuaccugcuaauaaaaacucauuggaaaagugagaagaucuaaaaaaaaaaaaaaaaaaaaaaaaaaaaaaaaaaaaaaaaaaaaaaaaaaaaaaaaaaaaaaaaugcaucccccccccccccccccccccccccccccccaaaggcucuuuucagagccaccagaauu

SEQ ID NO: 3961 - RNA, 1983 nt, Artificial Sequence
  mRNA product Design c-3 comprising derived and/or modified sequence from HRSV(A2)__F_DSCav1_mut0 (opt6)
gggagaguccgcucagccagguugcagaagcggcuuagcguguguccuaaucuucucucugcguguagguaggccugugccgcaaacaagcuuaccauggaacuacuaauacuaaaagccaaugcaauaacaaccauacuaaccgccguaacauuuuguuucgcaucaggucaaaacauaaccgaagaauuuuaucaaucaacaugcucagcaguaucaaaaggauacuuauccgcucuaagaacaggaugguacacaaguguaauuacaauagagcucucaaacauaaaagaaaacaaaugcaauggaacugacgcaaaaguuaaacuuauaaaacaagaacuagauaaauauaaaaaugcaguaaccgaauuacaacuccuaaugcaauccacaccugcuaccgguuccggaucagccauagcaucuggaguagccguaugcaaaguccuccaccuagaaggagaaguaaauaaaaucaaaucagcacuauuaucuaccaauaaagcaguugucucacuauccaauggcguaucaguacuaacauucaaaguauuagaccuuaaaaacuacauagacaaacaacuauuaccaauucugaacaaacaauccuguucaauaucaaacaucgaaacgguaauagaauuucaacaaaaaaauaacagauuacuugaaauaacaagagaauuuucaguaaaugcaggaguuacaacacccgucuccaccuacaugcucacaaauucagaauuauuaucacuuauaaacgacaugccaauaacuaacgaccaaaaaaaacuaaugucaaacaauguccaaauaguccgacaacaauccuacucaauaaugugcauuauaaaagaagaaguccuagccuacguuguccaacuacccuuauauggaguaauagauaccccaugcuggaaacuucauaccuccccccuaugcacaacaaacacaaaagaaggcucaaacaucugcuuaacacguacagaccgagguugguacugugauaacgcaggauccguaucauuuuucccacaagcagaaacaugcaaaguacaaucaaaccgcguuuuuugugacaccaugaacagcagaacccucccuucagaaguaaaccuaugcaacgucgauauauuuaacccaaaauacgauugcaaaauaaugacaucaaaaaccgaugucucaucuucaguaauaaccucucuaggagcaauagucucauguuacggaaaaacaaaaugcacagcaaguaauaaaaauagaggaauaauaaaaacauucucuaauggcugcgacuacguauccaauaaaggcguugacacaguauccguaggcaacacacucuacuauguuaacaaacaagaaggaaaaaguuuauacguuaaaggagaaccaauuauaaacuuuuacgacccacucguauucccaucugaugaauuugacgcaucaaucucacaaguaaaugaaaaaaucaaucagucccuugccuuuauaagaaaaucagaugaacuuuuacacaacguuaacgccggaaaaucaacaaccaauauaaugaucacaaccauaauaauaguuauaauuguaauuuuauuauccuuaauagccgucggacuacuacuauacugcaaagcaagaucuacacccguaacccuaucaaaagaccaacuaaguggaauaaauaacauugcauucucaaauuaaggacuaguacuggcugcaucucccuuuccucuguccuccauccuucucccaggauggugaagggggaccugguacccagugauccccaccccaggauccuaaaucaugacuuaccugcuaauaaaaacucauuggaaaagugagaagaucuaaaaaaaaaaaaaaaaaaaaaaaaaaaaaaaaaaaaaaaaaaaaaaaaaaaaaaaaaaaaaaaaugcaucccccccccccccccccccccccccccccccaaaggcucuuuucagagccaccagaauu

SEQ ID NO: 3962 - RNA, 1983 nt, Artificial Sequence
  mRNA product Design c-3 comprising derived and/or modified sequence from HRSV(A2)__F_DSCav1_mut0 (opt11)
gggagaguccgcucagccagguugcagaagcggcuuagcguguguccuaaucuucucucugcguguagguaggccugugccgcaaacaagcuuaccauggaacuccuaauacuaaaggcaaacgcaaucacuacaauucuaaccgccgugacauucugcuucgccuccggacaaaacaucaccgaagaauuuuaccaauccacaugcucggccgucaguaaaggcuaccucucggcucuccgaaccggcugguacaccuccgucaucaccaucgaacucuccaacaucaaagaaaacaaaugcaacggcaccgacgccaaagucaaacuaaucaaacaagaacucgacaaauacaaaaacgccgucacagaacuccaacuacuaaugcaaucaacacccgcuacaggaagcggcuccgccaucgccagcggcguagcugucugcaaaguccuccaccucgaaggugaagucaacaaaaucaaaucagcccuacucagcacaaacaaagccguuguaagccuauccaacggcgucuccguacuaacauucaaaguccuugaccucaagaacuacaucgacaaacaacuucucccaauccuaaacaaacaaagcugcucaauuuccaacaucgaaacaguaaucgaauuucaacaaaaaaacaaccgacuccucgaaaucacccgcgaauuuuccguuaacgccggcguuacaacccccgucuccaccuacaugcucaccaauuccgaacuacuaucacucauaaacgacaugccuaucacaaacgaccaaaaaaaacuaaugucaaacaauguccaaaucguccgccagcaaagcuauuccaucaugugcaucaucaaagaggaaguccucgccuacguaguccaacugccccucuacggcgucauugauacccccugcuggaaacuccacaccuccccccucugcaccacaaacaccaaagaagguuccaacaucugccuaacacgaaccgacagaggcugguacugcgacaacgccggcagcgucuccuucuucccccaagcagaaaccuguaaaguccagucuaaccgcgucuucugcgacacaaugaacucaagaacccuaccuuccgaaguaaaccucugcaacguagacaucuucaacccuaaauacgacugcaaaaucaugacuucaaaaacagacguaagcucuuccguaaucacuucccucggcgccaucguauccugcuacgguaaaaccaaaugcaccgccuccaacaaaaaccgagggaucauaaaaaccuucuccaacggcugcgacuacguaucuaacaaaggcgucgacaccgucuccgucggcaacacccucuauuacguaaacaaacaagagggcaaaucacuauacgucaaaggcgagccaaucauaaacuucuaugacccacucgucuucccuucagacgaauuugaugccagcaucagccaagucaacgaaaaaaucaaccaaucacucgccuucauccgcaaaagcgacgaacuccuucacaacgucaacgcaggcaaaucaaccaccaacaucaugaucaccaccaucaucaucgucaucaucguuauccuacucagccucaucgcaguuggucuucuccuuuacugcaaagcccgcuccacccccgucacccucaguaaagaccaacucagcggaaucaacaacauagcauucuccaacuaaggacuaguacuggcugcaucucccuuuccucuguccuccauccuucucccaggauggugaagggggaccugguacccagugauccccaccccaggauccuaaaucaugacuuaccugcuaauaaaaacucauuggaaaagugagaagaucuaaaaaaaaaaaaaaaaaaaaaaaaaaaaaaaaaaaaaaaaaaaaaaaaaaaaaaaaaaaaaaaaugcaucccccccccccccccccccccccccccccccaaaggcucuuuucagagccaccagaauu

SEQ ID NO: 3963 - RNA, 1979 nt, Artificial Sequence
  mRNA product Design c-4 comprising derived and/or modified sequence from HRSV(A2)__F_DSCav1_mut0 (opt1)
gggagaguccgcucagccagguugcagaagcggcuuagcguguguccuaaucuucucucugcguguagguaggccugugccgcaaacaagcuuaccauggagcugcucauccugaaggccaacgccaucaccaccauccugacggcggugaccuucugcuucgccagcggccagaacaucaccgaggaguucuaccaguccacgugcagcgccgucuccaagggguaccucagcgcccugcggaccggcugguacaccuccgugaucaccaucgagcugagcaacaucaaggagaacaagugcaacgggaccgacgccaaggugaagcucaucaagcaggagcuggacaaguacaagaacgcggucacggagcugcagcuccugaugcaguccaccccggcaaccggcuccggcuccgccaucgcgagcggcgucgccgugugcaaggugcugcaccucgagggggaggucaacaagaucaagagcgcccugcuguccaccaacaaggccguggugagccucuccaacggcgucagcgugcugaccuucaaggugcuggaccucaagaacuacaucgacaagcagcugcugcccauccugaacaagcagagcugcuccaucagcaacaucgagacggugaucgaguuccagcagaagaacaaccggcuccuggagaucacccgcgaguucagcgugaacgccggggucaccacccccguguccacguacaugcugaccaacagcgagcuccugucccugaucaacgacaugccgaucaccaacgaccagaagaagcucaugagcaacaacgugcagaucguccggcagcaguccuacagcaucaugugcaucaucaaggaggaggugcuggcguacgugguccagcugccccucuacggcgugaucgacacccccugcuggaagcugcacacgagcccccugugcaccaccaacaccaaggagggguccaacaucugccucacgcgcaccgaccggggcugguacugcgacaacgccggcagcgucuccuucuucccgcaggccgagaccugcaaggugcagagcaaccgcguguucugcgacaccaugaacucccggacgcugcccagcgagguaaaccucugcaacgucgacaucuucaaccccaaguacgacugcaagaucaugaccuccaagaccgacgugagcuccagcgugaucaccucccugggggccaucgucagcugcuacggcaagacgaagugcaccgccagcaacaagaaccgggggaucaucaagaccuucuccaacggcugcgacuacgugagcaacaagggcguggacaccguguccgucgggaacacccuguacuacgugaacaagcaggagggcaagagccucuacgugaagggggagcccaucaucaacuucuacgacccgcuggucuuccccuccgacgaguucgacgcgagcaucucccaggugaacgagaagaucaaccagagccuggccuucauccgcaaguccgacgagcugcuccacaacgugaacgccggcaagagcacgaccaacaucaugaucaccaccaucaucaucgucaucaucgugauccugcugucccucaucgccguggggcugcugcucuacugcaaggcccggagcacgcccgucacccuguccaaggaccagcugagcggcaucaacaacaucgcguucuccaacugaggacuaguggaagcauuuuccuggcugauuaaaagaaauuacucagcuauggucaucuguuccuguuagaaggcuaugcagcauauuauauacuaugcgcauguuaugaaaugcauaauaaaaaauuuuaaaaaaucuaaaagaucuaaaaaaaaaaaaaaaaaaaaaaaaaaaaaaaaaaaaaaaaaaaaaaaaaaaaaaaaaaaaaaaaugcaucccccccccccccccccccccccccccccccaaaggcucuuuucagagccaccagaauu

SEQ ID NO: 3964 - RNA, 1979 nt, Artificial Sequence
  mRNA product Design c-4 comprising derived and/or modified sequence from HRSV(A2)__F_DSCav1_mut0 (opt1)
gggagaguccgcucagccagguugcagaagcggcuuagcguguguccuaaucuucucucugcguguagguaggccugugccgcaaacaagcuuaccauggagcugcucauccugaaggccaacgccaucaccaccauccugacggcggugaccuucugcuucgccagcggccagaacaucaccgaggaguucuaccaguccacgugcagcgccgucuccaagggguaccucagcgcccugcgcaccggcugguacaccuccgugaucaccaucgagcugagcaacaucaaggagaacaagugcaacgggaccgacgccaaggugaagcucaucaagcaggagcuggacaaguacaagaacgcggucacggagcugcagcuccugaugcaguccacccccgccaccggcagcggguccgccaucgccagcggcguggcggugugcaagguccugcaccucgagggcgaggugaacaagaucaaguccgcccugcugagcaccaacaaggccguggucucccucagcaacgggguguccgugcugacguucaagguccuggaccucaagaacuacaucgacaagcagcugcugccgauccucaacaagcagagcugcuccaucagcaacaucgagaccgugaucgaguuccagcagaagaacaaccggcugcuggagaucacccgcgaguucuccgugaacgccggcgucaccacgcccgugagcaccuacaugcucaccaacagcgagcugcugucccucaucaacgacaugcccaucaccaacgaccagaagaagcugaugagcaacaacgugcagaucguccggcagcaguccuacagcaucaugugcaucaucaaggaggaggugcuggccuacgugguccagcucccccuguacggggugaucgacacgccgugcuggaagcugcacaccagcccccucugcaccaccaacacgaaggagggcuccaacaucugccugacccgcaccgaccgggggugguacugcgacaacgcgggcuccgugagcuucuucccccaggccgagaccugcaagguccaguccaaccgcguguucugcgacacgaugaacagccggacccuccccuccgaggucaaccugugcaacguggacaucuucaacccgaaguacgacugcaagaucaugaccagcaagaccgacguguccagcuccgucaucacgagccugggcgccaucguguccugcuacgggaagaccaagugcaccgccagcaacaagaaccggggcaucaucaagaccuucuccaacgggugcgacuacgugagcaacaagggcgucgacacggugagcgugggcaacacccucuacuacgucaacaagcaggaggggaagucccuguacgugaagggcgagcccaucaucaacuucuacgacccccugguguuccccagcgacgaguucgacgccuccaucagccaggucaacgagaagaucaaccagucccucgcguucauccgcaagagcgacgagcugcugcacaacgugaacgccgggaaguccaccaccaacaucaugaucaccacgaucaucaucgugaucaucgucauccuccugagccugaucgccgugggccuccugcuguacugcaaggcccgguccaccccggugacccugagcaaggaccagcucuccgggaucaacaacaucgccuucagcaacugaggacuaguggaagcauuuuccuggcugauuaaaagaaauuacucagcuauggucaucuguuccuguuagaaggcuaugcagcauauuauauacuaugcgcauguuaugaaaugcauaauaaaaaauuuuaaaaaaucuaaaagaucuaaaaaaaaaaaaaaaaaaaaaaaaaaaaaaaaaaaaaaaaaaaaaaaaaaaaaaaaaaaaaaaaugcaucccccccccccccccccccccccccccccccaaaggcucuuuucagagccaccagaauu

SEQ ID NO: 3965 - RNA, 1979 nt, Artificial Sequence
  mRNA product Design c-4 comprising derived and/or modified sequence from HRSV(A2)__F_DSCav1_mut0 (opt2)
gggagaguccgcucagccagguugcagaagcggcuuagcguguguccuaaucuucucucugcguguagguaggccugugccgcaaacaagcuuaccauggagcuccucauccucaaggccaacgccaucaccaccauccucaccgccgucaccuucugcuucgccuccggccagaacaucaccgaggaguucuaccaguccaccugcuccgccgucuccaagggcuaccucuccgcccuccgcaccggcugguacaccuccgucaucaccaucgagcucuccaacaucaaggagaacaagugcaacggcaccgacgccaaggucaagcucaucaagcaggagcucgacaaguacaagaacgccgucaccgagcuccagcuccucaugcaguccacccccgccaccggcuccggcuccgccaucgccuccggcgucgccgucugcaagguccuccaccucgagggcgaggucaacaagaucaaguccgcccuccucuccaccaacaaggccgucgucucccucuccaacggcgucuccguccucaccuucaagguccucgaccucaagaacuacaucgacaagcagcuccuccccauccucaacaagcaguccugcuccaucuccaacaucgagaccgucaucgaguuccagcagaagaacaaccgccuccucgagaucacccgcgaguucuccgucaacgccggcgucaccacccccgucuccaccuacaugcucaccaacuccgagcuccucucccucaucaacgacaugcccaucaccaacgaccagaagaagcucauguccaacaacguccagaucguccgccagcaguccuacuccaucaugugcaucaucaaggaggagguccucgccuacgucguccagcucccccucuacggcgucaucgacacccccugcuggaagcuccacaccuccccccucugcaccaccaacaccaaggagggcuccaacaucugccucacccgcaccgaccgcggcugguacugcgacaacgccggcuccgucuccuucuucccccaggccgagaccugcaagguccaguccaaccgcgucuucugcgacaccaugaacucccgcacccuccccuccgaggucaaccucugcaacgucgacaucuucaaccccaaguacgacugcaagaucaugaccuccaagaccgacgucuccuccuccgucaucaccucccucggcgccaucgucuccugcuacggcaagaccaagugcaccgccuccaacaagaaccgcggcaucaucaagaccuucuccaacggcugcgacuacgucuccaacaagggcgucgacaccgucuccgucggcaacacccucuacuacgucaacaagcaggagggcaagucccucuacgucaagggcgagcccaucaucaacuucuacgacccccucgucuuccccuccgacgaguucgacgccuccaucucccaggucaacgagaagaucaaccagucccucgccuucauccgcaaguccgacgagcuccuccacaacgucaacgccggcaaguccaccaccaacaucaugaucaccaccaucaucaucgucaucaucgucauccuccucucccucaucgccgucggccuccuccucuacugcaaggcccgcuccacccccgucacccucuccaaggaccagcucuccggcaucaacaacaucgccuucuccaacugaggacuaguggaagcauuuuccuggcugauuaaaagaaauuacucagcuauggucaucuguuccuguuagaaggcuaugcagcauauuauauacuaugcgcauguuaugaaaugcauaauaaaaaauuuuaaaaaaucuaaaagaucuaaaaaaaaaaaaaaaaaaaaaaaaaaaaaaaaaaaaaaaaaaaaaaaaaaaaaaaaaaaaaaaaugcaucccccccccccccccccccccccccccccccaaaggcucuuuucagagccaccagaauu

SEQ ID NO: 3966 - RNA, 1979 nt, Artificial Sequence
  mRNA product Design c-4 comprising derived and/or modified sequence from HRSV(A2)__F_DSCav1_mut0 (opt3)
gggagaguccgcucagccagguugcagaagcggcuuagcguguguccuaaucuucucucugcguguagguaggccugugccgcaaacaagcuuaccauggagcugcucauccuuaaggccaacgcuauuaccacaauacugacugcagugacguucugcuuugccagcggccagaauaucaccgaagaguucuaccaauccacauguucugcggucucaaaaggguauuugagugcuuuaagaacuggaugguacaccagcguuauuacaaucgaacuguccaacauuaaggagaauaaaugcaacgguaccgacgccaaggugaaacuaaucaagcaggaacucgauaaguauaaaaaugcaguaacugagcugcagcuucugaugcagucuacacccgccaccggcucggggucagcuauagcaagcggaguggccgucuguaagguguugcaccucgagggcgaaguuaacaaaaucaagagugcucugcuguccacgaauaaagccguggucucucucagcaacgguguguccguauuaacuuuuaagguucuggaccuuaagaauuacauugauaaacaauugcugccuauccuaaacaagcagucaugcaguauuagcaauaucgagaccgugauagaguuccagcagaaaaacaauaggcuccuggaaauuacacgggaguuuucugucaacgcgggggugacuaccccaguguccacauauaugcuuaccaauucagaacuguugagccucaucaacgacaugccgauuacgaacgaucaaaagaaacugaugaguaauaacguccagaucguucgccagcagucuuacuccaucauguguauuauaaaggaggaaguguuagcauauguagugcaacugccccucuacggagucaucgacacuccuugcuggaaacuucauacaagcccacuguguaccacuaauacaaaggagggcucgaacauuugcuugacccgaacggaucguggcugguacugugacaaugccgggucuguguccuucuuuccccaggcugaaaccugcaagguucagucaaacagaguguucugugauacaaugaauaguagaacucugccuagcgaggucaaccucugcaauguggacaucuuuaacccaaaauaugauugcaagauaaugaccuccaaaacagacguaucuagcucaguuauuaccagucugggagccaucguguccuguuacgguaagacuaaaugcacagcaagcaauaagaacaggggcaucauuaagaccuucucuaaugggugugauuaugucucaaacaaaggaguggacacugucagugugggcaauacgcuuuacuauguuaacaagcaagaggguaaaagccuguacgugaagggggaacccaucauuaacuuuuaugacccuuugguauucccauccgaugaguuugacgcuucuauaucgcaggucaaugagaaaaucaaccagagccucgccuucauucggaaguccgaugaacuguuacacaaugugaacgcgggaaagucaacaaccaauaucaugaucacuaccauuauaaucguuauuaucgugauucugcuaagucucaucgccgucggccugcuuuuguacugcaaagcacgcucuacaccggugacccugagcaaggaccagcucuccggcauaaacaauaucgcuuucucaaacugaggacuaguggaagcauuuuccuggcugauuaaaagaaauuacucagcuauggucaucuguuccuguuagaaggcuaugcagcauauuauauacuaugcgcauguuaugaaaugcauaauaaaaaauuuuaaaaaaucuaaaagaucuaaaaaaaaaaaaaaaaaaaaaaaaaaaaaaaaaaaaaaaaaaaaaaaaaaaaaaaaaaaaaaaaugcaucccccccccccccccccccccccccccccccaaaggcucuuuucagagccaccagaauu

SEQ ID NO: 3967 - RNA, 1979 nt, Artificial Sequence
  mRNA product Design c-4 comprising derived and/or modified sequence from HRSV(A2)__F_DSCav1_mut0 (opt4)
gggagaguccgcucagccagguugcagaagcggcuuagcguguguccuaaucuucucucugcguguagguaggccugugccgcaaacaagcuuaccauggagcugcugauccugaaggccaacgccaucaccaccauccugaccgccgugaccuucugcuucgccagcggccagaacaucaccgaggaguucuaccagagcaccugcagcgccgugagcaagggcuaccugagcgcccugagaaccggcugguacaccagcgugaucaccaucgagcugagcaacaucaaggagaacaagugcaacggcaccgacgccaaggugaagcugaucaagcaggagcuggacaaguacaagaacgccgugaccgagcugcagcugcugaugcagagcacccccgccaccggcagcggcagcgccaucgccagcggcguggccgugugcaaggugcugcaccuggagggcgaggugaacaagaucaagagcgcccugcugagcaccaacaaggccguggugagccugagcaacggcgugagcgugcugaccuucaaggugcuggaccugaagaacuacaucgacaagcagcugcugcccauccugaacaagcagagcugcagcaucagcaacaucgagaccgugaucgaguuccagcagaagaacaacagacugcuggagaucaccagagaguucagcgugaacgccggcgugaccacccccgugagcaccuacaugcugaccaacagcgagcugcugagccugaucaacgacaugcccaucaccaacgaccagaagaagcugaugagcaacaacgugcagaucgugagacagcagagcuacagcaucaugugcaucaucaaggaggaggugcuggccuacguggugcagcugccccuguacggcgugaucgacacccccugcuggaagcugcacaccagcccccugugcaccaccaacaccaaggagggcagcaacaucugccugaccagaaccgacagaggcugguacugcgacaacgccggcagcgugagcuucuucccccaggccgagaccugcaaggugcagagcaacagaguguucugcgacaccaugaacagcagaacccugcccagcgaggugaaccugugcaacguggacaucuucaaccccaaguacgacugcaagaucaugaccagcaagaccgacgugagcagcagcgugaucaccagccugggcgccaucgugagcugcuacggcaagaccaagugcaccgccagcaacaagaacagaggcaucaucaagaccuucagcaacggcugcgacuacgugagcaacaagggcguggacaccgugagcgugggcaacacccuguacuacgugaacaagcaggagggcaagagccuguacgugaagggcgagcccaucaucaacuucuacgacccccugguguuccccagcgacgaguucgacgccagcaucagccaggugaacgagaagaucaaccagagccuggccuucaucagaaagagcgacgagcugcugcacaacgugaacgccggcaagagcaccaccaacaucaugaucaccaccaucaucaucgugaucaucgugauccugcugagccugaucgccgugggccugcugcuguacugcaaggccagaagcacccccgugacccugagcaaggaccagcugagcggcaucaacaacaucgccuucagcaacugaggacuaguggaagcauuuuccuggcugauuaaaagaaauuacucagcuauggucaucuguuccuguuagaaggcuaugcagcauauuauauacuaugcgcauguuaugaaaugcauaauaaaaaauuuuaaaaaaucuaaaagaucuaaaaaaaaaaaaaaaaaaaaaaaaaaaaaaaaaaaaaaaaaaaaaaaaaaaaaaaaaaaaaaaaugcaucccccccccccccccccccccccccccccccaaaggcucuuuucagagccaccagaauu

SEQ ID NO: 3968 - RNA, 1979 nt, Artificial Sequence
  mRNA product Design c-4 comprising derived and/or modified sequence from HRSV(A2)__F_DSCav1_mut0 (opt5)
gggagaguccgcucagccagguugcagaagcggcuuagcguguguccuaaucuucucucugcguguagguaggccugugccgcaaacaagcuuaccauggagcugcucauccugaaggccaacgcuauuaccacaauccuuacggccgugaccuucugcuuugcgagcggccagaauauuacagaagaguucuaccaauccaccuguucugcugucagcaaaggguaucuguccgcccucagaacaggaugguacaccucuguuaucacaauugaacugagcaacaucaaggagaauaaaugcaacggcaccgacgccaaggugaaacuuaucaagcaggaacuggauaaguauaaaaaugcugugacggagcuccagcugcugaugcaguccacccccgccacagggucuggaagcgcuauugccuccggcgucgcgguguguaagguucuccaccuggagggggaagugaacaaaaucaagagcgcccuucugucuaccaauaaagcugucgugucccucagcaacggaguuucugugcugacauuuaagguccuugaccugaagaauuacauugauaaacaacuccugccuauccugaacaagcaguccugcagcauuucuaauaucgagaccgugauugaguuccagcagaaaaacaaucggcuccuggaaaucacgcgcgaguuuuccgugaacgccggcgucacaaccccgguuagcacauauaugcuuaccaauuccgaacugcucucucugaucaacgacaugcccauuaccaacgaucaaaagaaacuuaugagcaauaacgugcagaucgugagacagcaguccuacagcauuauguguaucauuaaggaggaaguccuggcuuaugugguucaacucccucuguacggcgugaucgacacacccugcuggaaacugcauacgucuccucucuguaccacaaauaccaaggagggguccaacaucugccugacacggaccgaucgcggaugguacugugacaaugccggcagcgucucuuucuuuccccaggcggaaacgugcaaggugcagagcaacagaguuuucugugauacaaugaacuccagaacccugccuucugaggugaaucucugcaaugucgacauuuuuaacccgaaauaugauugcaagaucaugaccagcaaaacagacguguccagcucugucauuaccucccugggggccaucgugagcuguuacggaaagacaaaaugcacggcuucuaauaagaaccggggcauuaucaagaccuucuccaaugggugugauuauguuagcaacaaaggaguggacacagucuccgugggcaauacccuuuacuauguuaacaagcaagagggcaaaucucuguacgugaagggggaacccaucauuaacuuuuaugacccucucgucuuccccagcgaugaguuugacgccuccaucucucaggugaaugagaaaauuaaccagagccuggcuuucauccgcaaguccgaugaacugcuccacaaugugaacgccggaaagagcacaaccaauauuaugaucacgaccauuaucaucguuauuaucgucauucugcuuucucugaucgccgugggccuccugcuguacugcaaagcuagauccacaccugugacccuuagcaaggaccagcucucugggauuaacaauaucgcguucuccaacugaggacuaguggaagcauuuuccuggcugauuaaaagaaauuacucagcuauggucaucuguuccuguuagaaggcuaugcagcauauuauauacuaugcgcauguuaugaaaugcauaauaaaaaauuuuaaaaaaucuaaaagaucuaaaaaaaaaaaaaaaaaaaaaaaaaaaaaaaaaaaaaaaaaaaaaaaaaaaaaaaaaaaaaaaaugcaucccccccccccccccccccccccccccccccaaaggcucuuuucagagccaccagaauu

SEQ ID NO: 3969 - RNA, 1979 nt, Artificial Sequence
  mRNA product Design c-4 comprising derived and/or modified sequence from HRSV(A2)__F_DSCav1_mut0 (opt6)
gggagaguccgcucagccagguugcagaagcggcuuagcguguguccuaaucuucucucugcguguagguaggccugugccgcaaacaagcuuaccauggaacuacuaauacuaaaagccaaugcaauaacaaccauacuaaccgccguaacauuuuguuucgcaucaggucaaaacauaaccgaagaauuuuaucaaucaacaugcucagcaguaucaaaaggauacuuauccgcucuaagaacaggaugguacacaaguguaauuacaauagagcucucaaacauaaaagaaaacaaaugcaauggaacugacgcaaaaguuaaacuuauaaaacaagaacuagauaaauauaaaaaugcaguaaccgaauuacaacuccuaaugcaauccacaccugcuaccgguuccggaucagccauagcaucuggaguagccguaugcaaaguccuccaccuagaaggagaaguaaauaaaaucaaaucagcacuauuaucuaccaauaaagcaguugucucacuauccaauggcguaucaguacuaacauucaaaguauuagaccuuaaaaacuacauagacaaacaacuauuaccaauucugaacaaacaauccuguucaauaucaaacaucgaaacgguaauagaauuucaacaaaaaaauaacagauuacuugaaauaacaagagaauuuucaguaaaugcaggaguuacaacacccgucuccaccuacaugcucacaaauucagaauuauuaucacuuauaaacgacaugccaauaacuaacgaccaaaaaaaacuaaugucaaacaauguccaaauaguccgacaacaauccuacucaauaaugugcauuauaaaagaagaaguccuagccuacguuguccaacuacccuuauauggaguaauagauaccccaugcuggaaacuucauaccuccccccuaugcacaacaaacacaaaagaaggcucaaacaucugcuuaacacguacagaccgagguugguacugugauaacgcaggauccguaucauuuuucccacaagcagaaacaugcaaaguacaaucaaaccgcguuuuuugugacaccaugaacagcagaacccucccuucagaaguaaaccuaugcaacgucgauauauuuaacccaaaauacgauugcaaaauaaugacaucaaaaaccgaugucucaucuucaguaauaaccucucuaggagcaauagucucauguuacggaaaaacaaaaugcacagcaaguaauaaaaauagaggaauaauaaaaacauucucuaauggcugcgacuacguauccaauaaaggcguugacacaguauccguaggcaacacacucuacuauguuaacaaacaagaaggaaaaaguuuauacguuaaaggagaaccaauuauaaacuuuuacgacccacucguauucccaucugaugaauuugacgcaucaaucucacaaguaaaugaaaaaaucaaucagucccuugccuuuauaagaaaaucagaugaacuuuuacacaacguuaacgccggaaaaucaacaaccaauauaaugaucacaaccauaauaauaguuauaauuguaauuuuauuauccuuaauagccgucggacuacuacuauacugcaaagcaagaucuacacccguaacccuaucaaaagaccaacuaaguggaauaaauaacauugcauucucaaauuaaggacuaguggaagcauuuuccuggcugauuaaaagaaauuacucagcuauggucaucuguuccuguuagaaggcuaugcagcauauuauauacuaugcgcauguuaugaaaugcauaauaaaaaauuuuaaaaaaucuaaaagaucuaaaaaaaaaaaaaaaaaaaaaaaaaaaaaaaaaaaaaaaaaaaaaaaaaaaaaaaaaaaaaaaaugcaucccccccccccccccccccccccccccccccaaaggcucuuuucagagccaccagaauu

SEQ ID NO: 3970 - RNA, 1979 nt, Artificial Sequence
  mRNA product Design c-4 comprising derived and/or modified sequence from HRSV(A2)__F_DSCav1_mut0 (opt11)
gggagaguccgcucagccagguugcagaagcggcuuagcguguguccuaaucuucucucugcguguagguaggccugugccgcaaacaagcuuaccauggaacuccuaauacuaaaggcaaacgcaaucacuacaauucuaaccgccgugacauucugcuucgccuccggacaaaacaucaccgaagaauuuuaccaauccacaugcucggccgucaguaaaggcuaccucucggcucuccgaaccggcugguacaccuccgucaucaccaucgaacucuccaacaucaaagaaaacaaaugcaacggcaccgacgccaaagucaaacuaaucaaacaagaacucgacaaauacaaaaacgccgucacagaacuccaacuacuaaugcaaucaacacccgcuacaggaagcggcuccgccaucgccagcggcguagcugucugcaaaguccuccaccucgaaggugaagucaacaaaaucaaaucagcccuacucagcacaaacaaagccguuguaagccuauccaacggcgucuccguacuaacauucaaaguccuugaccucaagaacuacaucgacaaacaacuucucccaauccuaaacaaacaaagcugcucaauuuccaacaucgaaacaguaaucgaauuucaacaaaaaaacaaccgacuccucgaaaucacccgcgaauuuuccguuaacgccggcguuacaacccccgucuccaccuacaugcucaccaauuccgaacuacuaucacucauaaacgacaugccuaucacaaacgaccaaaaaaaacuaaugucaaacaauguccaaaucguccgccagcaaagcuauuccaucaugugcaucaucaaagaggaaguccucgccuacguaguccaacugccccucuacggcgucauugauacccccugcuggaaacuccacaccuccccccucugcaccacaaacaccaaagaagguuccaacaucugccuaacacgaaccgacagaggcugguacugcgacaacgccggcagcgucuccuucuucccccaagcagaaaccuguaaaguccagucuaaccgcgucuucugcgacacaaugaacucaagaacccuaccuuccgaaguaaaccucugcaacguagacaucuucaacccuaaauacgacugcaaaaucaugacuucaaaaacagacguaagcucuuccguaaucacuucccucggcgccaucguauccugcuacgguaaaaccaaaugcaccgccuccaacaaaaaccgagggaucauaaaaaccuucuccaacggcugcgacuacguaucuaacaaaggcgucgacaccgucuccgucggcaacacccucuauuacguaaacaaacaagagggcaaaucacuauacgucaaaggcgagccaaucauaaacuucuaugacccacucgucuucccuucagacgaauuugaugccagcaucagccaagucaacgaaaaaaucaaccaaucacucgccuucauccgcaaaagcgacgaacuccuucacaacgucaacgcaggcaaaucaaccaccaacaucaugaucaccaccaucaucaucgucaucaucguuauccuacucagccucaucgcaguuggucuucuccuuuacugcaaagcccgcuccacccccgucacccucaguaaagaccaacucagcggaaucaacaacauagcauucuccaacuaaggacuaguggaagcauuuuccuggcugauuaaaagaaauuacucagcuauggucaucuguuccuguuagaaggcuaugcagcauauuauauacuaugcgcauguuaugaaaugcauaauaaaaaauuuuaaaaaaucuaaaagaucuaaaaaaaaaaaaaaaaaaaaaaaaaaaaaaaaaaaaaaaaaaaaaaaaaaaaaaaaaaaaaaaaugcaucccccccccccccccccccccccccccccccaaaggcucuuuucagagccaccagaauu

SEQ ID NO: 3971 - RNA, 1897 nt, Artificial Sequence
  mRNA product Design c-5 comprising derived and/or modified sequence from HRSV(A2)__F_DSCav1_mut0 (opt1)
gggagagcggcucggccauuuugucccagucaguccggaggcugcggcugcagaaguaccgccugcggaguaacugcaaagaagcuuaccauggagcugcucauccugaaggccaacgccaucaccaccauccugacggcggugaccuucugcuucgccagcggccagaacaucaccgaggaguucuaccaguccacgugcagcgccgucuccaagggguaccucagcgcccugcggaccggcugguacaccuccgugaucaccaucgagcugagcaacaucaaggagaacaagugcaacgggaccgacgccaaggugaagcucaucaagcaggagcuggacaaguacaagaacgcggucacggagcugcagcuccugaugcaguccaccccggcaaccggcuccggcuccgccaucgcgagcggcgucgccgugugcaaggugcugcaccucgagggggaggucaacaagaucaagagcgcccugcuguccaccaacaaggccguggugagccucuccaacggcgucagcgugcugaccuucaaggugcuggaccucaagaacuacaucgacaagcagcugcugcccauccugaacaagcagagcugcuccaucagcaacaucgagacggugaucgaguuccagcagaagaacaaccggcuccuggagaucacccgcgaguucagcgugaacgccggggucaccacccccguguccacguacaugcugaccaacagcgagcuccugucccugaucaacgacaugccgaucaccaacgaccagaagaagcucaugagcaacaacgugcagaucguccggcagcaguccuacagcaucaugugcaucaucaaggaggaggugcuggcguacgugguccagcugccccucuacggcgugaucgacacccccugcuggaagcugcacacgagcccccugugcaccaccaacaccaaggagggguccaacaucugccucacgcgcaccgaccggggcugguacugcgacaacgccggcagcgucuccuucuucccgcaggccgagaccugcaaggugcagagcaaccgcguguucugcgacaccaugaacucccggacgcugcccagcgagguaaaccucugcaacgucgacaucuucaaccccaaguacgacugcaagaucaugaccuccaagaccgacgugagcuccagcgugaucaccucccugggggccaucgucagcugcuacggcaagacgaagugcaccgccagcaacaagaaccgggggaucaucaagaccuucuccaacggcugcgacuacgugagcaacaagggcguggacaccguguccgucgggaacacccuguacuacgugaacaagcaggagggcaagagccucuacgugaagggggagcccaucaucaacuucuacgacccgcuggucuuccccuccgacgaguucgacgcgagcaucucccaggugaacgagaagaucaaccagagccuggccuucauccgcaaguccgacgagcugcuccacaacgugaacgccggcaagagcacgaccaacaucaugaucaccaccaucaucaucgucaucaucgugauccugcugucccucaucgccguggggcugcugcucuacugcaaggcccggagcacgcccgucacccuguccaaggaccagcugagcggcaucaacaacaucgcguucuccaacugaggacuagucccuguucccagagcccacuuuuuuuucuuuuuuugaaauaaaauagccugucuuucagaucuaaaaaaaaaaaaaaaaaaaaaaaaaaaaaaaaaaaaaaaaaaaaaaaaaaaaaaaaaaaaaaaaugcaucccccccccccccccccccccccccccccccaaaggcucuuuucagagccaccagaauu

SEQ ID NO: 3972 - RNA, 1897 nt, Artificial Sequence
  mRNA product Design c-5 comprising derived and/or modified sequence from HRSV(A2)__F_DSCav1_mut0 (opt1)
gggagagcggcucggccauuuugucccagucaguccggaggcugcggcugcagaaguaccgccugcggaguaacugcaaagaagcuuaccauggagcugcucauccugaaggccaacgccaucaccaccauccugacggcggugaccuucugcuucgccagcggccagaacaucaccgaggaguucuaccaguccacgugcagcgccgucuccaagggguaccucagcgcccugcgcaccggcugguacaccuccgugaucaccaucgagcugagcaacaucaaggagaacaagugcaacgggaccgacgccaaggugaagcucaucaagcaggagcuggacaaguacaagaacgcggucacggagcugcagcuccugaugcaguccacccccgccaccggcagcggguccgccaucgccagcggcguggcggugugcaagguccugcaccucgagggcgaggugaacaagaucaaguccgcccugcugagcaccaacaaggccguggucucccucagcaacgggguguccgugcugacguucaagguccuggaccucaagaacuacaucgacaagcagcugcugccgauccucaacaagcagagcugcuccaucagcaacaucgagaccgugaucgaguuccagcagaagaacaaccggcugcuggagaucacccgcgaguucuccgugaacgccggcgucaccacgcccgugagcaccuacaugcucaccaacagcgagcugcugucccucaucaacgacaugcccaucaccaacgaccagaagaagcugaugagcaacaacgugcagaucguccggcagcaguccuacagcaucaugugcaucaucaaggaggaggugcuggccuacgugguccagcucccccuguacggggugaucgacacgccgugcuggaagcugcacaccagcccccucugcaccaccaacacgaaggagggcuccaacaucugccugacccgcaccgaccgggggugguacugcgacaacgcgggcuccgugagcuucuucccccaggccgagaccugcaagguccaguccaaccgcguguucugcgacacgaugaacagccggacccuccccuccgaggucaaccugugcaacguggacaucuucaacccgaaguacgacugcaagaucaugaccagcaagaccgacguguccagcuccgucaucacgagccugggcgccaucguguccugcuacgggaagaccaagugcaccgccagcaacaagaaccggggcaucaucaagaccuucuccaacgggugcgacuacgugagcaacaagggcgucgacacggugagcgugggcaacacccucuacuacgucaacaagcaggaggggaagucccuguacgugaagggcgagcccaucaucaacuucuacgacccccugguguuccccagcgacgaguucgacgccuccaucagccaggucaacgagaagaucaaccagucccucgcguucauccgcaagagcgacgagcugcugcacaacgugaacgccgggaaguccaccaccaacaucaugaucaccacgaucaucaucgugaucaucgucauccuccugagccugaucgccgugggccuccugcuguacugcaaggcccgguccaccccggugacccugagcaaggaccagcucuccgggaucaacaacaucgccuucagcaacugaggacuagucccuguucccagagcccacuuuuuuuucuuuuuuugaaauaaaauagccugucuuucagaucuaaaaaaaaaaaaaaaaaaaaaaaaaaaaaaaaaaaaaaaaaaaaaaaaaaaaaaaaaaaaaaaaugcaucccccccccccccccccccccccccccccccaaaggcucuuuucagagccaccagaauu

SEQ ID NO: 3973 - RNA, 1897 nt, Artificial Sequence
  mRNA product Design c-5 comprising derived and/or modified sequence from HRSV(A2)__F_DSCav1_mut0 (opt2)
gggagagcggcucggccauuuugucccagucaguccggaggcugcggcugcagaaguaccgccugcggaguaacugcaaagaagcuuaccauggagcuccucauccucaaggccaacgccaucaccaccauccucaccgccgucaccuucugcuucgccuccggccagaacaucaccgaggaguucuaccaguccaccugcuccgccgucuccaagggcuaccucuccgcccuccgcaccggcugguacaccuccgucaucaccaucgagcucuccaacaucaaggagaacaagugcaacggcaccgacgccaaggucaagcucaucaagcaggagcucgacaaguacaagaacgccgucaccgagcuccagcuccucaugcaguccacccccgccaccggcuccggcuccgccaucgccuccggcgucgccgucugcaagguccuccaccucgagggcgaggucaacaagaucaaguccgcccuccucuccaccaacaaggccgucgucucccucuccaacggcgucuccguccucaccuucaagguccucgaccucaagaacuacaucgacaagcagcuccuccccauccucaacaagcaguccugcuccaucuccaacaucgagaccgucaucgaguuccagcagaagaacaaccgccuccucgagaucacccgcgaguucuccgucaacgccggcgucaccacccccgucuccaccuacaugcucaccaacuccgagcuccucucccucaucaacgacaugcccaucaccaacgaccagaagaagcucauguccaacaacguccagaucguccgccagcaguccuacuccaucaugugcaucaucaaggaggagguccucgccuacgucguccagcucccccucuacggcgucaucgacacccccugcuggaagcuccacaccuccccccucugcaccaccaacaccaaggagggcuccaacaucugccucacccgcaccgaccgcggcugguacugcgacaacgccggcuccgucuccuucuucccccaggccgagaccugcaagguccaguccaaccgcgucuucugcgacaccaugaacucccgcacccuccccuccgaggucaaccucugcaacgucgacaucuucaaccccaaguacgacugcaagaucaugaccuccaagaccgacgucuccuccuccgucaucaccucccucggcgccaucgucuccugcuacggcaagaccaagugcaccgccuccaacaagaaccgcggcaucaucaagaccuucuccaacggcugcgacuacgucuccaacaagggcgucgacaccgucuccgucggcaacacccucuacuacgucaacaagcaggagggcaagucccucuacgucaagggcgagcccaucaucaacuucuacgacccccucgucuuccccuccgacgaguucgacgccuccaucucccaggucaacgagaagaucaaccagucccucgccuucauccgcaaguccgacgagcuccuccacaacgucaacgccggcaaguccaccaccaacaucaugaucaccaccaucaucaucgucaucaucgucauccuccucucccucaucgccgucggccuccuccucuacugcaaggcccgcuccacccccgucacccucuccaaggaccagcucuccggcaucaacaacaucgccuucuccaacugaggacuagucccuguucccagagcccacuuuuuuuucuuuuuuugaaauaaaauagccugucuuucagaucuaaaaaaaaaaaaaaaaaaaaaaaaaaaaaaaaaaaaaaaaaaaaaaaaaaaaaaaaaaaaaaaaugcaucccccccccccccccccccccccccccccccaaaggcucuuuucagagccaccagaauu

SEQ ID NO: 3974 - RNA, 1897 nt, Artificial Sequence
  mRNA product Design c-5 comprising derived and/or modified sequence from HRSV(A2)__F_DSCav1_mut0 (opt3)
gggagagcggcucggccauuuugucccagucaguccggaggcugcggcugcagaaguaccgccugcggaguaacugcaaagaagcuuaccauggagcugcucauccuuaaggccaacgcuauuaccacaauacugacugcagugacguucugcuuugccagcggccagaauaucaccgaagaguucuaccaauccacauguucugcggucucaaaaggguauuugagugcuuuaagaacuggaugguacaccagcguuauuacaaucgaacuguccaacauuaaggagaauaaaugcaacgguaccgacgccaaggugaaacuaaucaagcaggaacucgauaaguauaaaaaugcaguaacugagcugcagcuucugaugcagucuacacccgccaccggcucggggucagcuauagcaagcggaguggccgucuguaagguguugcaccucgagggcgaaguuaacaaaaucaagagugcucugcuguccacgaauaaagccguggucucucucagcaacgguguguccguauuaacuuuuaagguucuggaccuuaagaauuacauugauaaacaauugcugccuauccuaaacaagcagucaugcaguauuagcaauaucgagaccgugauagaguuccagcagaaaaacaauaggcuccuggaaauuacacgggaguuuucugucaacgcgggggugacuaccccaguguccacauauaugcuuaccaauucagaacuguugagccucaucaacgacaugccgauuacgaacgaucaaaagaaacugaugaguaauaacguccagaucguucgccagcagucuuacuccaucauguguauuauaaaggaggaaguguuagcauauguagugcaacugccccucuacggagucaucgacacuccuugcuggaaacuucauacaagcccacuguguaccacuaauacaaaggagggcucgaacauuugcuugacccgaacggaucguggcugguacugugacaaugccgggucuguguccuucuuuccccaggcugaaaccugcaagguucagucaaacagaguguucugugauacaaugaauaguagaacucugccuagcgaggucaaccucugcaauguggacaucuuuaacccaaaauaugauugcaagauaaugaccuccaaaacagacguaucuagcucaguuauuaccagucugggagccaucguguccuguuacgguaagacuaaaugcacagcaagcaauaagaacaggggcaucauuaagaccuucucuaaugggugugauuaugucucaaacaaaggaguggacacugucagugugggcaauacgcuuuacuauguuaacaagcaagaggguaaaagccuguacgugaagggggaacccaucauuaacuuuuaugacccuuugguauucccauccgaugaguuugacgcuucuauaucgcaggucaaugagaaaaucaaccagagccucgccuucauucggaaguccgaugaacuguuacacaaugugaacgcgggaaagucaacaaccaauaucaugaucacuaccauuauaaucguuauuaucgugauucugcuaagucucaucgccgucggccugcuuuuguacugcaaagcacgcucuacaccggugacccugagcaaggaccagcucuccggcauaaacaauaucgcuuucucaaacugaggacuagucccuguucccagagcccacuuuuuuuucuuuuuuugaaauaaaauagccugucuuucagaucuaaaaaaaaaaaaaaaaaaaaaaaaaaaaaaaaaaaaaaaaaaaaaaaaaaaaaaaaaaaaaaaaugcaucccccccccccccccccccccccccccccccaaaggcucuuuucagagccaccagaauu

SEQ ID NO: 3975 - RNA, 1897 nt, Artificial Sequence
  mRNA product Design c-5 comprising derived and/or modified sequence from HRSV(A2)__F_DSCav1_mut0 (opt4)
gggagagcggcucggccauuuugucccagucaguccggaggcugcggcugcagaaguaccgccugcggaguaacugcaaagaagcuuaccauggagcugcugauccugaaggccaacgccaucaccaccauccugaccgccgugaccuucugcuucgccagcggccagaacaucaccgaggaguucuaccagagcaccugcagcgccgugagcaagggcuaccugagcgcccugagaaccggcugguacaccagcgugaucaccaucgagcugagcaacaucaaggagaacaagugcaacggcaccgacgccaaggugaagcugaucaagcaggagcuggacaaguacaagaacgccgugaccgagcugcagcugcugaugcagagcacccccgccaccggcagcggcagcgccaucgccagcggcguggccgugugcaaggugcugcaccuggagggcgaggugaacaagaucaagagcgcccugcugagcaccaacaaggccguggugagccugagcaacggcgugagcgugcugaccuucaaggugcuggaccugaagaacuacaucgacaagcagcugcugcccauccugaacaagcagagcugcagcaucagcaacaucgagaccgugaucgaguuccagcagaagaacaacagacugcuggagaucaccagagaguucagcgugaacgccggcgugaccacccccgugagcaccuacaugcugaccaacagcgagcugcugagccugaucaacgacaugcccaucaccaacgaccagaagaagcugaugagcaacaacgugcagaucgugagacagcagagcuacagcaucaugugcaucaucaaggaggaggugcuggccuacguggugcagcugccccuguacggcgugaucgacacccccugcuggaagcugcacaccagcccccugugcaccaccaacaccaaggagggcagcaacaucugccugaccagaaccgacagaggcugguacugcgacaacgccggcagcgugagcuucuucccccaggccgagaccugcaaggugcagagcaacagaguguucugcgacaccaugaacagcagaacccugcccagcgaggugaaccugugcaacguggacaucuucaaccccaaguacgacugcaagaucaugaccagcaagaccgacgugagcagcagcgugaucaccagccugggcgccaucgugagcugcuacggcaagaccaagugcaccgccagcaacaagaacagaggcaucaucaagaccuucagcaacggcugcgacuacgugagcaacaagggcguggacaccgugagcgugggcaacacccuguacuacgugaacaagcaggagggcaagagccuguacgugaagggcgagcccaucaucaacuucuacgacccccugguguuccccagcgacgaguucgacgccagcaucagccaggugaacgagaagaucaaccagagccuggccuucaucagaaagagcgacgagcugcugcacaacgugaacgccggcaagagcaccaccaacaucaugaucaccaccaucaucaucgugaucaucgugauccugcugagccugaucgccgugggccugcugcuguacugcaaggccagaagcacccccgugacccugagcaaggaccagcugagcggcaucaacaacaucgccuucagcaacugaggacuagucccuguucccagagcccacuuuuuuuucuuuuuuugaaauaaaauagccugucuuucagaucuaaaaaaaaaaaaaaaaaaaaaaaaaaaaaaaaaaaaaaaaaaaaaaaaaaaaaaaaaaaaaaaaugcaucccccccccccccccccccccccccccccccaaaggcucuuuucagagccaccagaauu

SEQ ID NO: 3976 - RNA, 1897 nt, Artificial Sequence
  mRNA product Design c-5 comprising derived and/or modified sequence from HRSV(A2)__F_DSCav1_mut0 (opt5)
gggagagcggcucggccauuuugucccagucaguccggaggcugcggcugcagaaguaccgccugcggaguaacugcaaagaagcuuaccauggagcugcucauccugaaggccaacgcuauuaccacaauccuuacggccgugaccuucugcuuugcgagcggccagaauauuacagaagaguucuaccaauccaccuguucugcugucagcaaaggguaucuguccgcccucagaacaggaugguacaccucuguuaucacaauugaacugagcaacaucaaggagaauaaaugcaacggcaccgacgccaaggugaaacuuaucaagcaggaacuggauaaguauaaaaaugcugugacggagcuccagcugcugaugcaguccacccccgccacagggucuggaagcgcuauugccuccggcgucgcgguguguaagguucuccaccuggagggggaagugaacaaaaucaagagcgcccuucugucuaccaauaaagcugucgugucccucagcaacggaguuucugugcugacauuuaagguccuugaccugaagaauuacauugauaaacaacuccugccuauccugaacaagcaguccugcagcauuucuaauaucgagaccgugauugaguuccagcagaaaaacaaucggcuccuggaaaucacgcgcgaguuuuccgugaacgccggcgucacaaccccgguuagcacauauaugcuuaccaauuccgaacugcucucucugaucaacgacaugcccauuaccaacgaucaaaagaaacuuaugagcaauaacgugcagaucgugagacagcaguccuacagcauuauguguaucauuaaggaggaaguccuggcuuaugugguucaacucccucuguacggcgugaucgacacacccugcuggaaacugcauacgucuccucucuguaccacaaauaccaaggagggguccaacaucugccugacacggaccgaucgcggaugguacugugacaaugccggcagcgucucuuucuuuccccaggcggaaacgugcaaggugcagagcaacagaguuuucugugauacaaugaacuccagaacccugccuucugaggugaaucucugcaaugucgacauuuuuaacccgaaauaugauugcaagaucaugaccagcaaaacagacguguccagcucugucauuaccucccugggggccaucgugagcuguuacggaaagacaaaaugcacggcuucuaauaagaaccggggcauuaucaagaccuucuccaaugggugugauuauguuagcaacaaaggaguggacacagucuccgugggcaauacccuuuacuauguuaacaagcaagagggcaaaucucuguacgugaagggggaacccaucauuaacuuuuaugacccucucgucuuccccagcgaugaguuugacgccuccaucucucaggugaaugagaaaauuaaccagagccuggcuuucauccgcaaguccgaugaacugcuccacaaugugaacgccggaaagagcacaaccaauauuaugaucacgaccauuaucaucguuauuaucgucauucugcuuucucugaucgccgugggccuccugcuguacugcaaagcuagauccacaccugugacccuuagcaaggaccagcucucugggauuaacaauaucgcguucuccaacugaggacuagucccuguucccagagcccacuuuuuuuucuuuuuuugaaauaaaauagccugucuuucagaucuaaaaaaaaaaaaaaaaaaaaaaaaaaaaaaaaaaaaaaaaaaaaaaaaaaaaaaaaaaaaaaaaugcaucccccccccccccccccccccccccccccccaaaggcucuuuucagagccaccagaauu

SEQ ID NO: 3977 - RNA, 1897 nt, Artificial Sequence
  mRNA product Design c-5 comprising derived and/or modified sequence from HRSV(A2)__F_DSCav1_mut0 (opt6)
gggagagcggcucggccauuuugucccagucaguccggaggcugcggcugcagaaguaccgccugcggaguaacugcaaagaagcuuaccauggaacuacuaauacuaaaagccaaugcaauaacaaccauacuaaccgccguaacauuuuguuucgcaucaggucaaaacauaaccgaagaauuuuaucaaucaacaugcucagcaguaucaaaaggauacuuauccgcucuaagaacaggaugguacacaaguguaauuacaauagagcucucaaacauaaaagaaaacaaaugcaauggaacugacgcaaaaguuaaacuuauaaaacaagaacuagauaaauauaaaaaugcaguaaccgaauuacaacuccuaaugcaauccacaccugcuaccgguuccggaucagccauagcaucuggaguagccguaugcaaaguccuccaccuagaaggagaaguaaauaaaaucaaaucagcacuauuaucuaccaauaaagcaguugucucacuauccaauggcguaucaguacuaacauucaaaguauuagaccuuaaaaacuacauagacaaacaacuauuaccaauucugaacaaacaauccuguucaauaucaaacaucgaaacgguaauagaauuucaacaaaaaaauaacagauuacuugaaauaacaagagaauuuucaguaaaugcaggaguuacaacacccgucuccaccuacaugcucacaaauucagaauuauuaucacuuauaaacgacaugccaauaacuaacgaccaaaaaaaacuaaugucaaacaauguccaaauaguccgacaacaauccuacucaauaaugugcauuauaaaagaagaaguccuagccuacguuguccaacuacccuuauauggaguaauagauaccccaugcuggaaacuucauaccuccccccuaugcacaacaaacacaaaagaaggcucaaacaucugcuuaacacguacagaccgagguugguacugugauaacgcaggauccguaucauuuuucccacaagcagaaacaugcaaaguacaaucaaaccgcguuuuuugugacaccaugaacagcagaacccucccuucagaaguaaaccuaugcaacgucgauauauuuaacccaaaauacgauugcaaaauaaugacaucaaaaaccgaugucucaucuucaguaauaaccucucuaggagcaauagucucauguuacggaaaaacaaaaugcacagcaaguaauaaaaauagaggaauaauaaaaacauucucuaauggcugcgacuacguauccaauaaaggcguugacacaguauccguaggcaacacacucuacuauguuaacaaacaagaaggaaaaaguuuauacguuaaaggagaaccaauuauaaacuuuuacgacccacucguauucccaucugaugaauuugacgcaucaaucucacaaguaaaugaaaaaaucaaucagucccuugccuuuauaagaaaaucagaugaacuuuuacacaacguuaacgccggaaaaucaacaaccaauauaaugaucacaaccauaauaauaguuauaauuguaauuuuauuauccuuaauagccgucggacuacuacuauacugcaaagcaagaucuacacccguaacccuaucaaaagaccaacuaaguggaauaaauaacauugcauucucaaauuaaggacuagucccuguucccagagcccacuuuuuuuucuuuuuuugaaauaaaauagccugucuuucagaucuaaaaaaaaaaaaaaaaaaaaaaaaaaaaaaaaaaaaaaaaaaaaaaaaaaaaaaaaaaaaaaaaugcaucccccccccccccccccccccccccccccccaaaggcucuuuucagagccaccagaauu

SEQ ID NO: 3978 - RNA, 1897 nt, Artificial Sequence
  mRNA product Design c-5 comprising derived and/or modified sequence from HRSV(A2)__F_DSCav1_mut0 (opt11)
gggagagcggcucggccauuuugucccagucaguccggaggcugcggcugcagaaguaccgccugcggaguaacugcaaagaagcuuaccauggaacuccuaauacuaaaggcaaacgcaaucacuacaauucuaaccgccgugacauucugcuucgccuccggacaaaacaucaccgaagaauuuuaccaauccacaugcucggccgucaguaaaggcuaccucucggcucuccgaaccggcugguacaccuccgucaucaccaucgaacucuccaacaucaaagaaaacaaaugcaacggcaccgacgccaaagucaaacuaaucaaacaagaacucgacaaauacaaaaacgccgucacagaacuccaacuacuaaugcaaucaacacccgcuacaggaagcggcuccgccaucgccagcggcguagcugucugcaaaguccuccaccucgaaggugaagucaacaaaaucaaaucagcccuacucagcacaaacaaagccguuguaagccuauccaacggcgucuccguacuaacauucaaaguccuugaccucaagaacuacaucgacaaacaacuucucccaauccuaaacaaacaaagcugcucaauuuccaacaucgaaacaguaaucgaauuucaacaaaaaaacaaccgacuccucgaaaucacccgcgaauuuuccguuaacgccggcguuacaacccccgucuccaccuacaugcucaccaauuccgaacuacuaucacucauaaacgacaugccuaucacaaacgaccaaaaaaaacuaaugucaaacaauguccaaaucguccgccagcaaagcuauuccaucaugugcaucaucaaagaggaaguccucgccuacguaguccaacugccccucuacggcgucauugauacccccugcuggaaacuccacaccuccccccucugcaccacaaacaccaaagaagguuccaacaucugccuaacacgaaccgacagaggcugguacugcgacaacgccggcagcgucuccuucuucccccaagcagaaaccuguaaaguccagucuaaccgcgucuucugcgacacaaugaacucaagaacccuaccuuccgaaguaaaccucugcaacguagacaucuucaacccuaaauacgacugcaaaaucaugacuucaaaaacagacguaagcucuuccguaaucacuucccucggcgccaucguauccugcuacgguaaaaccaaaugcaccgccuccaacaaaaaccgagggaucauaaaaaccuucuccaacggcugcgacuacguaucuaacaaaggcgucgacaccgucuccgucggcaacacccucuauuacguaaacaaacaagagggcaaaucacuauacgucaaaggcgagccaaucauaaacuucuaugacccacucgucuucccuucagacgaauuugaugccagcaucagccaagucaacgaaaaaaucaaccaaucacucgccuucauccgcaaaagcgacgaacuccuucacaacgucaacgcaggcaaaucaaccaccaacaucaugaucaccaccaucaucaucgucaucaucguuauccuacucagccucaucgcaguuggucuucuccuuuacugcaaagcccgcuccacccccgucacccucaguaaagaccaacucagcggaaucaacaacauagcauucuccaacuaaggacuagucccuguucccagagcccacuuuuuuuucuuuuuuugaaauaaaauagccugucuuucagaucuaaaaaaaaaaaaaaaaaaaaaaaaaaaaaaaaaaaaaaaaaaaaaaaaaaaaaaaaaaaaaaaaugcaucccccccccccccccccccccccccccccccaaaggcucuuuucagagccaccagaauu

SEQ ID NO: 3979 - RNA, 1906 nt, Artificial Sequence
  mRNA product Design d-1 comprising derived and/or modified sequence from HRSV(A2)__F_DSCav1_mut0 (opt1)
gggagacccgugacccggaaguuguacggcuacgcgacuuucccucccacaaacccucgcgcccuuccuuuccuacuugggcccggcagaaagcuuaccauggagcugcucauccugaaggccaacgccaucaccaccauccugacggcggugaccuucugcuucgccagcggccagaacaucaccgaggaguucuaccaguccacgugcagcgccgucuccaagggguaccucagcgcccugcggaccggcugguacaccuccgugaucaccaucgagcugagcaacaucaaggagaacaagugcaacgggaccgacgccaaggugaagcucaucaagcaggagcuggacaaguacaagaacgcggucacggagcugcagcuccugaugcaguccaccccggcaaccggcuccggcuccgccaucgcgagcggcgucgccgugugcaaggugcugcaccucgagggggaggucaacaagaucaagagcgcccugcuguccaccaacaaggccguggugagccucuccaacggcgucagcgugcugaccuucaaggugcuggaccucaagaacuacaucgacaagcagcugcugcccauccugaacaagcagagcugcuccaucagcaacaucgagacggugaucgaguuccagcagaagaacaaccggcuccuggagaucacccgcgaguucagcgugaacgccggggucaccacccccguguccacguacaugcugaccaacagcgagcuccugucccugaucaacgacaugccgaucaccaacgaccagaagaagcucaugagcaacaacgugcagaucguccggcagcaguccuacagcaucaugugcaucaucaaggaggaggugcuggcguacgugguccagcugccccucuacggcgugaucgacacccccugcuggaagcugcacacgagcccccugugcaccaccaacaccaaggagggguccaacaucugccucacgcgcaccgaccggggcugguacugcgacaacgccggcagcgucuccuucuucccgcaggccgagaccugcaaggugcagagcaaccgcguguucugcgacaccaugaacucccggacgcugcccagcgagguaaaccucugcaacgucgacaucuucaaccccaaguacgacugcaagaucaugaccuccaagaccgacgugagcuccagcgugaucaccucccugggggccaucgucagcugcuacggcaagacgaagugcaccgccagcaacaagaaccgggggaucaucaagaccuucuccaacggcugcgacuacgugagcaacaagggcguggacaccguguccgucgggaacacccuguacuacgugaacaagcaggagggcaagagccucuacgugaagggggagcccaucaucaacuucuacgacccgcuggucuuccccuccgacgaguucgacgcgagcaucucccaggugaacgagaagaucaaccagagccuggccuucauccgcaaguccgacgagcugcuccacaacgugaacgccggcaagagcacgaccaacaucaugaucaccaccaucaucaucgucaucaucgugauccugcugucccucaucgccguggggcugcugcucuacugcaaggcccggagcacgcccgucacccuguccaaggaccagcugagcggcaucaacaacaucgcguucuccaacugaggacuagucccuguucccagagcccacuuuuuuuucuuuuuuugaaauaaaauagccugucuuucagaucuaaaaaaaaaaaaaaaaaaaaaaaaaaaaaaaaaaaaaaaaaaaaaaaaaaaaaaaaaaaaaaaaugcaucccccccccccccccccccccccccccccccaaaggcucuuuucagagccaccagaauu

SEQ ID NO: 3980 - RNA, 1906 nt, Artificial Sequence
  mRNA product Design d-1 comprising derived and/or modified sequence from HRSV(A2)__F_DSCav1_mut0 (opt1)
gggagacccgugacccggaaguuguacggcuacgcgacuuucccucccacaaacccucgcgcccuuccuuuccuacuugggcccggcagaaagcuuaccauggagcugcucauccugaaggccaacgccaucaccaccauccugacggcggugaccuucugcuucgccagcggccagaacaucaccgaggaguucuaccaguccacgugcagcgccgucuccaagggguaccucagcgcccugcgcaccggcugguacaccuccgugaucaccaucgagcugagcaacaucaaggagaacaagugcaacgggaccgacgccaaggugaagcucaucaagcaggagcuggacaaguacaagaacgcggucacggagcugcagcuccugaugcaguccacccccgccaccggcagcggguccgccaucgccagcggcguggcggugugcaagguccugcaccucgagggcgaggugaacaagaucaaguccgcccugcugagcaccaacaaggccguggucucccucagcaacgggguguccgugcugacguucaagguccuggaccucaagaacuacaucgacaagcagcugcugccgauccucaacaagcagagcugcuccaucagcaacaucgagaccgugaucgaguuccagcagaagaacaaccggcugcuggagaucacccgcgaguucuccgugaacgccggcgucaccacgcccgugagcaccuacaugcucaccaacagcgagcugcugucccucaucaacgacaugcccaucaccaacgaccagaagaagcugaugagcaacaacgugcagaucguccggcagcaguccuacagcaucaugugcaucaucaaggaggaggugcuggccuacgugguccagcucccccuguacggggugaucgacacgccgugcuggaagcugcacaccagcccccucugcaccaccaacacgaaggagggcuccaacaucugccugacccgcaccgaccgggggugguacugcgacaacgcgggcuccgugagcuucuucccccaggccgagaccugcaagguccaguccaaccgcguguucugcgacacgaugaacagccggacccuccccuccgaggucaaccugugcaacguggacaucuucaacccgaaguacgacugcaagaucaugaccagcaagaccgacguguccagcuccgucaucacgagccugggcgccaucguguccugcuacgggaagaccaagugcaccgccagcaacaagaaccggggcaucaucaagaccuucuccaacgggugcgacuacgugagcaacaagggcgucgacacggugagcgugggcaacacccucuacuacgucaacaagcaggaggggaagucccuguacgugaagggcgagcccaucaucaacuucuacgacccccugguguuccccagcgacgaguucgacgccuccaucagccaggucaacgagaagaucaaccagucccucgcguucauccgcaagagcgacgagcugcugcacaacgugaacgccgggaaguccaccaccaacaucaugaucaccacgaucaucaucgugaucaucgucauccuccugagccugaucgccgugggccuccugcuguacugcaaggcccgguccaccccggugacccugagcaaggaccagcucuccgggaucaacaacaucgccuucagcaacugaggacuagucccuguucccagagcccacuuuuuuuucuuuuuuugaaauaaaauagccugucuuucagaucuaaaaaaaaaaaaaaaaaaaaaaaaaaaaaaaaaaaaaaaaaaaaaaaaaaaaaaaaaaaaaaaaugcaucccccccccccccccccccccccccccccccaaaggcucuuuucagagccaccagaauu

SEQ ID NO: 3981 - RNA, 1906 nt, Artificial Sequence
  mRNA product Design d-1 comprising derived and/or modified sequence from HRSV(A2)__F_DSCav1_mut0 (opt2)
gggagacccgugacccggaaguuguacggcuacgcgacuuucccucccacaaacccucgcgcccuuccuuuccuacuugggcccggcagaaagcuuaccauggagcuccucauccucaaggccaacgccaucaccaccauccucaccgccgucaccuucugcuucgccuccggccagaacaucaccgaggaguucuaccaguccaccugcuccgccgucuccaagggcuaccucuccgcccuccgcaccggcugguacaccuccgucaucaccaucgagcucuccaacaucaaggagaacaagugcaacggcaccgacgccaaggucaagcucaucaagcaggagcucgacaaguacaagaacgccgucaccgagcuccagcuccucaugcaguccacccccgccaccggcuccggcuccgccaucgccuccggcgucgccgucugcaagguccuccaccucgagggcgaggucaacaagaucaaguccgcccuccucuccaccaacaaggccgucgucucccucuccaacggcgucuccguccucaccuucaagguccucgaccucaagaacuacaucgacaagcagcuccuccccauccucaacaagcaguccugcuccaucuccaacaucgagaccgucaucgaguuccagcagaagaacaaccgccuccucgagaucacccgcgaguucuccgucaacgccggcgucaccacccccgucuccaccuacaugcucaccaacuccgagcuccucucccucaucaacgacaugcccaucaccaacgaccagaagaagcucauguccaacaacguccagaucguccgccagcaguccuacuccaucaugugcaucaucaaggaggagguccucgccuacgucguccagcucccccucuacggcgucaucgacacccccugcuggaagcuccacaccuccccccucugcaccaccaacaccaaggagggcuccaacaucugccucacccgcaccgaccgcggcugguacugcgacaacgccggcuccgucuccuucuucccccaggccgagaccugcaagguccaguccaaccgcgucuucugcgacaccaugaacucccgcacccuccccuccgaggucaaccucugcaacgucgacaucuucaaccccaaguacgacugcaagaucaugaccuccaagaccgacgucuccuccuccgucaucaccucccucggcgccaucgucuccugcuacggcaagaccaagugcaccgccuccaacaagaaccgcggcaucaucaagaccuucuccaacggcugcgacuacgucuccaacaagggcgucgacaccgucuccgucggcaacacccucuacuacgucaacaagcaggagggcaagucccucuacgucaagggcgagcccaucaucaacuucuacgacccccucgucuuccccuccgacgaguucgacgccuccaucucccaggucaacgagaagaucaaccagucccucgccuucauccgcaaguccgacgagcuccuccacaacgucaacgccggcaaguccaccaccaacaucaugaucaccaccaucaucaucgucaucaucgucauccuccucucccucaucgccgucggccuccuccucuacugcaaggcccgcuccacccccgucacccucuccaaggaccagcucuccggcaucaacaacaucgccuucuccaacugaggacuagucccuguucccagagcccacuuuuuuuucuuuuuuugaaauaaaauagccugucuuucagaucuaaaaaaaaaaaaaaaaaaaaaaaaaaaaaaaaaaaaaaaaaaaaaaaaaaaaaaaaaaaaaaaaugcaucccccccccccccccccccccccccccccccaaaggcucuuuucagagccaccagaauu

SEQ ID NO: 3982 - RNA, 1906 nt, Artificial Sequence
  mRNA product Design d-1 comprising derived and/or modified sequence from HRSV(A2)__F_DSCav1_mut0 (opt3)
gggagacccgugacccggaaguuguacggcuacgcgacuuucccucccacaaacccucgcgcccuuccuuuccuacuugggcccggcagaaagcuuaccauggagcugcucauccuuaaggccaacgcuauuaccacaauacugacugcagugacguucugcuuugccagcggccagaauaucaccgaagaguucuaccaauccacauguucugcggucucaaaaggguauuugagugcuuuaagaacuggaugguacaccagcguuauuacaaucgaacuguccaacauuaaggagaauaaaugcaacgguaccgacgccaaggugaaacuaaucaagcaggaacucgauaaguauaaaaaugcaguaacugagcugcagcuucugaugcagucuacacccgccaccggcucggggucagcuauagcaagcggaguggccgucuguaagguguugcaccucgagggcgaaguuaacaaaaucaagagugcucugcuguccacgaauaaagccguggucucucucagcaacgguguguccguauuaacuuuuaagguucuggaccuuaagaauuacauugauaaacaauugcugccuauccuaaacaagcagucaugcaguauuagcaauaucgagaccgugauagaguuccagcagaaaaacaauaggcuccuggaaauuacacgggaguuuucugucaacgcgggggugacuaccccaguguccacauauaugcuuaccaauucagaacuguugagccucaucaacgacaugccgauuacgaacgaucaaaagaaacugaugaguaauaacguccagaucguucgccagcagucuuacuccaucauguguauuauaaaggaggaaguguuagcauauguagugcaacugccccucuacggagucaucgacacuccuugcuggaaacuucauacaagcccacuguguaccacuaauacaaaggagggcucgaacauuugcuugacccgaacggaucguggcugguacugugacaaugccgggucuguguccuucuuuccccaggcugaaaccugcaagguucagucaaacagaguguucugugauacaaugaauaguagaacucugccuagcgaggucaaccucugcaauguggacaucuuuaacccaaaauaugauugcaagauaaugaccuccaaaacagacguaucuagcucaguuauuaccagucugggagccaucguguccuguuacgguaagacuaaaugcacagcaagcaauaagaacaggggcaucauuaagaccuucucuaaugggugugauuaugucucaaacaaaggaguggacacugucagugugggcaauacgcuuuacuauguuaacaagcaagaggguaaaagccuguacgugaagggggaacccaucauuaacuuuuaugacccuuugguauucccauccgaugaguuugacgcuucuauaucgcaggucaaugagaaaaucaaccagagccucgccuucauucggaaguccgaugaacuguuacacaaugugaacgcgggaaagucaacaaccaauaucaugaucacuaccauuauaaucguuauuaucgugauucugcuaagucucaucgccgucggccugcuuuuguacugcaaagcacgcucuacaccggugacccugagcaaggaccagcucuccggcauaaacaauaucgcuuucucaaacugaggacuagucccuguucccagagcccacuuuuuuuucuuuuuuugaaauaaaauagccugucuuucagaucuaaaaaaaaaaaaaaaaaaaaaaaaaaaaaaaaaaaaaaaaaaaaaaaaaaaaaaaaaaaaaaaaugcaucccccccccccccccccccccccccccccccaaaggcucuuuucagagccaccagaauu

SEQ ID NO: 3983 - RNA, 1906 nt, Artificial Sequence
  mRNA product Design d-1 comprising derived and/or modified sequence from HRSV(A2)__F_DSCav1_mut0 (opt4)
gggagacccgugacccggaaguuguacggcuacgcgacuuucccucccacaaacccucgcgcccuuccuuuccuacuugggcccggcagaaagcuuaccauggagcugcugauccugaaggccaacgccaucaccaccauccugaccgccgugaccuucugcuucgccagcggccagaacaucaccgaggaguucuaccagagcaccugcagcgccgugagcaagggcuaccugagcgcccugagaaccggcugguacaccagcgugaucaccaucgagcugagcaacaucaaggagaacaagugcaacggcaccgacgccaaggugaagcugaucaagcaggagcuggacaaguacaagaacgccgugaccgagcugcagcugcugaugcagagcacccccgccaccggcagcggcagcgccaucgccagcggcguggccgugugcaaggugcugcaccuggagggcgaggugaacaagaucaagagcgcccugcugagcaccaacaaggccguggugagccugagcaacggcgugagcgugcugaccuucaaggugcuggaccugaagaacuacaucgacaagcagcugcugcccauccugaacaagcagagcugcagcaucagcaacaucgagaccgugaucgaguuccagcagaagaacaacagacugcuggagaucaccagagaguucagcgugaacgccggcgugaccacccccgugagcaccuacaugcugaccaacagcgagcugcugagccugaucaacgacaugcccaucaccaacgaccagaagaagcugaugagcaacaacgugcagaucgugagacagcagagcuacagcaucaugugcaucaucaaggaggaggugcuggccuacguggugcagcugccccuguacggcgugaucgacacccccugcuggaagcugcacaccagcccccugugcaccaccaacaccaaggagggcagcaacaucugccugaccagaaccgacagaggcugguacugcgacaacgccggcagcgugagcuucuucccccaggccgagaccugcaaggugcagagcaacagaguguucugcgacaccaugaacagcagaacccugcccagcgaggugaaccugugcaacguggacaucuucaaccccaaguacgacugcaagaucaugaccagcaagaccgacgugagcagcagcgugaucaccagccugggcgccaucgugagcugcuacggcaagaccaagugcaccgccagcaacaagaacagaggcaucaucaagaccuucagcaacggcugcgacuacgugagcaacaagggcguggacaccgugagcgugggcaacacccuguacuacgugaacaagcaggagggcaagagccuguacgugaagggcgagcccaucaucaacuucuacgacccccugguguuccccagcgacgaguucgacgccagcaucagccaggugaacgagaagaucaaccagagccuggccuucaucagaaagagcgacgagcugcugcacaacgugaacgccggcaagagcaccaccaacaucaugaucaccaccaucaucaucgugaucaucgugauccugcugagccugaucgccgugggccugcugcuguacugcaaggccagaagcacccccgugacccugagcaaggaccagcugagcggcaucaacaacaucgccuucagcaacugaggacuagucccuguucccagagcccacuuuuuuuucuuuuuuugaaauaaaauagccugucuuucagaucuaaaaaaaaaaaaaaaaaaaaaaaaaaaaaaaaaaaaaaaaaaaaaaaaaaaaaaaaaaaaaaaaugcaucccccccccccccccccccccccccccccccaaaggcucuuuucagagccaccagaauu

SEQ ID NO: 3984 - RNA, 1906 nt, Artificial Sequence
  mRNA product Design d-1 comprising derived and/or modified sequence from HRSV(A2)__F_DSCav1_mut0 (opt5)
gggagacccgugacccggaaguuguacggcuacgcgacuuucccucccacaaacccucgcgcccuuccuuuccuacuugggcccggcagaaagcuuaccauggagcugcucauccugaaggccaacgcuauuaccacaauccuuacggccgugaccuucugcuuugcgagcggccagaauauuacagaagaguucuaccaauccaccuguucugcugucagcaaaggguaucuguccgcccucagaacaggaugguacaccucuguuaucacaauugaacugagcaacaucaaggagaauaaaugcaacggcaccgacgccaaggugaaacuuaucaagcaggaacuggauaaguauaaaaaugcugugacggagcuccagcugcugaugcaguccacccccgccacagggucuggaagcgcuauugccuccggcgucgcgguguguaagguucuccaccuggagggggaagugaacaaaaucaagagcgcccuucugucuaccaauaaagcugucgugucccucagcaacggaguuucugugcugacauuuaagguccuugaccugaagaauuacauugauaaacaacuccugccuauccugaacaagcaguccugcagcauuucuaauaucgagaccgugauugaguuccagcagaaaaacaaucggcuccuggaaaucacgcgcgaguuuuccgugaacgccggcgucacaaccccgguuagcacauauaugcuuaccaauuccgaacugcucucucugaucaacgacaugcccauuaccaacgaucaaaagaaacuuaugagcaauaacgugcagaucgugagacagcaguccuacagcauuauguguaucauuaaggaggaaguccuggcuuaugugguucaacucccucuguacggcgugaucgacacacccugcuggaaacugcauacgucuccucucuguaccacaaauaccaaggagggguccaacaucugccugacacggaccgaucgcggaugguacugugacaaugccggcagcgucucuuucuuuccccaggcggaaacgugcaaggugcagagcaacagaguuuucugugauacaaugaacuccagaacccugccuucugaggugaaucucugcaaugucgacauuuuuaacccgaaauaugauugcaagaucaugaccagcaaaacagacguguccagcucugucauuaccucccugggggccaucgugagcuguuacggaaagacaaaaugcacggcuucuaauaagaaccggggcauuaucaagaccuucuccaaugggugugauuauguuagcaacaaaggaguggacacagucuccgugggcaauacccuuuacuauguuaacaagcaagagggcaaaucucuguacgugaagggggaacccaucauuaacuuuuaugacccucucgucuuccccagcgaugaguuugacgccuccaucucucaggugaaugagaaaauuaaccagagccuggcuuucauccgcaaguccgaugaacugcuccacaaugugaacgccggaaagagcacaaccaauauuaugaucacgaccauuaucaucguuauuaucgucauucugcuuucucugaucgccgugggccuccugcuguacugcaaagcuagauccacaccugugacccuuagcaaggaccagcucucugggauuaacaauaucgcguucuccaacugaggacuagucccuguucccagagcccacuuuuuuuucuuuuuuugaaauaaaauagccugucuuucagaucuaaaaaaaaaaaaaaaaaaaaaaaaaaaaaaaaaaaaaaaaaaaaaaaaaaaaaaaaaaaaaaaaugcaucccccccccccccccccccccccccccccccaaaggcucuuuucagagccaccagaauu

SEQ ID NO: 3985 - RNA, 1906 nt, Artificial Sequence
  mRNA product Design d-1 comprising derived and/or modified sequence from HRSV(A2)__F_DSCav1_mut0 (opt6)
gggagacccgugacccggaaguuguacggcuacgcgacuuucccucccacaaacccucgcgcccuuccuuuccuacuugggcccggcagaaagcuuaccauggaacuacuaauacuaaaagccaaugcaauaacaaccauacuaaccgccguaacauuuuguuucgcaucaggucaaaacauaaccgaagaauuuuaucaaucaacaugcucagcaguaucaaaaggauacuuauccgcucuaagaacaggaugguacacaaguguaauuacaauagagcucucaaacauaaaagaaaacaaaugcaauggaacugacgcaaaaguuaaacuuauaaaacaagaacuagauaaauauaaaaaugcaguaaccgaauuacaacuccuaaugcaauccacaccugcuaccgguuccggaucagccauagcaucuggaguagccguaugcaaaguccuccaccuagaaggagaaguaaauaaaaucaaaucagcacuauuaucuaccaauaaagcaguugucucacuauccaauggcguaucaguacuaacauucaaaguauuagaccuuaaaaacuacauagacaaacaacuauuaccaauucugaacaaacaauccuguucaauaucaaacaucgaaacgguaauagaauuucaacaaaaaaauaacagauuacuugaaauaacaagagaauuuucaguaaaugcaggaguuacaacacccgucuccaccuacaugcucacaaauucagaauuauuaucacuuauaaacgacaugccaauaacuaacgaccaaaaaaaacuaaugucaaacaauguccaaauaguccgacaacaauccuacucaauaaugugcauuauaaaagaagaaguccuagccuacguuguccaacuacccuuauauggaguaauagauaccccaugcuggaaacuucauaccuccccccuaugcacaacaaacacaaaagaaggcucaaacaucugcuuaacacguacagaccgagguugguacugugauaacgcaggauccguaucauuuuucccacaagcagaaacaugcaaaguacaaucaaaccgcguuuuuugugacaccaugaacagcagaacccucccuucagaaguaaaccuaugcaacgucgauauauuuaacccaaaauacgauugcaaaauaaugacaucaaaaaccgaugucucaucuucaguaauaaccucucuaggagcaauagucucauguuacggaaaaacaaaaugcacagcaaguaauaaaaauagaggaauaauaaaaacauucucuaauggcugcgacuacguauccaauaaaggcguugacacaguauccguaggcaacacacucuacuauguuaacaaacaagaaggaaaaaguuuauacguuaaaggagaaccaauuauaaacuuuuacgacccacucguauucccaucugaugaauuugacgcaucaaucucacaaguaaaugaaaaaaucaaucagucccuugccuuuauaagaaaaucagaugaacuuuuacacaacguuaacgccggaaaaucaacaaccaauauaaugaucacaaccauaauaauaguuauaauuguaauuuuauuauccuuaauagccgucggacuacuacuauacugcaaagcaagaucuacacccguaacccuaucaaaagaccaacuaaguggaauaaauaacauugcauucucaaauuaaggacuagucccuguucccagagcccacuuuuuuuucuuuuuuugaaauaaaauagccugucuuucagaucuaaaaaaaaaaaaaaaaaaaaaaaaaaaaaaaaaaaaaaaaaaaaaaaaaaaaaaaaaaaaaaaaugcaucccccccccccccccccccccccccccccccaaaggcucuuuucagagccaccagaauu

SEQ ID NO: 3986 - RNA, 1906 nt, Artificial Sequence
  mRNA product Design d-1 comprising derived and/or modified sequence from HRSV(A2)__F_DSCav1_mut0 (opt11)
gggagacccgugacccggaaguuguacggcuacgcgacuuucccucccacaaacccucgcgcccuuccuuuccuacuugggcccggcagaaagcuuaccauggaacuccuaauacuaaaggcaaacgcaaucacuacaauucuaaccgccgugacauucugcuucgccuccggacaaaacaucaccgaagaauuuuaccaauccacaugcucggccgucaguaaaggcuaccucucggcucuccgaaccggcugguacaccuccgucaucaccaucgaacucuccaacaucaaagaaaacaaaugcaacggcaccgacgccaaagucaaacuaaucaaacaagaacucgacaaauacaaaaacgccgucacagaacuccaacuacuaaugcaaucaacacccgcuacaggaagcggcuccgccaucgccagcggcguagcugucugcaaaguccuccaccucgaaggugaagucaacaaaaucaaaucagcccuacucagcacaaacaaagccguuguaagccuauccaacggcgucuccguacuaacauucaaaguccuugaccucaagaacuacaucgacaaacaacuucucccaauccuaaacaaacaaagcugcucaauuuccaacaucgaaacaguaaucgaauuucaacaaaaaaacaaccgacuccucgaaaucacccgcgaauuuuccguuaacgccggcguuacaacccccgucuccaccuacaugcucaccaauuccgaacuacuaucacucauaaacgacaugccuaucacaaacgaccaaaaaaaacuaaugucaaacaauguccaaaucguccgccagcaaagcuauuccaucaugugcaucaucaaagaggaaguccucgccuacguaguccaacugccccucuacggcgucauugauacccccugcuggaaacuccacaccuccccccucugcaccacaaacaccaaagaagguuccaacaucugccuaacacgaaccgacagaggcugguacugcgacaacgccggcagcgucuccuucuucccccaagcagaaaccuguaaaguccagucuaaccgcgucuucugcgacacaaugaacucaagaacccuaccuuccgaaguaaaccucugcaacguagacaucuucaacccuaaauacgacugcaaaaucaugacuucaaaaacagacguaagcucuuccguaaucacuucccucggcgccaucguauccugcuacgguaaaaccaaaugcaccgccuccaacaaaaaccgagggaucauaaaaaccuucuccaacggcugcgacuacguaucuaacaaaggcgucgacaccgucuccgucggcaacacccucuauuacguaaacaaacaagagggcaaaucacuauacgucaaaggcgagccaaucauaaacuucuaugacccacucgucuucccuucagacgaauuugaugccagcaucagccaagucaacgaaaaaaucaaccaaucacucgccuucauccgcaaaagcgacgaacuccuucacaacgucaacgcaggcaaaucaaccaccaacaucaugaucaccaccaucaucaucgucaucaucguuauccuacucagccucaucgcaguuggucuucuccuuuacugcaaagcccgcuccacccccgucacccucaguaaagaccaacucagcggaaucaacaacauagcauucuccaacuaaggacuagucccuguucccagagcccacuuuuuuuucuuuuuuugaaauaaaauagccugucuuucagaucuaaaaaaaaaaaaaaaaaaaaaaaaaaaaaaaaaaaaaaaaaaaaaaaaaaaaaaaaaaaaaaaaugcaucccccccccccccccccccccccccccccccaaaggcucuuuucagagccaccagaauu

SEQ ID NO: 3987 - RNA, 1961 nt, Artificial Sequence
  mRNA product Design d-2 comprising derived and/or modified sequence from HRSV(A2)__F_DSCav1_mut0 (opt1)
gggagagcggcucggccauuuugucccagucaguccggaggcugcggcugcagaaguaccgccugcggaguaacugcaaagaagcuuaccauggagcugcucauccugaaggccaacgccaucaccaccauccugacggcggugaccuucugcuucgccagcggccagaacaucaccgaggaguucuaccaguccacgugcagcgccgucuccaagggguaccucagcgcccugcggaccggcugguacaccuccgugaucaccaucgagcugagcaacaucaaggagaacaagugcaacgggaccgacgccaaggugaagcucaucaagcaggagcuggacaaguacaagaacgcggucacggagcugcagcuccugaugcaguccaccccggcaaccggcuccggcuccgccaucgcgagcggcgucgccgugugcaaggugcugcaccucgagggggaggucaacaagaucaagagcgcccugcuguccaccaacaaggccguggugagccucuccaacggcgucagcgugcugaccuucaaggugcuggaccucaagaacuacaucgacaagcagcugcugcccauccugaacaagcagagcugcuccaucagcaacaucgagacggugaucgaguuccagcagaagaacaaccggcuccuggagaucacccgcgaguucagcgugaacgccggggucaccacccccguguccacguacaugcugaccaacagcgagcuccugucccugaucaacgacaugccgaucaccaacgaccagaagaagcucaugagcaacaacgugcagaucguccggcagcaguccuacagcaucaugugcaucaucaaggaggaggugcuggcguacgugguccagcugccccucuacggcgugaucgacacccccugcuggaagcugcacacgagcccccugugcaccaccaacaccaaggagggguccaacaucugccucacgcgcaccgaccggggcugguacugcgacaacgccggcagcgucuccuucuucccgcaggccgagaccugcaaggugcagagcaaccgcguguucugcgacaccaugaacucccggacgcugcccagcgagguaaaccucugcaacgucgacaucuucaaccccaaguacgacugcaagaucaugaccuccaagaccgacgugagcuccagcgugaucaccucccugggggccaucgucagcugcuacggcaagacgaagugcaccgccagcaacaagaaccgggggaucaucaagaccuucuccaacggcugcgacuacgugagcaacaagggcguggacaccguguccgucgggaacacccuguacuacgugaacaagcaggagggcaagagccucuacgugaagggggagcccaucaucaacuucuacgacccgcuggucuuccccuccgacgaguucgacgcgagcaucucccaggugaacgagaagaucaaccagagccuggccuucauccgcaaguccgacgagcugcuccacaacgugaacgccggcaagagcacgaccaacaucaugaucaccaccaucaucaucgucaucaucgugauccugcugucccucaucgccguggggcugcugcucuacugcaaggcccggagcacgcccgucacccuguccaaggaccagcugagcggcaucaacaacaucgcguucuccaacugaggacuaguaauaaggaaacuguaugaaugucugugggcaggaagugaagagauccuucuguaaagguuuuuggaauuaugucugcugaauaauaaacuuuuuugaaauaauaaaucugguagaaaaaugagaucuaaaaaaaaaaaaaaaaaaaaaaaaaaaaaaaaaaaaaaaaaaaaaaaaaaaaaaaaaaaaaaaaugcaucccccccccccccccccccccccccccccccaaaggcucuuuucagagccaccagaauu

SEQ ID NO: 3988 - RNA, 1961 nt, Artificial Sequence
  mRNA product Design d-2 comprising derived and/or modified sequence from HRSV(A2)__F_DSCav1_mut0 (opt1)
gggagagcggcucggccauuuugucccagucaguccggaggcugcggcugcagaaguaccgccugcggaguaacugcaaagaagcuuaccauggagcugcucauccugaaggccaacgccaucaccaccauccugacggcggugaccuucugcuucgccagcggccagaacaucaccgaggaguucuaccaguccacgugcagcgccgucuccaagggguaccucagcgcccugcgcaccggcugguacaccuccgugaucaccaucgagcugagcaacaucaaggagaacaagugcaacgggaccgacgccaaggugaagcucaucaagcaggagcuggacaaguacaagaacgcggucacggagcugcagcuccugaugcaguccacccccgccaccggcagcggguccgccaucgccagcggcguggcggugugcaagguccugcaccucgagggcgaggugaacaagaucaaguccgcccugcugagcaccaacaaggccguggucucccucagcaacgggguguccgugcugacguucaagguccuggaccucaagaacuacaucgacaagcagcugcugccgauccucaacaagcagagcugcuccaucagcaacaucgagaccgugaucgaguuccagcagaagaacaaccggcugcuggagaucacccgcgaguucuccgugaacgccggcgucaccacgcccgugagcaccuacaugcucaccaacagcgagcugcugucccucaucaacgacaugcccaucaccaacgaccagaagaagcugaugagcaacaacgugcagaucguccggcagcaguccuacagcaucaugugcaucaucaaggaggaggugcuggccuacgugguccagcucccccuguacggggugaucgacacgccgugcuggaagcugcacaccagcccccucugcaccaccaacacgaaggagggcuccaacaucugccugacccgcaccgaccgggggugguacugcgacaacgcgggcuccgugagcuucuucccccaggccgagaccugcaagguccaguccaaccgcguguucugcgacacgaugaacagccggacccuccccuccgaggucaaccugugcaacguggacaucuucaacccgaaguacgacugcaagaucaugaccagcaagaccgacguguccagcuccgucaucacgagccugggcgccaucguguccugcuacgggaagaccaagugcaccgccagcaacaagaaccggggcaucaucaagaccuucuccaacgggugcgacuacgugagcaacaagggcgucgacacggugagcgugggcaacacccucuacuacgucaacaagcaggaggggaagucccuguacgugaagggcgagcccaucaucaacuucuacgacccccugguguuccccagcgacgaguucgacgccuccaucagccaggucaacgagaagaucaaccagucccucgcguucauccgcaagagcgacgagcugcugcacaacgugaacgccgggaaguccaccaccaacaucaugaucaccacgaucaucaucgugaucaucgucauccuccugagccugaucgccgugggccuccugcuguacugcaaggcccgguccaccccggugacccugagcaaggaccagcucuccgggaucaacaacaucgccuucagcaacugaggacuaguaauaaggaaacuguaugaaugucugugggcaggaagugaagagauccuucuguaaagguuuuuggaauuaugucugcugaauaauaaacuuuuuugaaauaauaaaucugguagaaaaaugagaucuaaaaaaaaaaaaaaaaaaaaaaaaaaaaaaaaaaaaaaaaaaaaaaaaaaaaaaaaaaaaaaaaugcaucccccccccccccccccccccccccccccccaaaggcucuuuucagagccaccagaauu

SEQ ID NO: 3989 - RNA, 1961 nt, Artificial Sequence
  mRNA product Design d-2 comprising derived and/or modified sequence from HRSV(A2)__F_DSCav1_mut0 (opt2)
gggagagcggcucggccauuuugucccagucaguccggaggcugcggcugcagaaguaccgccugcggaguaacugcaaagaagcuuaccauggagcuccucauccucaaggccaacgccaucaccaccauccucaccgccgucaccuucugcuucgccuccggccagaacaucaccgaggaguucuaccaguccaccugcuccgccgucuccaagggcuaccucuccgcccuccgcaccggcugguacaccuccgucaucaccaucgagcucuccaacaucaaggagaacaagugcaacggcaccgacgccaaggucaagcucaucaagcaggagcucgacaaguacaagaacgccgucaccgagcuccagcuccucaugcaguccacccccgccaccggcuccggcuccgccaucgccuccggcgucgccgucugcaagguccuccaccucgagggcgaggucaacaagaucaaguccgcccuccucuccaccaacaaggccgucgucucccucuccaacggcgucuccguccucaccuucaagguccucgaccucaagaacuacaucgacaagcagcuccuccccauccucaacaagcaguccugcuccaucuccaacaucgagaccgucaucgaguuccagcagaagaacaaccgccuccucgagaucacccgcgaguucuccgucaacgccggcgucaccacccccgucuccaccuacaugcucaccaacuccgagcuccucucccucaucaacgacaugcccaucaccaacgaccagaagaagcucauguccaacaacguccagaucguccgccagcaguccuacuccaucaugugcaucaucaaggaggagguccucgccuacgucguccagcucccccucuacggcgucaucgacacccccugcuggaagcuccacaccuccccccucugcaccaccaacaccaaggagggcuccaacaucugccucacccgcaccgaccgcggcugguacugcgacaacgccggcuccgucuccuucuucccccaggccgagaccugcaagguccaguccaaccgcgucuucugcgacaccaugaacucccgcacccuccccuccgaggucaaccucugcaacgucgacaucuucaaccccaaguacgacugcaagaucaugaccuccaagaccgacgucuccuccuccgucaucaccucccucggcgccaucgucuccugcuacggcaagaccaagugcaccgccuccaacaagaaccgcggcaucaucaagaccuucuccaacggcugcgacuacgucuccaacaagggcgucgacaccgucuccgucggcaacacccucuacuacgucaacaagcaggagggcaagucccucuacgucaagggcgagcccaucaucaacuucuacgacccccucgucuuccccuccgacgaguucgacgccuccaucucccaggucaacgagaagaucaaccagucccucgccuucauccgcaaguccgacgagcuccuccacaacgucaacgccggcaaguccaccaccaacaucaugaucaccaccaucaucaucgucaucaucgucauccuccucucccucaucgccgucggccuccuccucuacugcaaggcccgcuccacccccgucacccucuccaaggaccagcucuccggcaucaacaacaucgccuucuccaacugaggacuaguaauaaggaaacuguaugaaugucugugggcaggaagugaagagauccuucuguaaagguuuuuggaauuaugucugcugaauaauaaacuuuuuugaaauaauaaaucugguagaaaaaugagaucuaaaaaaaaaaaaaaaaaaaaaaaaaaaaaaaaaaaaaaaaaaaaaaaaaaaaaaaaaaaaaaaaugcaucccccccccccccccccccccccccccccccaaaggcucuuuucagagccaccagaauu

SEQ ID NO: 3990 - RNA, 1961 nt, Artificial Sequence
  mRNA product Design d-2 comprising derived and/or modified sequence from HRSV(A2)__F_DSCav1_mut0 (opt3)
gggagagcggcucggccauuuugucccagucaguccggaggcugcggcugcagaaguaccgccugcggaguaacugcaaagaagcuuaccauggagcugcucauccuuaaggccaacgcuauuaccacaauacugacugcagugacguucugcuuugccagcggccagaauaucaccgaagaguucuaccaauccacauguucugcggucucaaaaggguauuugagugcuuuaagaacuggaugguacaccagcguuauuacaaucgaacuguccaacauuaaggagaauaaaugcaacgguaccgacgccaaggugaaacuaaucaagcaggaacucgauaaguauaaaaaugcaguaacugagcugcagcuucugaugcagucuacacccgccaccggcucggggucagcuauagcaagcggaguggccgucuguaagguguugcaccucgagggcgaaguuaacaaaaucaagagugcucugcuguccacgaauaaagccguggucucucucagcaacgguguguccguauuaacuuuuaagguucuggaccuuaagaauuacauugauaaacaauugcugccuauccuaaacaagcagucaugcaguauuagcaauaucgagaccgugauagaguuccagcagaaaaacaauaggcuccuggaaauuacacgggaguuuucugucaacgcgggggugacuaccccaguguccacauauaugcuuaccaauucagaacuguugagccucaucaacgacaugccgauuacgaacgaucaaaagaaacugaugaguaauaacguccagaucguucgccagcagucuuacuccaucauguguauuauaaaggaggaaguguuagcauauguagugcaacugccccucuacggagucaucgacacuccuugcuggaaacuucauacaagcccacuguguaccacuaauacaaaggagggcucgaacauuugcuugacccgaacggaucguggcugguacugugacaaugccgggucuguguccuucuuuccccaggcugaaaccugcaagguucagucaaacagaguguucugugauacaaugaauaguagaacucugccuagcgaggucaaccucugcaauguggacaucuuuaacccaaaauaugauugcaagauaaugaccuccaaaacagacguaucuagcucaguuauuaccagucugggagccaucguguccuguuacgguaagacuaaaugcacagcaagcaauaagaacaggggcaucauuaagaccuucucuaaugggugugauuaugucucaaacaaaggaguggacacugucagugugggcaauacgcuuuacuauguuaacaagcaagaggguaaaagccuguacgugaagggggaacccaucauuaacuuuuaugacccuuugguauucccauccgaugaguuugacgcuucuauaucgcaggucaaugagaaaaucaaccagagccucgccuucauucggaaguccgaugaacuguuacacaaugugaacgcgggaaagucaacaaccaauaucaugaucacuaccauuauaaucguuauuaucgugauucugcuaagucucaucgccgucggccugcuuuuguacugcaaagcacgcucuacaccggugacccugagcaaggaccagcucuccggcauaaacaauaucgcuuucucaaacugaggacuaguaauaaggaaacuguaugaaugucugugggcaggaagugaagagauccuucuguaaagguuuuuggaauuaugucugcugaauaauaaacuuuuuugaaauaauaaaucugguagaaaaaugagaucuaaaaaaaaaaaaaaaaaaaaaaaaaaaaaaaaaaaaaaaaaaaaaaaaaaaaaaaaaaaaaaaaugcaucccccccccccccccccccccccccccccccaaaggcucuuuucagagccaccagaauu

SEQ ID NO: 3991 - RNA, 1961 nt, Artificial Sequence
  mRNA product Design d-2 comprising derived and/or modified sequence from HRSV(A2)__F_DSCav1_mut0 (opt4)
gggagagcggcucggccauuuugucccagucaguccggaggcugcggcugcagaaguaccgccugcggaguaacugcaaagaagcuuaccauggagcugcugauccugaaggccaacgccaucaccaccauccugaccgccgugaccuucugcuucgccagcggccagaacaucaccgaggaguucuaccagagcaccugcagcgccgugagcaagggcuaccugagcgcccugagaaccggcugguacaccagcgugaucaccaucgagcugagcaacaucaaggagaacaagugcaacggcaccgacgccaaggugaagcugaucaagcaggagcuggacaaguacaagaacgccgugaccgagcugcagcugcugaugcagagcacccccgccaccggcagcggcagcgccaucgccagcggcguggccgugugcaaggugcugcaccuggagggcgaggugaacaagaucaagagcgcccugcugagcaccaacaaggccguggugagccugagcaacggcgugagcgugcugaccuucaaggugcuggaccugaagaacuacaucgacaagcagcugcugcccauccugaacaagcagagcugcagcaucagcaacaucgagaccgugaucgaguuccagcagaagaacaacagacugcuggagaucaccagagaguucagcgugaacgccggcgugaccacccccgugagcaccuacaugcugaccaacagcgagcugcugagccugaucaacgacaugcccaucaccaacgaccagaagaagcugaugagcaacaacgugcagaucgugagacagcagagcuacagcaucaugugcaucaucaaggaggaggugcuggccuacguggugcagcugccccuguacggcgugaucgacacccccugcuggaagcugcacaccagcccccugugcaccaccaacaccaaggagggcagcaacaucugccugaccagaaccgacagaggcugguacugcgacaacgccggcagcgugagcuucuucccccaggccgagaccugcaaggugcagagcaacagaguguucugcgacaccaugaacagcagaacccugcccagcgaggugaaccugugcaacguggacaucuucaaccccaaguacgacugcaagaucaugaccagcaagaccgacgugagcagcagcgugaucaccagccugggcgccaucgugagcugcuacggcaagaccaagugcaccgccagcaacaagaacagaggcaucaucaagaccuucagcaacggcugcgacuacgugagcaacaagggcguggacaccgugagcgugggcaacacccuguacuacgugaacaagcaggagggcaagagccuguacgugaagggcgagcccaucaucaacuucuacgacccccugguguuccccagcgacgaguucgacgccagcaucagccaggugaacgagaagaucaaccagagccuggccuucaucagaaagagcgacgagcugcugcacaacgugaacgccggcaagagcaccaccaacaucaugaucaccaccaucaucaucgugaucaucgugauccugcugagccugaucgccgugggccugcugcuguacugcaaggccagaagcacccccgugacccugagcaaggaccagcugagcggcaucaacaacaucgccuucagcaacugaggacuaguaauaaggaaacuguaugaaugucugugggcaggaagugaagagauccuucuguaaagguuuuuggaauuaugucugcugaauaauaaacuuuuuugaaauaauaaaucugguagaaaaaugagaucuaaaaaaaaaaaaaaaaaaaaaaaaaaaaaaaaaaaaaaaaaaaaaaaaaaaaaaaaaaaaaaaaugcaucccccccccccccccccccccccccccccccaaaggcucuuuucagagccaccagaauu

SEQ ID NO: 3992 - RNA, 1961 nt, Artificial Sequence
  mRNA product Design d-2 comprising derived and/or modified sequence from HRSV(A2)__F_DSCav1_mut0 (opt5)
gggagagcggcucggccauuuugucccagucaguccggaggcugcggcugcagaaguaccgccugcggaguaacugcaaagaagcuuaccauggagcugcucauccugaaggccaacgcuauuaccacaauccuuacggccgugaccuucugcuuugcgagcggccagaauauuacagaagaguucuaccaauccaccuguucugcugucagcaaaggguaucuguccgcccucagaacaggaugguacaccucuguuaucacaauugaacugagcaacaucaaggagaauaaaugcaacggcaccgacgccaaggugaaacuuaucaagcaggaacuggauaaguauaaaaaugcugugacggagcuccagcugcugaugcaguccacccccgccacagggucuggaagcgcuauugccuccggcgucgcgguguguaagguucuccaccuggagggggaagugaacaaaaucaagagcgcccuucugucuaccaauaaagcugucgugucccucagcaacggaguuucugugcugacauuuaagguccuugaccugaagaauuacauugauaaacaacuccugccuauccugaacaagcaguccugcagcauuucuaauaucgagaccgugauugaguuccagcagaaaaacaaucggcuccuggaaaucacgcgcgaguuuuccgugaacgccggcgucacaaccccgguuagcacauauaugcuuaccaauuccgaacugcucucucugaucaacgacaugcccauuaccaacgaucaaaagaaacuuaugagcaauaacgugcagaucgugagacagcaguccuacagcauuauguguaucauuaaggaggaaguccuggcuuaugugguucaacucccucuguacggcgugaucgacacacccugcuggaaacugcauacgucuccucucuguaccacaaauaccaaggagggguccaacaucugccugacacggaccgaucgcggaugguacugugacaaugccggcagcgucucuuucuuuccccaggcggaaacgugcaaggugcagagcaacagaguuuucugugauacaaugaacuccagaacccugccuucugaggugaaucucugcaaugucgacauuuuuaacccgaaauaugauugcaagaucaugaccagcaaaacagacguguccagcucugucauuaccucccugggggccaucgugagcuguuacggaaagacaaaaugcacggcuucuaauaagaaccggggcauuaucaagaccuucuccaaugggugugauuauguuagcaacaaaggaguggacacagucuccgugggcaauacccuuuacuauguuaacaagcaagagggcaaaucucuguacgugaagggggaacccaucauuaacuuuuaugacccucucgucuuccccagcgaugaguuugacgccuccaucucucaggugaaugagaaaauuaaccagagccuggcuuucauccgcaaguccgaugaacugcuccacaaugugaacgccggaaagagcacaaccaauauuaugaucacgaccauuaucaucguuauuaucgucauucugcuuucucugaucgccgugggccuccugcuguacugcaaagcuagauccacaccugugacccuuagcaaggaccagcucucugggauuaacaauaucgcguucuccaacugaggacuaguaauaaggaaacuguaugaaugucugugggcaggaagugaagagauccuucuguaaagguuuuuggaauuaugucugcugaauaauaaacuuuuuugaaauaauaaaucugguagaaaaaugagaucuaaaaaaaaaaaaaaaaaaaaaaaaaaaaaaaaaaaaaaaaaaaaaaaaaaaaaaaaaaaaaaaaugcaucccccccccccccccccccccccccccccccaaaggcucuuuucagagccaccagaauu

SEQ ID NO: 3993 - RNA, 1961 nt, Artificial Sequence
  mRNA product Design d-2 comprising derived and/or modified sequence from HRSV(A2)__F_DSCav1_mut0 (opt6)
gggagagcggcucggccauuuugucccagucaguccggaggcugcggcugcagaaguaccgccugcggaguaacugcaaagaagcuuaccauggaacuacuaauacuaaaagccaaugcaauaacaaccauacuaaccgccguaacauuuuguuucgcaucaggucaaaacauaaccgaagaauuuuaucaaucaacaugcucagcaguaucaaaaggauacuuauccgcucuaagaacaggaugguacacaaguguaauuacaauagagcucucaaacauaaaagaaaacaaaugcaauggaacugacgcaaaaguuaaacuuauaaaacaagaacuagauaaauauaaaaaugcaguaaccgaauuacaacuccuaaugcaauccacaccugcuaccgguuccggaucagccauagcaucuggaguagccguaugcaaaguccuccaccuagaaggagaaguaaauaaaaucaaaucagcacuauuaucuaccaauaaagcaguugucucacuauccaauggcguaucaguacuaacauucaaaguauuagaccuuaaaaacuacauagacaaacaacuauuaccaauucugaacaaacaauccuguucaauaucaaacaucgaaacgguaauagaauuucaacaaaaaaauaacagauuacuugaaauaacaagagaauuuucaguaaaugcaggaguuacaacacccgucuccaccuacaugcucacaaauucagaauuauuaucacuuauaaacgacaugccaauaacuaacgaccaaaaaaaacuaaugucaaacaauguccaaauaguccgacaacaauccuacucaauaaugugcauuauaaaagaagaaguccuagccuacguuguccaacuacccuuauauggaguaauagauaccccaugcuggaaacuucauaccuccccccuaugcacaacaaacacaaaagaaggcucaaacaucugcuuaacacguacagaccgagguugguacugugauaacgcaggauccguaucauuuuucccacaagcagaaacaugcaaaguacaaucaaaccgcguuuuuugugacaccaugaacagcagaacccucccuucagaaguaaaccuaugcaacgucgauauauuuaacccaaaauacgauugcaaaauaaugacaucaaaaaccgaugucucaucuucaguaauaaccucucuaggagcaauagucucauguuacggaaaaacaaaaugcacagcaaguaauaaaaauagaggaauaauaaaaacauucucuaauggcugcgacuacguauccaauaaaggcguugacacaguauccguaggcaacacacucuacuauguuaacaaacaagaaggaaaaaguuuauacguuaaaggagaaccaauuauaaacuuuuacgacccacucguauucccaucugaugaauuugacgcaucaaucucacaaguaaaugaaaaaaucaaucagucccuugccuuuauaagaaaaucagaugaacuuuuacacaacguuaacgccggaaaaucaacaaccaauauaaugaucacaaccauaauaauaguuauaauuguaauuuuauuauccuuaauagccgucggacuacuacuauacugcaaagcaagaucuacacccguaacccuaucaaaagaccaacuaaguggaauaaauaacauugcauucucaaauuaaggacuaguaauaaggaaacuguaugaaugucugugggcaggaagugaagagauccuucuguaaagguuuuuggaauuaugucugcugaauaauaaacuuuuuugaaauaauaaaucugguagaaaaaugagaucuaaaaaaaaaaaaaaaaaaaaaaaaaaaaaaaaaaaaaaaaaaaaaaaaaaaaaaaaaaaaaaaaugcaucccccccccccccccccccccccccccccccaaaggcucuuuucagagccaccagaauu

SEQ ID NO: 3994 - RNA, 1961 nt, Artificial Sequence
  mRNA product Design d-2 comprising derived and/or modified sequence from HRSV(A2)__F_DSCav1_mut0 (opt11)
gggagagcggcucggccauuuugucccagucaguccggaggcugcggcugcagaaguaccgccugcggaguaacugcaaagaagcuuaccauggaacuccuaauacuaaaggcaaacgcaaucacuacaauucuaaccgccgugacauucugcuucgccuccggacaaaacaucaccgaagaauuuuaccaauccacaugcucggccgucaguaaaggcuaccucucggcucuccgaaccggcugguacaccuccgucaucaccaucgaacucuccaacaucaaagaaaacaaaugcaacggcaccgacgccaaagucaaacuaaucaaacaagaacucgacaaauacaaaaacgccgucacagaacuccaacuacuaaugcaaucaacacccgcuacaggaagcggcuccgccaucgccagcggcguagcugucugcaaaguccuccaccucgaaggugaagucaacaaaaucaaaucagcccuacucagcacaaacaaagccguuguaagccuauccaacggcgucuccguacuaacauucaaaguccuugaccucaagaacuacaucgacaaacaacuucucccaauccuaaacaaacaaagcugcucaauuuccaacaucgaaacaguaaucgaauuucaacaaaaaaacaaccgacuccucgaaaucacccgcgaauuuuccguuaacgccggcguuacaacccccgucuccaccuacaugcucaccaauuccgaacuacuaucacucauaaacgacaugccuaucacaaacgaccaaaaaaaacuaaugucaaacaauguccaaaucguccgccagcaaagcuauuccaucaugugcaucaucaaagaggaaguccucgccuacguaguccaacugccccucuacggcgucauugauacccccugcuggaaacuccacaccuccccccucugcaccacaaacaccaaagaagguuccaacaucugccuaacacgaaccgacagaggcugguacugcgacaacgccggcagcgucuccuucuucccccaagcagaaaccuguaaaguccagucuaaccgcgucuucugcgacacaaugaacucaagaacccuaccuuccgaaguaaaccucugcaacguagacaucuucaacccuaaauacgacugcaaaaucaugacuucaaaaacagacguaagcucuuccguaaucacuucccucggcgccaucguauccugcuacgguaaaaccaaaugcaccgccuccaacaaaaaccgagggaucauaaaaaccuucuccaacggcugcgacuacguaucuaacaaaggcgucgacaccgucuccgucggcaacacccucuauuacguaaacaaacaagagggcaaaucacuauacgucaaaggcgagccaaucauaaacuucuaugacccacucgucuucccuucagacgaauuugaugccagcaucagccaagucaacgaaaaaaucaaccaaucacucgccuucauccgcaaaagcgacgaacuccuucacaacgucaacgcaggcaaaucaaccaccaacaucaugaucaccaccaucaucaucgucaucaucguuauccuacucagccucaucgcaguuggucuucuccuuuacugcaaagcccgcuccacccccgucacccucaguaaagaccaacucagcggaaucaacaacauagcauucuccaacuaaggacuaguaauaaggaaacuguaugaaugucugugggcaggaagugaagagauccuucuguaaagguuuuuggaauuaugucugcugaauaauaaacuuuuuugaaauaauaaaucugguagaaaaaugagaucuaaaaaaaaaaaaaaaaaaaaaaaaaaaaaaaaaaaaaaaaaaaaaaaaaaaaaaaaaaaaaaaaugcaucccccccccccccccccccccccccccccccaaaggcucuuuucagagccaccagaauu

SEQ ID NO: 3995 - RNA, 2277 nt, Artificial Sequence
  mRNA product Design d-3 comprising derived and/or modified sequence from HRSV(A2)__F_DSCav1_mut0 (opt1)
gggagagggcgcuuggcuugcaaggacccugagcugcggcauugaagcacacccaacccaacucgacugaagucagccucacugaaccggaucugagaaucuucucucucugggcuugccagggcucuccgaaccuagcuagcauccucuucaauuccaacuagaaagcuuaccauggagcugcucauccugaaggccaacgccaucaccaccauccugacggcggugaccuucugcuucgccagcggccagaacaucaccgaggaguucuaccaguccacgugcagcgccgucuccaagggguaccucagcgcccugcggaccggcugguacaccuccgugaucaccaucgagcugagcaacaucaaggagaacaagugcaacgggaccgacgccaaggugaagcucaucaagcaggagcuggacaaguacaagaacgcggucacggagcugcagcuccugaugcaguccaccccggcaaccggcuccggcuccgccaucgcgagcggcgucgccgugugcaaggugcugcaccucgagggggaggucaacaagaucaagagcgcccugcuguccaccaacaaggccguggugagccucuccaacggcgucagcgugcugaccuucaaggugcuggaccucaagaacuacaucgacaagcagcugcugcccauccugaacaagcagagcugcuccaucagcaacaucgagacggugaucgaguuccagcagaagaacaaccggcuccuggagaucacccgcgaguucagcgugaacgccggggucaccacccccguguccacguacaugcugaccaacagcgagcuccugucccugaucaacgacaugccgaucaccaacgaccagaagaagcucaugagcaacaacgugcagaucguccggcagcaguccuacagcaucaugugcaucaucaaggaggaggugcuggcguacgugguccagcugccccucuacggcgugaucgacacccccugcuggaagcugcacacgagcccccugugcaccaccaacaccaaggagggguccaacaucugccucacgcgcaccgaccggggcugguacugcgacaacgccggcagcgucuccuucuucccgcaggccgagaccugcaaggugcagagcaaccgcguguucugcgacaccaugaacucccggacgcugcccagcgagguaaaccucugcaacgucgacaucuucaaccccaaguacgacugcaagaucaugaccuccaagaccgacgugagcuccagcgugaucaccucccugggggccaucgucagcugcuacggcaagacgaagugcaccgccagcaacaagaaccgggggaucaucaagaccuucuccaacggcugcgacuacgugagcaacaagggcguggacaccguguccgucgggaacacccuguacuacgugaacaagcaggagggcaagagccucuacgugaagggggagcccaucaucaacuucuacgacccgcuggucuuccccuccgacgaguucgacgcgagcaucucccaggugaacgagaagaucaaccagagccuggccuucauccgcaaguccgacgagcugcuccacaacgugaacgccggcaagagcacgaccaacaucaugaucaccaccaucaucaucgucaucaucgugauccugcugucccucaucgccguggggcugcugcucuacugcaaggcccggagcacgcccgucacccuguccaaggaccagcugagcggcaucaacaacaucgcguucuccaacugaggacuagugaagggaacacccaaauuuaauucagccuuaagcacaauuaauuaagagugaaacguaauuguacaagcaguuggucacccaccauagggcaugaucaacaccgcaaccuuuccuuuuucccccagugauucugaaaaaccccucuucccuucagcuugcuuagauguuccaaauuuaguaagcuuaaggcggccuacagaagaaaaagaaaaaaaaggccacaaaaguucccucucacuuucaguaaauaaaauaaaagcagcaacagaaauaaagaaauaaaugaaauucaaaaugaaauaaauauuguguugugcagcauuaaaaaaucaauaaaaauuaaaaaugagcaagaucuaaaaaaaaaaaaaaaaaaaaaaaaaaaaaaaaaaaaaaaaaaaaaaaaaaaaaaaaaaaaaaaaugcaucccccccccccccccccccccccccccccccaaaggcucuuuucagagccaccagaauu

SEQ ID NO: 3996 - RNA, 2277 nt, Artificial Sequence
  mRNA product Design d-3 comprising derived and/or modified sequence from HRSV(A2)__F_DSCav1_mut0 (opt1)
gggagagggcgcuuggcuugcaaggacccugagcugcggcauugaagcacacccaacccaacucgacugaagucagccucacugaaccggaucugagaaucuucucucucugggcuugccagggcucuccgaaccuagcuagcauccucuucaauuccaacuagaaagcuuaccauggagcugcucauccugaaggccaacgccaucaccaccauccugacggcggugaccuucugcuucgccagcggccagaacaucaccgaggaguucuaccaguccacgugcagcgccgucuccaagggguaccucagcgcccugcgcaccggcugguacaccuccgugaucaccaucgagcugagcaacaucaaggagaacaagugcaacgggaccgacgccaaggugaagcucaucaagcaggagcuggacaaguacaagaacgcggucacggagcugcagcuccugaugcaguccacccccgccaccggcagcggguccgccaucgccagcggcguggcggugugcaagguccugcaccucgagggcgaggugaacaagaucaaguccgcccugcugagcaccaacaaggccguggucucccucagcaacgggguguccgugcugacguucaagguccuggaccucaagaacuacaucgacaagcagcugcugccgauccucaacaagcagagcugcuccaucagcaacaucgagaccgugaucgaguuccagcagaagaacaaccggcugcuggagaucacccgcgaguucuccgugaacgccggcgucaccacgcccgugagcaccuacaugcucaccaacagcgagcugcugucccucaucaacgacaugcccaucaccaacgaccagaagaagcugaugagcaacaacgugcagaucguccggcagcaguccuacagcaucaugugcaucaucaaggaggaggugcuggccuacgugguccagcucccccuguacggggugaucgacacgccgugcuggaagcugcacaccagcccccucugcaccaccaacacgaaggagggcuccaacaucugccugacccgcaccgaccgggggugguacugcgacaacgcgggcuccgugagcuucuucccccaggccgagaccugcaagguccaguccaaccgcguguucugcgacacgaugaacagccggacccuccccuccgaggucaaccugugcaacguggacaucuucaacccgaaguacgacugcaagaucaugaccagcaagaccgacguguccagcuccgucaucacgagccugggcgccaucguguccugcuacgggaagaccaagugcaccgccagcaacaagaaccggggcaucaucaagaccuucuccaacgggugcgacuacgugagcaacaagggcgucgacacggugagcgugggcaacacccucuacuacgucaacaagcaggaggggaagucccuguacgugaagggcgagcccaucaucaacuucuacgacccccugguguuccccagcgacgaguucgacgccuccaucagccaggucaacgagaagaucaaccagucccucgcguucauccgcaagagcgacgagcugcugcacaacgugaacgccgggaaguccaccaccaacaucaugaucaccacgaucaucaucgugaucaucgucauccuccugagccugaucgccgugggccuccugcuguacugcaaggcccgguccaccccggugacccugagcaaggaccagcucuccgggaucaacaacaucgccuucagcaacugaggacuagugaagggaacacccaaauuuaauucagccuuaagcacaauuaauuaagagugaaacguaauuguacaagcaguuggucacccaccauagggcaugaucaacaccgcaaccuuuccuuuuucccccagugauucugaaaaaccccucuucccuucagcuugcuuagauguuccaaauuuaguaagcuuaaggcggccuacagaagaaaaagaaaaaaaaggccacaaaaguucccucucacuuucaguaaauaaaauaaaagcagcaacagaaauaaagaaauaaaugaaauucaaaaugaaauaaauauuguguugugcagcauuaaaaaaucaauaaaaauuaaaaaugagcaagaucuaaaaaaaaaaaaaaaaaaaaaaaaaaaaaaaaaaaaaaaaaaaaaaaaaaaaaaaaaaaaaaaaugcaucccccccccccccccccccccccccccccccaaaggcucuuuucagagccaccagaauu
